United States Patent Application Publication US 2018/0126003 A1 - sequence listing, part 62

SEQ ID NO: 110923 - DNA, 2046 bp, Artificial Sequence
  derived and/or modified sequence
atggatatggggactattaaacgcaggctagaaaataactactattgggcggcctccgaatgcatgcaggattttaataccatgtttacaaattgttatatttacaacaagcccacagacgacattgtgttaatggcacagaccttggagaagatcttcttgcagaaagtggcctctatgcctcaggaagagcaggagttagttgttacaatcccaaagaactcgcataagaaaggcgctaagctggctgcactacaggggagtgtaacgagcgcacatcaagtgcccgctgtgagttcagtcagccacactgctctgtatacaccgcctccagagattcctaccactgtgtttaacattccacaccctagtgtcatctcatcccccttgcttaagtctctccacagcgccggtccaccactattggctgtcaccgccgcaccccccgcacagcctctcgctaagaaaaagggagttaaacgcaaggctgacactacaacacccacaccaactgccatacttgcccccgggtcccctgccagtccccccggcagcctcgagcctaaggcagcaaggctccctccgatgcgccgcgagtcaggtaggccgataaaacccccgcggaaagatcttcccgacagtcagcaacaacaccaaagcagcaaaaaaggcaaactttccgaacaacttaaacactgtaatggcattctaaaagaactgctgagtaagaagcatgcagcttacgcatggcccttctataagcctgttgatgccagcgcactgggcctccacgattatcatgacatcatcaaacaccccatggatctttctactgtgaagcggaaaatggagaacagggactacagagacgcccaggagttcgcggccgatgtgcgtctgatgttcagcaattgttataaatataatcctcctgaccatgacgttgtggccatggcccgcaagcttcaggacgtcttcgaattcaggtatgcaaagatgccagatgaacccctggagcccgggccactgcctgtcagtacagctatgcctccaggcctggcaaaatctagttcggagagcagctcagaagagagctcaagtgagagctcaagcgaagaggaggaggaagaagatgaagaagatgaggaggaagaagagagcgagtccagcgacagcgaggaagagagggcccacagactcgccgaactgcaggagcagcttcgcgccgtgcacgaacagctggctgccctgtcccaggggcctatttctaaaccaaagagaaaaagggagaagaaagagaagaaaaagaaaaggaaagcagagaaacataggggccgggctggcgctgacgaagacgataaaggacccagagcacccagacctccccagcccaaaaaaagcaagaaagcctctggatcaggtggcggctcagccgctctggggccctcaggttttgggccaagcggcgggtcaggaacgaaacttccgaaaaaagctacaaaaaccgccccaccggcactaccaaccggatatgactctgaggaggaggaggaaagtcggccaatgagttatgacgagaagagacagctgtccctcgacatcaataaactgccaggcgagaagttgggacgcgtggtccatatcatccaggcccgggaaccaagcttacgggactccaaccccgaagaaatagagattgactttgagaccttgaagcctagtaccctcagggagcttgaaaggtatgtgctcagttgtcttagaaaaaagccccggaagccatatacaatcaagaagcccgttggtaaaacaaaggaagagcttgcgctcgaaaaaaagcgagagctggaaaaaagattgcaagatgtctcggggcagttgaatagcactaagaaacctccgaagaaggccaatgaaaaaactgagtcatcctctgcccagcaggtggcggtcagcaggctaagcgcctcttcatcctcctccgacagcagtagctcttccagttcctcttcctctagtgacaccagcgacagtgacagcggttag

SEQ ID NO: 110924 - DNA, 2046 bp, Artificial Sequence
  derived and/or modified sequence
atggacatggggactatcaaacggcgcctcgagaataactactattgggctgcgagcgaatgcatgcaggattttaacacaatgtttactaactgttacatctacaacaaacctaccgacgatattgtgctcatggcccagaccctcgaaaaaatatttctacagaaagttgccagcatgcctcaagaagagcaggaattggtagttacaattcccaagaactcccataagaagggagctaagttagctgctctacaaggatccgtgaccagcgcccaccaagtaccggctgtctcgagcgtgtcccacaccgccctgtatactccacctccggagatccctactacagtgctgaatatccctcaccccagcgtcatctctagccctctgttaaaaagcctacattccgccgggcctcctctgttggccgtcacagcagccccaccggctcagcctttagctaagaagaaaggagtgaagcgcaaggcagataccacaacgcccaccccgaccgccatccttgctccaggcagtccagcctcacccccgggctcccttgagcctaaggcggcccgactgccacctatgcggagggaaagcggacgtcccatcaagcctccaaggaaagacctccccgactctcagcagcagcatcagtccagtaagaagggcaagttgagtgaacagctgaagcattgcaacggaatcctgaaggagctcctgtccaaaaagcacgcagcatacgcctggccgttctataagcctgtagatgcttcagctcttggactgcacgactaccacgacattatcaaacatccgatggatttaagtacagtgaagcggaagatggagaatagagattatcgtgatgcccaagagtttgccgcggatgtgcggttaatgttttccaattgttataaatataaccccccagaccatgacgtagtggccatggcacggaaattacaagatgtgtttgaatttagatacgccaagatgcctgacgaacctcttgagccaggtcccctccctgtctccaccgccatgccccctgggttagccaaaagcagcagcgagtcatcatcggaagagtccagttcagagtcctcaagcgaagaagaggaagaggaagacgaggaagatgaagaagaagaagagagtgagtcaagtgactcagaagaagagcgagcacacaggttggctgaactccaggaacagctccgtgctgttcacgagcagctggccgcactttcccagggtccaatctccaagcccaaaaggaaacgcgagaaaaaagaaaaaaaaaagaaaaggaaagcggagaagcaccgtggtagggctggggctgacgaagacgataaaggtccacgtgccccccggcctcctcaacccaaaaagtcaaaaaaggccagtggctccggtggcggttccgccgctctgggcccaagtgggtttggtccctcggggggctcagggaccaagctaccaaagaaggccacaaaaaccgcacctcccgcccttccaaccggctatgactccgaagaggaggaggaatcccgtcccatgtcatacgacgagaagcgccagttatccttggatatcaataaacttcccggcgagaagctcggaagggtggtacatatcatccaggcccgtgagccatcgctgagggattccaaccccgaggaaattgagatcgactttgaaactctgaaaccttcaaccctcagagagcttgaaagatacgtgctaagttgcttacgaaagaagccacggaaaccctacactattaagaagcctgttgggaagaccaaggaggaactggcccttgagaagaaaagggaacttgagaaacgcttgcaagacgtgagtggccagctcaactcgacaaagaaaccaccgaagaaagcaaacgaaaaaactgaatcatcatctgcccagcaggtagccgtgtcacggctgtcagcgagcagctcctcctcagactcctcgtccagctcatccagctccagttccagcgatacttccgatagcgactctggctag

SEQ ID NO: 110925 - DNA, 2046 bp, Artificial Sequence
  derived and/or modified sequence
atggacatggggaccatcaagaggcggctggagaacaattactactgggctgcttcagagtgcatgcaggacttcaataccatgtttactaattgttacatctacaacaagccaacagacgacattgtgctgatggctcagacacttgaaaaaattttcctgcaaaaggttgccagtatgccccaggaagagcaggagctggtggtgacgatccctaagaattctcataagaagggggccaaactcgccgccctgcagggaagcgttactagtgcccatcaggtgcccgctgtgtcatctgtgtctcataccgcgctctatacacctcctccggagattcccactacagtgctgaacatccctcatccttcagtaatctcttccccgctgcttaagtctctccatagtgccggcccacccctgctggccgtgacggctgccccgccggcgcagccactggctaagaaaaagggcgttaagaggaaagctgatacaactacccctactcccactgcaatattggcaccaggttcaccggctagcccacctgggtcactggaacctaaggcagcccgcttgccaccaatgagacgcgaatccggtaggccaattaaacctcccagaaaggacttgcctgactcacaacaacagcaccaatctagcaaaaaggggaagttgtccgagcagctaaaacactgcaacggaatcctcaaggagctgctgagtaaaaaacacgctgcatatgcttggcccttttataagcctgtggatgcatcggccctgggtctacacgactaccatgacattatcaagcatcccatggatctttcgactgtgaagaggaagatggagaacagggactatagggacgcgcaggaatttgctgcggacgtccggctgatgttctctaactgttacaaatataaccctcctgaccacgacgtcgttgcgatggcccgcaaattacaggacgtttttgagtttagatatgccaaaatgcccgacgagccgctcgagcctggccccctgccggtgtctacagccatgcccccaggactggccaaatcaagttcggaatcctcatcagaagagtcttcctccgaatcctcctcagaggaagaagaggaggaggatgaggaagatgaagaggaggaggaaagcgagagcagcgatagcgaggaggaacgggctcacaggctcgctgagctccaggagcagttaagagccgtgcatgagcagctggctgccctgtcccagggacccatttctaaaccaaaacgtaagagagaaaagaaagagaagaagaagaagaggaaagcggaaaagcacagggggagggccggggcagacgaggacgacaaaggtcccagggcccccagacccccccagccgaagaagtccaaaaaagctagcggaagcgggggcggtagtgccgctttgggtcctagtggttttgggccgtcgggagggtctggtaccaagctgcccaagaaagcgaccaaaacagccccacctgcattacctacaggatatgactccgaagaggaggaagagagcaggcctatgtcctatgatgaaaaacggcagctttcactggacataaataagctgccaggcgagaagctgggaagggtcgtgcacatcattcaggcccgcgagccctcgcttcgggatagcaatcccgaggagattgaaatcgactttgagactctgaagccatccacccttagggaactcgaaagatatgtactgtcatgccttcggaaaaagcctaggaaaccatataccataaaaaaaccagtagggaagaccaaggaggaactcgcccttgagaagaagcgggagctcgaaaaacgccttcaggacgtgtccggccagctgaatagcaccaagaaacccccaaaaaaggctaacgaaaaaaccgagtcttcgagcgcccagcaggtggccgtatctcgcttgtcggccagtagtagcagttccgacagctctagctcttcctctagttcctcctcatcagatacgagcgacagtgattcaggatag

SEQ ID NO: 110926 - DNA, 2046 bp, Artificial Sequence
  derived and/or modified sequence
atggacatgggcacaattaagcgacgactggaaaataattactattgggctgctagcgagtgcatgcaggatttcaacactatgtttactaattgctacatctacaacaagcccaccgacgatattgtgcttatggctcagacactcgaaaagatttttctgcaaaaggttgcgagcatgccacaggaggaacaggaactggtggttactatccctaaaaattctcataaaaagggagctaaattagcagccctgcagggcagtgtgacgtcagcccaccaggtaccagcagtatcctccgtgtcccacaccgcactttacacaccccctccggagattcctaccactgtcctgaatatcccacatccctccgttatttcgtcaccactacttaaatctctgcactccgcaggtcctcctttacttgccgtgacggcagcccccccagctcagccccttgcaaagaaaaaaggagtgaagagaaaggccgacactaccacgcccacacccaccgcaattctcgccccagggagcccagctagtcccccgggttccctggaaccgaaggccgccaggttaccgcccatgcgccgggaatcaggacggcccatcaagccaccaaggaaagatctgccggactcgcagcagcaacatcagtccagcaaaaaagggaagctgagtgagcagctgaagcactgcaatggcattttgaaggaactgctgtccaagaagcatgccgcctatgcatggccattttacaaacctgtcgatgcctcggccctgggactgcatgactaccatgatataatcaagcaccctatggacctttcgaccgtaaagcggaaaatggagaacagggattacagagatgcgcaggaattcgcggccgatgtacgattgatgttcagcaactgttacaagtataaccctcccgatcacgacgtggtggcaatggctagaaagttacaggatgttttcgaatttaggtatgccaagatgcctgacgagcctttggaacccggaccccttccagtgtccacagcaatgcctccaggtctagccaaatccagtagtgagagtagcagtgaggaaagcagctctgaatcttccagcgaggaggaggaggaggaggacgaagaggacgaggaagaagaggagtctgagtcaagcgactcggaagaggaacgcgcccaccgccttgctgagctgcaggagcaactgagggccgtccacgagcagctggctgctctgagccagggaccaatctccaagccgaagcgaaagcgggagaagaaggagaagaaaaagaagagaaaagctgaaaaacaccggggtcgggctggcgccgacgaagatgacaagggtcctcgcgctccaaggcccccacagcccaaaaagagcaagaaggccagtggcagcgggggcggatcagctgccctgggtccttccgggttcgggccctctggcggatccggcacaaaattgccgaagaaggcgacaaaaactgccccccccgccttacctacaggctacgactccgaagaggaagaagaatctaggcccatgtcttacgatgagaagcgacaactgtcgctggatataaataagctacctggggagaagctcggcagagtggtgcacatcattcaggccagggagccctccttgagagactcaaatcccgaagagattgaaatagattttgaaaccctcaaaccatcaacgttgcgtgagttggagaggtatgtgctgagttgcctccgcaagaaaccaagaaaaccctacactattaagaagcctgtgggaaaaacaaaggaggaattggccctggaaaagaagcgcgagctcgaaaagaggcttcaagacgtaagtggccagctaaattccacaaaaaaaccccctaaaaaagccaacgagaaaaccgagtctagcagtgcccaacaggtggctgtaagccggctgagcgcgagttctagctcgtccgatagttcctcgagttcatcctctagttcttcttcagatacttctgattcggattccggatag

SEQ ID NO: 110927 - DNA, 987 bp, Artificial Sequence
  derived and/or modified sequence
tgagccaagagcagcagcgagagcagcagcgaggagagcagcagcgagagcagcagcgaggaggaggaggaggaggatgaagatgaggaggaggaggagagcgagagcagtgacagcgaggaggagcgggcccaccggctggccgagctgcaggagcagctgcgggctgtgcatgagcagctggccgccctgagccagggccccatcagcaagcccaagaggaagcgggagaagaaggagaagaagaagaagaggaaggccgagaagcaccggggccgggccggggctgatgaagatgacaagggcccccgggccccccggcccccccagcccaagaagagcaagaaggccagcggcagcggcggcggcagcgctgccctgggccccagcggcttcggccccagcggcggcagcggcaccaagctgcccaagaaggccaccaagacagcccccccagccctgcccaccggctatgacagcgaggaggaggaggagagccggcccatgtcctatgatgagaagaggcagctgagcctggacatcaacaagctgcctggagagaagctgggccgggtggtgcacatcatccaggcccgggagcccagcctgcgggacagcaaccctgaggagattgaaattgactttgagaccctgaagcccagcaccctgcgggagctggagagatatgtgctgagctgcctgaggaagaagcccaggaagccctacaccatcaagaagcctgtgggcaagaccaaggaggagctggccctggagaagaagcgggagctggagaagaggctgcaggatgtgtctggccagctgaacagcaccaagaagccacccaagaaggccaatgagaagacagagagcagcagcgcccagcaggtggccgtgtcccggctgagcgccagcagcagcagcagtgacagcagcagcagcagcagcagcagcagcagcagtgacaccagtgacagcgacagcggctag

SEQ ID NO: 110928 - DNA, 2046 bp, Artificial Sequence
  derived and/or modified sequence
atggacatgggcaccatcaagaggcggctggagaacaactactactgggccgccagcgagtgcatgcaggacttcaacaccatgttcaccaactgctacatctacaacaagcccacagatgacatcgtgctgatggcccagaccctggagaagatcttcctgcagaaggtggcctccatgccccaggaggagcaggagctggtggtgaccatccccaagaacagccacaagaagggggccaagctggccgccctgcagggctctgtgaccagcgcccaccaggtgcctgctgtgtcctctgtgagccacacagccctgtacaccccacctcctgagatccccaccaccgtgctgaacatcccccaccccagcgtcatcagcagccccctgctgaagagcctgcacagcgctggcccccccctgctggccgtgacagctgcccccccagcccagcccctggccaagaagaagggcgtgaagaggaaggctgacaccaccacccccacccccacagccatcctggcccctggcagccctgccagccccccaggcagcctggagcccaaggccgcccggctgccccccatgagaagagagagcggccggcccatcaagccacccaggaaggacctgcctgacagccagcagcagcaccagagcagcaagaagggcaagctgtctgagcagctgaagcactgcaatggcatcctgaaggagctgctgagcaagaagcacgccgcctatgcctggcccttctacaagcctgtggatgccagcgccctgggcctgcatgactaccatgacatcatcaagcaccccatggacctgagcacagtgaagaggaagatggagaacagagactacagagatgcccaggagtttgctgctgatgtgcggctgatgttcagcaactgctacaagtacaaccccccagaccatgatgtggtggccatggccaggaagctgcaggatgtgtttgagttccgctatgccaagatgccagatgagcccctggagcccggccccctgcctgtgtccacagccatgcctcctggcctggccaagagcagcagcgagagcagcagcgaggagagcagcagcgagagcagcagcgaggaggaggaggaggaggatgaggaggatgaggaggaggaggagagcgagagcagtgacagcgaggaggagcgggcccaccggctggccgagctgcaggagcagctgcgggctgtgcatgagcagctggccgccctgagccagggccccatcagcaagcccaagaggaagcgggagaagaaggagaagaagaagaagaggaaggccgagaagcaccggggccgggccggggctgatgaagatgacaagggcccccgggcccccaggcctccccagcccaagaagagcaagaaggccagcggcagcggcggcggcagcgctgccctgggccccagcggcttcggccccagcggcggcagcggcaccaagctgcccaagaaggccaccaagacagcccccccagccctgcccaccggctatgattctgaggaggaggaggagagccggcccatgtcctatgatgagaagaggcagctgagcctggacatcaacaagctgcccggggagaagctgggccgggtggtgcacatcatccaggcccgggagcccagcctgcgggacagcaaccctgaggagattgaaattgactttgagaccctgaagcccagcaccctgcgggagctggagcgctacgtgctgagctgcctgaggaagaagcccaggaagccctacaccatcaagaagcctgtgggcaagaccaaggaggagctggccctggagaagaagcgggagctggagaagaggctgcaggatgtgtctggccagctgaacagcaccaagaagccacccaagaaggccaatgagaagacagagagcagcagcgcccagcaggtggccgtgtcccggctgagcgccagcagcagcagcagtgacagcagcagcagcagcagcagcagcagcagcagtgacaccagtgacagcgacagcggctag

SEQ ID NO: 110929 - DNA, 2046 bp, Artificial Sequence
  derived and/or modified sequence
atggacatgggcaccatcaagaggcggctggagaacaactactactgggccgccagcgagtgcatgcaggacttcaacaccatgttcaccaactgctacatctacaacaagcccacagatgacatcgtgctgatggcccagaccctggagaagatcttcctgcagaaggtggcctccatgccccaggaggagcaggagctggtggtgaccatccccaagaacagccacaagaagggggccaagctggccgccctgcagggctctgtgaccagcgcccaccaggtgcctgctgtgtcctctgtgagccacacagccctgtacaccccacctcctgagatccccaccaccgtcttcaacatcccccaccccagcgtcatcagcagccccctgctgaagagcctgcacagcgctggcccccccctgctggccgtgacagctgcccccccagcccagcccctggccaagaagaagggcgtgaagaggaaggctgacaccaccacccccacccccacagccatcctggcccctggcagccctgccagccccccaggcagcctggagcccaaggccgcccggctgccccccatgagaagagagagcggccggcccatcaagccacccaggaaggacctgcctgacagccagcagcagcaccagagcagcaagaagggcaagctgtctgagcagctgaagcactgcaatggcatcctgaaggagctgctgagcaagaagcacgccgcctatgcctggcccttctacaagcctgtggatgccagcgccctgggcctgcatgactaccatgacatcatcaagcaccccatggacctgagcacagtgaagaggaagatggagaacagagactacagagatgcccaggagtttgctgctgatgtgcggctgatgttcagcaactgctacaagtacaaccccccagaccatgatgtggtggccatggccaggaagctgcaggatgtgtttgagttccgctatgccaagatgccagatgagcccctggagcccggccccctgcctgtgtccacagccatgcctcctggcctggccaagagcagcagcgagagcagcagcgaggagagcagcagcgagagcagcagcgaggaggaggaggaggaggatgaggaggatgaggaggaggaggagagcgagagcagtgacagcgaggaggagcgggcccaccggctggccgagctgcaggagcagctgcgggctgtgcatgagcagctggccgccctgagccagggccccatcagcaagcccaagaggaagcgggagaagaaggagaagaagaagaagaggaaggccgagaagcaccggggccgggccggggctgatgaagatgacaagggcccccgggcccccaggcctccccagcccaagaagagcaagaaggccagcggcagcggcggcggcagcgctgccctgggccccagcggcttcggccccagcggcggcagcggcaccaagctgcccaagaaggccaccaagacagcccccccagccctgcccaccggctatgattctgaggaggaggaggagagccggcccatgtcctatgatgagaagaggcagctgagcctggacatcaacaagctgcccggggagaagctgggccgggtggtgcacatcatccaggcccgggagcccagcctgcgggacagcaaccctgaggagattgaaattgactttgagaccctgaagcccagcaccctgcgggagctggagcgctacgtgctgagctgcctgaggaagaagcccaggaagccctacaccatcaagaagcctgtgggcaagaccaaggaggagctggccctggagaagaagcgggagctggagaagaggctgcaggatgtgtctggccagctgaacagcaccaagaagccacccaagaaggccaatgagaagacagagagcagcagcgcccagcaggtggccgtgtcccggctgagcgccagcagcagcagcagtgacagcagcagcagcagcagcagcagcagcagcagtgacaccagtgacagcgacagcggctag

SEQ ID NO: 110930 - DNA, 987 bp, Artificial Sequence
  derived and/or modified sequence
tgagccaagagcagcagcgagagcagcagcgaggagagcagcagcgagagttccagcgaagaagaggaggaagaagatgaggacgaggaagaggaggagtcggagtcaagcgacagcgaagaggagagagcgcatcggctggccgaactgcaggaacagctccgcgctgttcatgaacagcttgctgcgttatcccaggggcccatcagtaagcccaagcgcaagcgcgagaaaaaggaaaaaaaaaagaagagaaaggcagaaaagcatagaggccgagccggagcagatgaggatgataagggacctagggctccacgacccccccagcctaagaagtcgaaaaaggcttccggatctggcgggggatccgccgctctcggcccatccgggttcggtcccagcggcggaagcggcaccaaactccccaagaaagctactaagacagcaccacccgctttgccaacaggatacgattcggaggaggaggaggagtcccgacctatgagctacgacgagaaacgccagttaagcctggatatcaataaacttcctggtgagaaactgggcagggtggtccacatcatccaggcacgcgagccatcactgcgtgattctaatcccgaagaaattgaaattgactttgagacccttaagccctccaccctgagagaattagagaggtacgtactgtcctgcctccggaaaaaacctcgaaaaccctataccatcaagaagccggtgggaaagacaaaagaagaattagctctggaaaagaagagggaattggaaaagcgcctccaagatgtatccggacagttgaacagcaccaagaaaccacctaaaaaggctaacgaaaaaactgagtccagctctgctcagcaggtggcggtgagtcggctttctgcctcctcatcctcttcagatagcagcagttcatcctcatcttccagttccagtgatacctccgactcggacagcggctag

SEQ ID NO: 110931 - DNA, 2046 bp, Artificial Sequence
  derived and/or modified sequence
atggacatgggcaccatcaagcggcggctggagaacaactactactgggcagcaagcgagtgcatgcaagactttaataccatgtttaccaattgctacatctataataagccaacggacgacatagtcttaatggcgcagactctcgaaaagatctttctccagaaggtcgccagtatgccacaagaggagcaagagcttgtggtcacaattccaaaaaattcccacaaaaagggggccaagctggccgccctacagggctcagttactagcgcacaccaggtgccagctgtgtcttccgtcagccataccgcattgtatacaccaccacccgaaattcctaccaccgtgctgaatatccctcatccttctgtgatctcgtcccccctgttgaagagcctacacagcgcgggcccacctcttctcgctgtaacagccgctcctccagcccagccactcgcgaagaaaaaaggggtcaaaagaaaggctgatactacgacccccacgccaaccgccatcctggcaccaggatccccagctagccctccggggagtctggagccgaaagccgcccggctgcccccaatgagacgagaatccgggcggccgatcaagccaccgaggaaggatctgccggattcccagcagcagcatcagtccagtaagaagggaaagctgagcgagcagctcaaacattgcaatgggatcctgaaagaactgctcagtaagaagcacgcagcttatgcgtggcccttctataagcctgtagatgccagtgcactggggctgcatgattatcacgatatcattaaacaccccatggaccttagcacagtaaagagaaaaatggaaaacagggattatcgcgacgcccaggaatttgcggccgatgtcagattgatgttttcgaactgctacaaatataatccacctgaccatgacgtcgtggcaatggcgcggaaattgcaggacgtgttcgagttcaggtatgctaagatgcccgatgagccgcttgaaccaggccccctgccagttagcactgccatgcccccgggtcttgccaagtccagtagcgaatcttccagtgaagaatcatcttctgagtcgtctagcgaggaggaggaggaggaagatgaagaagacgaggaggaggaggaatctgaatctagcgatagtgaagaagagcgggcacaccgcctggccgagctgcaggaacagcttagagccgtccacgaacagctcgctgctctaagtcaggggcctatctccaagccgaagaggaagcgagagaagaaggaaaagaaaaagaaacgtaaagccgagaagcacaggggacgcgctggagctgatgaggatgacaaaggcccccgagcgcctcgaccaccccagcccaaaaagagcaaaaaagcctccggcagcggtggtggcagtgctgcccttgggccatccgggttcgggccctccgggggatctggaacaaaactccccaaaaaagccacgaaaacggccccccctgccctgcctaccgggtatgacagcgaggaagaagaagaaagccgccccatgtcctacgacgaaaaaaggcagctatccttggatataaacaaactccctggcgagaaacttggaagagttgtgcacatcatacaggcacgcgaacccagcctgcgggatagcaaccctgaggagatcgaaatcgatttcgagactctgaaacctagcactctgagggaactggagcgctacgttctctcatgcctgaggaaaaaacctcgcaagccttatacgataaaaaaacctgtggggaagacaaaagaagagctggctcttgagaagaaacgggagcttgaaaagagactccaagacgtgtctgggcaattgaactccaccaagaagcctccaaaaaaggcaaacgagaaaacagaatctagttcagcacagcaagtagcagtttcccggctgtcagcaagttcgagttcgtcagattcgagctcgagttccagttcctccagttcatctgatacctccgacagcgacagcggatag

SEQ ID NO: 110932 - DNA, 987 bp, Artificial Sequence
  derived and/or modified sequence
tgagccaagagcagcagcgagagcagcagcgaggagagcagcagcgaatcgtctagcgaggaggaagaagaagaagatgaagacgaagaagaggaggagtccgagtcttctgactcagaggaagaacgggcccacaggctggcagagttacaggagcagttacgggccgtgcacgaacagctagcagcactgtcacaaggacccatctccaagccaaaacgtaagcgggagaagaaagaaaagaagaagaaacgtaaagccgagaagcatagggggcgcgctggcgccgatgaggacgataagggccctcgtgcgcctaggccaccgcagccaaaaaagtcgaagaaggcgagtggtagtgggggcgggtctgcggctcttggccccagtggtttcggaccctctggcgggagcgggaccaagcttcccaagaaggccacaaagactgcaccacctgccctgcccacaggatacgacagcgaagaagaggaggagagcaggcccatgtcctacgacgagaagagacagctgtcccttgacattaacaagctccctggcgagaaactgggtcgtgtggtgcatatcatccaggcccgagaaccctctctgcgagattctaatcctgaggaaatcgagattgatttcgagacccttaagccctccacactgagagaactcgagcggtacgtgctctcctgtttgagaaagaagccgagaaagccttacacgatcaagaagccagtaggcaagacaaaggaggaactcgcacttgagaagaaacgggagttggagaagaggctgcaggatgtctcaggccagctcaattctaccaagaagcctccaaagaaggccaatgaaaaaaccgaatcatcttcggcgcagcaggtggcagtgtcccgattgtccgcttctagcagttcctccgattcttcctcatcctcctcgtccagcagttcctctgacactagcgattccgattcaggttag

SEQ ID NO: 110933 - DNA, 987 bp, Artificial Sequence
  derived and/or modified sequence
tgagccaagagcagcagcgagagcagcagcgaggagagcagcagcgagtcctcttcagaagaggaagaggaagaggacgaagacgaagaagaagaggagtctgagagctctgattcagaggaggagagggctcatcggctcgcggaacttcaggaacaactgagagccgtgcatgagcaactggctgccctttcccaggggcccatctcgaagcccaaacggaaaagggagaaaaaagagaaaaaaaagaaaaggaaagcggagaagcacagaggtcgagcgggtgccgatgaagatgacaaaggaccacgggccccacggcctccccagccaaagaaatctaaaaaggcttccggatccggtggaggtagtgctgcactcggaccctcaggatttggaccctctggtggctccggtactaaactgccaaagaaggctaccaaaacggctccacctgccttgcccaccgggtatgactccgaggaggaggaggagtctcgtcccatgtcctacgacgagaaacgccagcttagcctggatattaataagttgccaggcgaaaaactgggaagggtcgtgcatatcatccaggcaagggaaccaagcctgcgcgattcaaacccagaggagatcgagattgacttcgagactctgaaacccagcacgctgcgggaactcgagaggtacgtcctgtcctgcctacgcaaaaagcctcggaagccctacactatcaagaaaccagtaggtaaaactaaagaggaattggccctcgaaaaaaagcgggaactcgagaagaggctccaggatgtgagcggtcagttgaattctactaagaaaccgccaaagaaggcgaatgagaaaactgagtcctcctccgcgcaacaagtagccgtgagtaggctcagtgcctccagttccagctccgatagctcaagctcatcttcttccagctcgagcagcgacacatccgactctgactctggctag

SEQ ID NO: 110934 - DNA, 987 bp, Artificial Sequence
  derived and/or modified sequence
tgagccaagagcagcagcgagagcagcagcgaggagagcagcagcgaatcgtcttcggaggaagaggaagaggaggatgaggatgaggaggaagaagaatcagaatctagtgacagcgaggaagagcgggcacatcgcctcgctgaactccaggaacagcttcgagcagtgcacgagcagcttgcagccctcagtcagggtcccatatctaagcccaaacgaaaacgcgaaaagaaggaaaagaaaaagaaaagaaaagctgaaaagcaccgagggagagccggcgcggatgaggacgacaagggtccaagagcacccaggccaccacagcctaaaaaatccaaaaaagcctccggctcagggggaggtagcgccgcactcggacccagcgggttcggccccagcggcggctcgggaacgaagctgcctaagaaggccacgaaaacagcccctccggctcttcctaccggctatgattcggaagaagaggaagaaagtcggcccatgagctacgacgaaaagcggcagctttccttggacatcaataaactacccggcgagaaactgggccgagtagtccacatcatccaagccagggaacctagcttgagagattcaaatccggaggagatcgaaattgatttcgagactcttaagccgagcaccctgagagagcttgagcggtatgtcttgagttgtctgcgcaagaaaccgaggaaaccctacacgataaaaaaaccagtcggcaaaactaaagaagagctagccctggagaagaaacgtgagcttgaaaaacggcttcaagacgtttccggtcaactaaacagcaccaaaaaacccccaaaaaaagccaacgagaagactgagagcagttctgcacagcaggtcgcagtgtcaagactgagtgcatcatccagttcatcagattcctcttctagctccagtagttcatcttctagcgacacttctgattccgattctggatag

SEQ ID NO: 110935 - DNA, 2046 bp, Artificial Sequence
  derived and/or modified sequence
atggacatgggcaccatcaagcggcggctggagaacaactactactgggccgcttcagagtgcatgcaagacttcaataccatgtttactaactgctatatttataacaaacccacggatgatattgtgctgatggcacagactctcgagaaaatattccttcagaaggtagccagtatgccacaggaggaacaggaattggtcgtcacaatccctaagaactcacacaagaagggagccaagctggcagccctgcagggtagtgtcaccagcgcccaccaggtcccggctgtgtccagtgtgagccacacggccctgtacacaccacctcctgagattcccacgaccgtattcaacattccccatcccagtgtgatttcttcacccttgctgaagtcattgcacagcgccgggccacccctcctcgccgtcactgcagcccccccagcgcagccactggctaaaaagaagggcgtgaagcgcaaggccgacacgacaacacccacccccacagctatcttggcccccggttctcccgcctccccccctggcagtctcgagccaaaagctgcccggttgccccccatgaggcgagaatctggccggcccattaagccgccccgcaaagacctgcccgacagtcagcagcaacatcagtcttccaaaaaagggaagttgtccgagcagctcaagcattgtaatggcatcctgaaggagctcctgtccaagaagcatgcggcttatgcatggccgttctacaagcccgtcgacgccagtgcactgggtttgcacgattatcatgacatcatcaaacatcctatggacttgagtaccgtgaaacggaagatggagaatcgggattatcgggatgcacaggaatttgctgccgacgtacgactgatgtttagcaactgttacaagtacaatcctcctgaccatgacgtcgtcgccatggctcgaaagcttcaagacgtatttgaattccggtacgcgaagatgcctgacgagcctttggagccggggcctctcccggtgtcaacagccatgccccctggattggctaaatcatcctccgagagctcgtcggaggagtcatcctcagaaagcagttctgaagaggaggaggaagaggacgaggaagacgaggaggaagaggagagcgagtcatccgacagcgaagaagaaagggctcatcgcctcgccgaattgcaggagcagcttcgagcagtgcatgagcagctcgctgccttgtcccaaggtcccatttccaagcccaaacgaaaacgtgagaagaaggagaagaagaaaaaacgaaaggcagagaagcaccgaggccgcgccggagccgatgaggacgacaagggcccacgagcccctcggcctccccagccaaaaaagagtaagaaggcttctggaagcggtggcgggtccgctgcacttggaccatccggcttcggtccttccggggggagcggcaccaagctgccaaagaaggccaccaagaccgcaccgcccgcactgcctactggttacgacagcgaagaggaagaggaatccagacccatgtcttacgatgagaagcggcagttgtcgcttgacattaataaattacccggtgaaaaactggggcgggtcgtgcatattatccaggcgcgcgagccctcgctacgggatagcaatcccgaagagattgagattgatttcgaaacactgaagccctccactttgcgtgaactggagcggtatgtgctgagctgcttgagaaagaagcctcgtaaaccttacaccatcaaaaaacccgtagggaaaaccaaagaggagcttgcgctagaaaagaaaagagagctagagaaacgcctgcaggacgtttccggtcaattaaatagcacaaagaagccacccaagaaagcaaacgaaaagaccgagtcctccagcgctcagcaggtcgccgtcagtcgtctctccgctagtagcagtagctcagattccagcagcagctcttcatcatcaagttcaagcgatacctctgattcagactcagggtag

SEQ ID NO: 110936 - DNA, 2046 bp, Artificial Sequence
  derived and/or modified sequence
atggacatgggcaccatcaagcggcggctggagaacaactactactgggcagctagcgaatgtatgcaagactttaataccatgtttacaaactgctacatctataacaaaccgaccgacgacattgttctgatggcacagactcttgagaagatctttctccaaaaagtggcatcaatgcctcaggaggaacaggagctggtagtaacaattcccaaaaattcacacaagaaaggcgccaagctcgcggctttgcaggggtccgtgacgagtgcacatcaagttcctgccgtgtctagtgtatcgcacacagccctttacacaccaccccctgaaatcccaactaccgtacttaacataccccatccctcagttatcagcagcccactactaaaaagcctgcattctgccggccccccgctgctcgcagtgaccgcagccccaccggcgcagccattggcgaagaaaaaaggcgtgaaacgtaaagctgacaccacgacccctacaccaactgccatcttggcacccggcagccccgctagtcccccgggatctctcgagcctaaggctgccaggttaccgcctatgaggcgggagtctggccggccaataaagccaccaaggaaggaccttcctgattctcagcaacagcaccaatctagcaaaaaggggaaactttctgagcaacttaaacactgtaacggaatcttgaaggagctcctcagtaagaaacacgctgcatatgcctggccattctacaagcctgtggatgcctcagctctcgggctccatgattatcatgatattattaaacatcctatggacctgtcaacggtgaaaaggaaaatggagaacagggactatagggatgcgcaagagtttgccgccgacgtgcgccttatgttttcgaactgctacaagtacaatccccccgatcatgacgtggtagcaatggctaggaaattgcaagatgtctttgaatttagatatgcaaagatgcccgatgagcccctcgaaccaggtcccctacccgtttcaacggccatgccaccaggactcgccaaatcttcttcagaatcaagttctgaggagtctagctcagagtcaagtagcgaagaggaagaggaggaggacgaggaagacgaagaagaagaagaatcagagagcagcgactccgaagaagagcgagcccacaggcttgccgagcttcaggagcagctgagggccgtgcatgagcagttggctgccttatcccaaggaccaatctctaaaccaaagaggaagcgggaaaagaaggaaaaaaagaagaagaggaaagccgaaaagcaccgagggagagccggagctgatgaggacgataaaggccctcgggcccccaggcctcctcagcctaagaagtctaaaaaggcaagtggctcaggcggagggtctgctgccctcggcccctctgggttcggaccctctggcggctctgggaccaagctaccaaagaaagccaccaagaccgcccctcccgcactcccaacaggttacgatagtgaggaggaagaggaatctaggcctatgtcctacgatgagaaaagacagctttcactcgatattaacaaacttcccggggagaagctagggcgggtcgtccatattattcaggctagagaaccatccctcagggactctaatccagaagaaatcgaaatcgactttgagaccctgaagccctctacactacgggagcttgaacgctatgtcctgagttgtctgcgtaagaaacctagaaaaccgtatacgatcaaaaagccagttggtaaaaccaaggaggaactggccctggaaaagaaaagggagctcgaaaaaagactccaggatgtttcaggacagctaaactccacaaaaaagccaccaaagaaagcaaacgagaagactgagtcttctagcgcccaacaggtcgctgtaagccgactgagtgcctccagctcgagctccgattctagttctagctcttccagctcttcctcatccgacacatctgattccgattctggttag

SEQ ID NO: 110937 - DNA, 2046 bp, Artificial Sequence
  derived and/or modified sequence
atggacatgggcaccatcaagcggcggctggagaacaactactactgggctgcaagtgaatgcatgcaggactttaacacaatgtttaccaactgctacatttacaacaagcctacagatgatattgtcttgatggctcagactctggagaaaatatttctgcaaaaggtggcaagcatgccccaggaagaacaggaactggtagttaccatacctaagaattctcacaagaagggagcaaaactggcagcccttcagggtagcgtcaccagtgcgcaccaggtgccagctgtttcctccgtgtcccacactgctctctatactcctcccccagaaatccccaccaccgttctgaatatcccacacccctcagtaatcagctccccgttgttaaagtccctacattctgcaggtccccctctcctggccgttaccgcagctccccccgcacagcctctcgctaaaaaaaaaggagtgaagaggaaggcagacacgactactcccactcccacagccatcctcgcccccggcagcccagccagtcctcccggatctctcgaaccaaaagccgccaggttaccccctatgcggagagagagcggaagaccaatcaagcctccaagaaaagatttacccgactcccagcagcagcaccagtctagcaagaagggcaaacttagcgagcagctgaaacactgcaacggaattctgaaagagctgctgagtaaaaagcacgccgcgtacgcctggcccttttataagccggttgacgcctcggctcttggacttcacgactatcacgacataatcaaacacccaatggacctgtccacggttaagcgtaaaatggaaaatcgcgactaccgcgacgcccaggaattcgcagctgacgtgaggcttatgttcagcaactgttacaaatataaccctccggaccatgacgtggtggccatggcgaggaagttgcaggatgtgtttgagtttcgttatgccaagatgcctgacgaaccgttggagcctggcccactgcccgtaagcaccgctatgccacccggcctggcgaaatctagctcagaaagttcatccgaggagagctcttccgaatcctcatccgaagaagaagaagaggaggacgaggaagatgaggaagaggaggagtctgagtcatctgattccgaagaagagagggcacatcgcttggccgaactgcaggagcagttacgagccgtccatgaacagcttgcggccctgtcccaagggccaatctctaagcccaagaggaagcgcgagaagaaagagaagaagaaaaaaagaaaagccgaaaagcaccgcgggagagctggcgctgatgaggatgacaaaggcccacgggcacctcgcccaccccagccaaagaagtctaaaaaggccagtggctccgggggcgggtcggcagccctgggccctagcggcttcgggccatccgggggatctggaaccaagctgcccaaaaaagcgacaaagaccgcccctcctgccctgccaaccggctacgactctgaggaagaagaggagagtagacccatgagctatgacgaaaagcggcagctctctttggatataaacaaactgcctggtgagaagctcgggagagtggtgcatatcatacaggccagggagccttccctgcgggacagtaaccctgaggagattgagattgattttgaaaccctcaaaccatctaccctgagagaattagagcgctatgttctcagctgcctgaggaagaagcccagaaagccgtacaccatcaagaagccagttggtaagacgaaggaggagctggctttggaaaaaaagagggaactggaaaagagactgcaagatgtcagtgggcaactgaattcaacgaagaagcctcctaaaaaggccaacgaaaaaactgagtcttcatccgcacagcaagtagcggtgtcaaggctgtctgcatctagttccagctcggatagctcctcgtccagcagttcctcctcctcttcagatacatcagacagcgattccgggtag

SEQ ID NO: 110938 - DNA, 2046 bp, Artificial Sequence
  derived and/or modified sequence
atggacatgggcaccatcaagcggcggctggagaacaactactactgggcagcctcagaatgcatgcaggacttcaatactatgtttactaactgttacatctacaacaaacctaccgatgatattgtcttaatggctcagaccctcgaaaaaatctttttacagaaagtagccagcatgccacaagaggaacaagagctcgtggtgactattcctaagaattcccacaagaagggggccaaactggccgccctgcagggatcagtgacaagtgctcatcaggtgccagctgtttcttcggtgagccacactgcactttacaccccgcctcctgagatcccaacaacggtgctgaacattccgcacccatcagtgatttcttcaccgctgttgaagtctctgcactctgcggggcctcctctgctcgccgtcacggcggccccacctgcccagcccctagccaagaagaaaggcgtgaagaggaaggctgacacaactacacctacacctactgccatcctggcgcctggcagtccagcttcgccccccggatctctcgaacctaaggctgcccgcctgcccccaatgcgtcgggaatcagggcgccccatcaagccaccacgcaaggacctcccagatagtcaacagcagcaccaatccagtaagaaagggaagctctccgaacagctgaaacactgtaatggtatactcaaggaactcttatcaaagaaacatgccgcatacgcttggccattctataagcccgtggacgccagcgcactgggactacatgactatcacgacatcattaagcaccctatggacctaagcactgtcaagcgaaaaatggagaacagggactatcgggacgcccaagagtttgccgccgacgtgaggctgatgttttcaaattgctacaagtacaacccgcccgaccatgatgtcgtggccatggcacgaaagctccaagatgttttcgaattcaggtatgccaagatgcccgacgagcctctcgagcccggcccacttcctgtatctactgctatgcctcccggactggccaaaagttctagcgagagctcctcagaggaaagtagctctgagtcttcctcagaagaggaagaagaggaggacgaagaagatgaagaagaagaggagagcgagagttccgactctgaagaggagagagcccaccgactggccgagctgcaggagcagttgcgcgctgtccatgagcagctggctgccctctctcagggacctatatctaagcccaagaggaagagggagaagaaggagaagaagaagaagcggaaggccgaaaagcatcggggccgcgcaggcgctgatgaggatgataagggtccacgcgcacctcgccctccacagccaaagaagagcaagaaagctagtggcagcggtggtgggtcggctgcacttgggccctccggctttgggccctcaggcgggtcaggtacaaaattgcccaagaaggctacaaaaacagccccccctgccctacccacgggctacgacagcgaagaggaagaggaatctcgtccaatgtcctacgatgaaaagaggcagcttagcctagacattaataaactgccgggcgagaagcttggcagagtagttcatatcatccaagccagggagcccagcctgcgggacagtaaccctgaggaaatcgaaatagattttgagactctgaaaccctctacactcagggagctggaacgctatgtgctgtcatgtttacgaaaaaagccccgaaaaccttataccattaagaaaccagtgggcaagaccaaggaggagctggctctggagaagaagagggaactcgagaagcgacttcaagatgtgtcaggacagcttaattcaacaaagaagccgcccaagaaagctaacgaaaagactgagagcagtagcgctcagcaggtggccgtctccagactgtccgcttcgagcagctcgagcgactcctcttctagctctagttcttcgagtagcagcgacacttccgattcggattccgggtag

SEQ ID NO: 110939 - DNA, 987 bp, Artificial Sequence
  derived and/or modified sequence
tgagccaagagcagttcagagtcatcctcagaggagagctcctccgaaagttcctctgaagaggaagaagaagaggatgaagacgaagaagaagaggaaagcgagagctcagattctgaagaggagagagctcatagactcgcagagctgcaggaacagctgcgggctgtgcatgagcagctcgccgctctgtctcagggccctatcagtaaacccaagagaaagagggagaaaaaagagaagaagaagaagagaaaggcagagaaacaccggggaagagccggtgccgatgaggatgacaaaggtccacgagcccctcggccaccacagccaaagaagtccaagaaggccagtggctccggaggtggcagcgccgcactggggcctagtggcttcggtccatctggagggagtggtacaaagttaccgaagaaagccactaagaccgctccacccgcacttcccacaggatacgattccgaagaggaggaggagtccagacccatgtcttacgatgaaaagagacagctttccctcgatataaacaaattgccaggcgagaagctgggaagagtggtacatatcattcaggctcgggagccctcattgcgtgatagcaaccccgaggagatcgagatcgacttcgagaccctgaagccctctaccctcagagaattggaacgctacgtgctcagctgccttcgcaagaagcctcggaaaccctataccatcaagaagccagtaggaaaaactaaggaggaattggctctggagaagaagagggagctcgaaaagcggctgcaggacgtgagcggccagctcaatagtaccaagaagccacctaagaaggctaatgagaagactgaatctagctcagcccagcaggttgctgtcagtcgactttctgcaagctcaagctccagtgacagctcgtcctcgtcctcaagcagctcatccagtgacaccagtgatagcgatagcggatag

SEQ ID NO: 110940 - DNA, 2046 bp, Artificial Sequence
  derived and/or modified sequence
atggacatgggaactatcaagcgtaggctggaaaacaactactattgggccgcttccgagtgcatgcaggacttcaatactatgttcactaattgttacatctataataagcctacggatgatatagttttaatggcccagactctagagaagatttttcttcagaaggttgcctccatgccccaggaagagcaagagctggtggtcactataccgaagaactcacacaagaagggggctaaattagctgctcttcaggggtctgtcacatctgctcatcaagtcccagcggtgagcagtgtctcccacacagcactgtacacccccccacctgaaatccctactactgtcctgaacatccctcatccttctgttatttccagtccactcctcaagtcccttcactcggccggacctccactcttggctgtgactgctgcccctcccgcacagccgttagccaaaaaaaagggcgtgaaaaggaaggcagacactaccacccccactcccactgctatcttagccccaggatctccagcaagccccccaggctcgctcgaaccaaaggccgctaggcttcctccaatgagaagggagtccggtcgccctattaaacccccacggaaagacctcccagattcccagcagcaacaccagtctagtaaaaaaggaaaactttcagaacaacttaaacattgtaatggtatactgaaggaactactcagcaaaaagcatgccgcttacgcgtggcccttttacaagcctgtggacgcaagtgccctgggtctgcatgactaccacgacataattaaacatcctatggacctgagcacagtgaagagaaagatggagaaccgggattacagagacgcacaagagttcgctgcagacgtgcggctgatgttctcgaattgctacaagtataatcccccagaccacgatgtagtggccatggcccgaaaacttcaggacgttttcgaatttaggtatgctaagatgcccgacgagcccctggagcccggacccctgcctgtgtcaacagcaatgcctcctggcctagccaaatcatccagtgagtcttcttctgaagagtcttcatcggaatctagctccgaggaagaggaggaagaggacgaggaggatgaggaggaggaggagtcagagtcctccgattccgaagaagagagagcccaccgcttagccgaactgcaggaacagctgcgggcagtacatgagcagctggctgcactgtcccagggacctatctcgaagcctaagcgcaagagggagaagaaagaaaagaaaaagaagcgtaaggctgagaagcatcggggtagggccggagctgacgaagacgataaaggtcctagggccccacggcctccacaacctaagaagtccaagaaagctagcgggtcgggaggagggagtgcagctctgggaccctctgggtttggaccctccggaggttcggggaccaaacttccaaaaaaagcgacaaaaacagctcccccagcactgcccactggctacgattcagaagaagaagaagagtcacgtcccatgtcctacgatgaaaaacggcagttaagtctggatattaataaactgccaggagaaaaactaggtcgggttgttcacatcattcaggccagggagccttcccttcgggattcaaatcctgaggaaatagagatcgatttcgagacactgaagccctccacattacgtgagctggagaggtacgtgctgtcatgtctgcggaaaaaacccaggaagccttatactattaaaaaaccggtgggtaaaacgaaagaggagctggctctggagaagaagcgtgagctcgaaaagagactgcaggacgtttccggacaactaaatagcactaagaagcccccaaaaaaggccaacgaaaagacagagtcttcatcggcccagcaagtggctgtcagtagactatctgcttcctctagttcatcagactcctccagttctagctctagtagcagcagcagtgacacaagcgactcggactcagggtag

SEQ ID NO: 110941 - DNA, 987 bp, Artificial Sequence
  derived and/or modified sequence
taagccaaatcatcaagtgagtccagtagcgaggagagctcaagcgagtcatcctctgaagaggaagaggaagaagatgaagatgaagaggaggaggagtccgagtcttcagactcggaagaggaaagggctcataggcttgcggagttgcaggagcaactgcgggcagttcatgagcagctcgccgctctgtcacaaggacccattagtaagccaaaacgcaaaagggaaaagaaagaaaagaaaaagaagcgcaaggcagaaaagcatcgcggaagggccggtgccgacgaggatgacaaaggaccacgggcaccgaggcctccccagcctaaaaagagcaagaaagcgagcgggagtggaggcggtagcgccgcactggggcctagcgggttcggtccatccggcggttccggcactaagctccctaagaaggcaacaaagactgcccctcccgctttgcccacaggatatgactcagaggaggaagaagagtcccgccctatgtcttatgacgagaagagacagttgagtctggacatcaataagttgcccggagaaaagcttgggcgagtggttcacattatccaagctcgggagccctccttacgcgactctaatcctgaggaaattgaaatcgactttgaaacattgaagccgtcaacgctgcgagaactggagagatacgtgctgtcttgcttgcgtaagaagccaaggaaaccctatactatcaagaagcccgtggggaaaactaaggaagagctggctctcgaaaaaaagcgcgagctcgaaaaaagactgcaggatgtcagcgggcagctcaacagcacgaaaaagcctcctaagaaggctaatgagaaaaccgagagctcatctgcccagcaggttgccgtgtcaaggttgagtgcaagtagtagctccagcgattctagttcttcctctagctcatcttctagctctgatacctctgactctgattcaggctag

SEQ ID NO: 110942 - DNA, 987 bp, Artificial Sequence
  derived and/or modified sequence
taggccaagtcttcaagcgaatcttcgagtgaagagtctagtagcgagtccagttctgaagaagaggaagaggaagacgaagacgaggaggaggaggaaagtgaaagctcagattccgaggaggagcgcgcacatcggctagccgagctgcaggagcaactgagggcagtccatgaacagctagccgcactgtcccaggggccaataagtaagcccaagaggaagagggagaagaaggagaagaagaagaagaggaaagccgaaaagcaccgcggtcgagctggagccgacgaagacgacaaagggcctagagctcctaggccaccccagcccaaaaagtccaagaaggcgagtggctccggtggaggcagtgcagctctgggcccaagcgggttcggacctagtggcggaagcggcactaagttaccaaagaaggcaactaagactgcaccgccagccttaccgaccggttacgattctgaagaggaggaagaaagccgcccaatgagttacgacgagaaaagacagctctctctggacataaataagctgccaggcgagaagctcgggagagtcgtgcatattatacaggcgagggagccctcactccgagatagcaatcctgaagagatcgaaatcgactttgaaacactcaagccctcaacgctgagagaactggaacgatacgtactgtcatgcctgagaaaaaaacccaggaagccatataccatcaagaagcctgtgggtaaaactaaagaagaactagccttggagaaaaaacgcgagcttgaaaaacgattgcaggacgttagtgggcagctaaattccacgaaaaagcctcccaagaaggcaaacgaaaagacagaaagctcatccgcacagcaggtagcagtctctcgattgagcgcatcatcctcttcttctgactctagctcctcctcgtcaagcagttcctcttccgacacatccgatagtgattcagggtag

SEQ ID NO: 110943 - DNA, 987 bp, Artificial Sequence
  derived and/or modified sequence
tgagcgaagtcttcatccgagtctagctctgaggagtcatcatccgagtcctcctccgaagaggaggaggaagaagatgaagatgaggaagaggaggagagtgagtccagcgacagcgaagaggagagagcacacagactcgcagagttacaggaacagttgagagccgtgcatgagcaactggcggcattaagccagggtccaatctccaagcctaagagaaaacgtgaaaagaaagaaaaaaaaaaaaaaaggaaggccgagaagcataggggtcgggcaggtgctgacgaggacgataagggtcctagagcacccagacctccccagccaaaaaaatccaaaaaggccagcggcagcgggggagggtccgcggcactgggcccttccggctttggaccgtcaggtggtagcgggaccaaactgccgaagaaggcgaccaagactgcaccacctgcactccctacgggatacgattccgaagaagaggaggagtctaggcctatgtcctatgacgagaaaagacagctgtccctggacataaataagcttcccggtgaaaagctggggcgtgtcgttcacattatacaggctagagagccttctctgagagactcaaaccccgaggagattgagattgactttgagacgctcaagccgagcacccttcgcgaattagaacgctacgttttgtcctgcctcaggaagaagcctagaaaaccttacactataaaaaaacctgtcgggaagactaaggaagaactggccctggaaaaaaaacgcgagctcgagaagagactgcaggacgtaagtggtcagctaaatagcaccaagaagccgcctaagaaggccaacgagaagaccgagagctcttcagcacaacaggtagccgtgtccagactgtccgcttcctccagctcatcagacagctccagcagcagttcttcatcctctagtagcgacacaagcgacagcgacagcgggtag

SEQ ID NO: 110944 - DNA, 2046 bp, Artificial Sequence
  derived and/or modified sequence
atggatatgggcaccatcaaacgcagactcgaaaacaattactactgggccgcaagtgaatgcatgcaggatttcaacacaatgttcaccaattgctacatctataacaagcctaccgatgacatcgtgctgatggcacagacactggagaagattttcctgcaaaaggtggcatccatgccccaggaagagcaagagctggtggtgactattccaaaaaacagtcataagaaaggcgctaaactagcagccctgcagggcagcgtgaccagcgcacatcaggtgccggcagtgtcaagcgtgtcacacactgcactgtatacaccaccacctgaaatccctaccactgttttcaacattccacacccgagcgtgatcagttctcccttgctcaagtcccttcactctgcgggacctccactgttagcggtgacggccgcacctccagcacagcccttggctaagaaaaagggcgtcaaacgtaaggctgatactactacacccacacccactgctatactcgcccctggctctcccgcttcccctcccggttcacttgagccaaaagcagcacggctccccccaatgcggagggaatcaggtcgaccgattaaacctccccgtaaagatctccctgattcgcaacaacaacaccagtccagtaagaaaggcaaactctccgagcagctgaaacactgtaacggtattctaaaggaactcctatctaagaagcacgctgcatatgcttggcctttctacaagcctgtcgacgcaagcgcactaggactgcatgactaccacgatataattaaacacccgatggatctgtctacagtgaaacgtaagatggagaatcgggattatagagacgcacaggagtttgcggctgatgtgcgattgatgttcagcaattgttacaaatacaacccacctgatcacgatgtagtcgcgatggctagaaaattgcaagacgtgtttgagttccgctatgctaagatgccagacgaacctctggagcccggtccacttcctgtgagcacggctatgcccccaggtcttgccaaaagttcaagcgagagcagctctgaggagagctcctctgagagctcaagcgaggaagaggaagaggaggatgaagaagacgaggaggaggaagagtctgagtcgagcgactcggaagaggaacgggctcatagattagccgagctccaagagcaactacgcgcagttcatgagcagttggccgcactgtcccaagggcctatctctaaaccaaagcgaaagcgagaaaaaaaagaaaaaaagaaaaaaaggaaggcagagaagcacaggggcagggccggagccgatgaggacgacaaaggccctcgagcgccacggcctccgcagcctaagaagtccaagaaggcgtcaggttcagggggagggtcggccgctctagggccaagcggattcggcccttctggcggatccggaacgaaactgcccaaaaaggccacaaagacggcaccccctgcactgccgacaggatacgactccgaggaggaagaagagtcccgaccgatgtcatatgatgagaagaggcagctctccctggatatcaacaaacttccaggagaaaagcttggacgggtggtccacattatacaggcaagagagccatcgttacgcgattccaacccagaagaaattgaaattgacttcgagacactgaagccttcgaccctgcgggagctggagaggtacgtcctgagctgtctccggaaaaagcctaggaaaccctacacaataaaaaagccagtcggaaagaccaaggaggagctcgctctggaaaaaaagcgcgagctcgaaaaaaggctgcaggacgtgtccggacagttaaatagtaccaagaaaccgccaaagaaggcaaatgaaaagacagagagcagttcagcacagcaagtagcagtaagtcgactgtccgcttcgtcatcaagcagcgattcatcaagtagcagcagttcatcaagttcttcagacacctccgactccgactccggatag

SEQ ID NO: 110945 - DNA, 2046 bp, Artificial Sequence
  derived and/or modified sequence
atggacatgggtaccatcaagcgccgactagagaacaactactattgggccgcttccgaatgtatgcaagactttaatactatgttcacgaattgttacatctacaataaacccactgatgatatcgtgctcatggcgcagacgttagagaaaattttcctgcagaaggtagcatccatgccgcaagaggagcaggagcttgttgttactatccctaagaatagtcacaagaaaggggcaaaactcgcagccctacaaggatctgtcacctctgcccatcaggtcccagccgtgtccagtgtgtcccatactgcgctatacacaccaccgccagaaattccaaccactgtattaaacatcccacatcccagcgtgattagttctccactgctaaagagtctgcacagtgctggcccacccctgctagcagtgacggctgcacctcctgctcaaccgctggccaagaagaaaggcgtcaaacgaaaggctgatactaccacacccacgcccactgccatactggcccctggtagcccagctagcccgcctggctcactcgagccaaaagccgctaggctgccacccatgagaagagaaagcggaaggccgataaaaccccctaggaaagatcttcccgactcacagcaacagcatcagagcagtaagaaagggaaactgtctgaacagctgaaacattgtaacgggattcttaaagaactgctgagcaagaaacatgccgcttatgcttggcccttctacaaacccgtcgacgcatccgccttgggcctgcacgactatcatgatattattaaacaccctatggatctgtcaacggtcaaaaggaaaatggagaatagggattatagagacgcccaggagtttgctgctgacgtcaggttaatgttcagtaattgctataagtataatccacctgatcatgacgtagtcgcgatggccagaaagttgcaggacgtcttcgagttccgctacgcgaaaatgccagatgaaccgttggaacccggtcccctccccgtgagtaccgctatgccgccaggcctggctaaaagcagctctgaatccagctcggaggagagtagctccgagtcatctagtgaagaggaggaagaggaggacgaagaagacgaagaagaagaggagtcagagtcctccgatagcgaggaggaacgcgctcaccgcctggcggaactccaagagcaactgcgcgctgttcatgagcagctggccgcattgtcccagggtccaatcagcaagccaaagcggaagagagagaaaaaggagaagaaaaagaagaggaaagccgaaaagcatcggggaagagctggagcggatgaagatgataaaggtcctagagccccacgccctcctcagccgaagaagtctaagaaggccagcgggtcagggggaggttcagcagccttaggtcccagcggctttggcccttctgggggaagcggaaccaaactgcctaagaaggccacgaaaaccgcacccccagcactgcccaccggctacgatagcgaggaggaggaggaatcccggcctatgagttacgacgagaagcggcaactctccctggatatcaacaagctgccgggagaaaaacttgggagggtcgttcacattatacaggctagagagccttcgttacgagactcgaatcctgaggagatcgagatcgattttgagacattaaagcccagtacactaagggagttggagagatacgtcttgtcttgcctcagaaagaaacccaggaaaccttacacaattaagaaacccgtgggaaaaacgaaagaggaactggcgctcgaaaagaaacgggagctggaaaagagacttcaggatgtttcgggccaactgaactccaccaagaagcccccaaagaaagccaatgagaagacggagagtagtagtgcgcagcaggttgccgtatctaggctatctgcgtcttcctcatcctcagacagctcttcttcatctagtagctcctcttcctcagacacatcagattccgatagtgggtag

SEQ ID NO: 110946 - DNA, 2046 bp, Artificial Sequence
  derived and/or modified sequence
atggacatgggaacaattaagcggcgactggagaacaactattactgggccgcaagcgaatgtatgcaagatttcaacacaatgtttacgaactgctacatctataataaaccaactgatgatatagtgctgatggcccagacgttggaaaagattttcctgcagaaggtggcttccatgcctcaggaagagcaggagctggtggtgactatccctaagaactcacataaaaaaggggcaaaactggcggctcttcaaggcagcgttacaagtgcacaccaggtgcccgcagtgtcatcagtgtctcacacggcgctgtacacaccaccaccagaaattcctactacggtgttgaacattcctcaccccagtgtcatctcctcacccctgctaaagtctttgcattctgccggtcctcccctcctggccgtgacggcggcaccaccggcacagcccctagcaaaaaagaaaggtgtgaagaggaaggctgataccactacccctacccctaccgccattctggctcccggtagcccagcctccccaccaggcagtttggagccaaaagctgccaggctgccaccgatgcgcagggagtcagggcgtcctattaagccccctagaaaggatcttcctgactcccagcagcagcatcaatcatccaagaaaggaaaattaagcgagcaactgaagcattgcaatggtatcctgaaggaactgttaagcaaaaagcacgccgcatacgcctggcccttttacaagcccgtggatgcctcagcactcgggttacatgactaccacgacattatcaagcaccccatggacctgtcaacagtgaagcgcaaaatggagaaccgggattatcgcgacgctcaggaatttgctgccgatgtaaggctgatgttctccaactgttataaatacaatcctcccgatcatgacgttgttgccatggcaagaaagctgcaagacgtcttcgaattccggtacgcaaagatgccagacgaacctctagagcctggaccccttccagtctctaccgcgatgccacccggactggcgaagtcgagttccgagagttcatccgaggagtcatccagtgaaagctccagcgaggaagaggaagaggaggacgaggaggatgaagaggaggaggaatcggagtcctccgatagtgaagaagagcgggcacatcgcttggccgaactgcaggagcaactgcgcgctgtacatgagcaactggccgctctaagccaaggtcccatcagcaagcctaaacggaaaagagagaaaaaagagaaaaaaaagaagcgcaaggccgagaaacacagagggagagctggggctgatgaagacgacaaaggtccaagggcaccaagacctcctcaacctaagaaatccaagaaagccagcggaagcgggggtgggtcagcagctctgggaccctctggatttgggcctagtgggggttctggtaccaaattgcccaagaaagccactaagactgcccctccagctcttccgaccgggtacgacagcgaagaggaggaggagagtcgtcccatgtcgtatgacgagaaacggcagctctctctcgacattaacaagttgcctggcgaaaagctggggagggtcgtgcacatcattcaggctagagagccgtctctgcgcgatagtaaccctgaggaaatagagattgattttgaaactctgaagccttcaactctccgggagctggaaagatacgtgcttagctgcttacgtaaaaaaccacgcaaaccatatacaatcaagaagccagtcgggaaaacaaaagaggaactggctttggagaagaagcgagagttagaaaagcgcctgcaggacgtgtccggccagctgaactctaccaaaaagcctcccaaaaaggctaacgaaaagaccgagtcatccagcgctcaacaggtagccgtcagccggctgtccgcttctagcagtagttcggactcttctagtagttcttcctcctcttcatcatctgacacgtctgattctgacagcggctag

SEQ ID NO: 110947 - DNA, 2046 bp, Artificial Sequence
  derived and/or modified sequence
atggacatggggactataaaacgacgtctggagaataattactattgggccgcttctgaatgcatgcaggacttcaatactatgtttactaactgctacatctacaataaacccactgatgatatcgtgctgatggcacagactctggagaagatcttccttcagaaagtagcctcaatgccgcaagaggaacaagagctcgtggtgacaatcccaaagaattcacacaagaaaggagctaagctcgctgcccttcaggggtccgtcaccagcgcgcatcaggtgcctgctgtttcaagcgtctcccacactgcgctgtatacgccacctccggaaatcccgactacggtactaaatatcccacatccctcagtgatttctagtcctctactgaaatctttgcactctgccggacccccacttctggcagtcaccgccgctccaccagcacagccactggctaagaaaaaaggcgtgaaacgcaaggccgacactacaacaccaaccccaacggcaatcttagcccctggcagccctgcttccccacctggaagcctggagcccaaggccgctcggctacctccaatgcgccgtgaaagtgggaggccaataaagcccccacggaaggatcttccagactcccaacagcagcatcagagctcaaaaaagggcaagcttagcgaacagttgaagcattgcaacggcatcctcaaggagttgttaagcaagaaacatgccgcttatgcctggcctttttataaaccagtggacgcgagcgccttgggcctccacgactaccacgacattataaaacatcctatggacctctctacggtgaagcggaagatggagaatcgagactaccgcgatgctcaagaatttgccgcagacgtccggctaatgttttcaaactgctacaagtataatccccctgaccacgacgtcgtggcaatggcaagaaaactgcaggacgtatttgagtttcgatacgctaaaatgccagacgaaccactggaaccagggccactgcccgtcagcacagccatgcctcctggcctcgctaagtcttccagcgagtctagctctgaggaatcgtcatccgagagttcaagcgaagaggaggaggaggaagatgaggaggatgaggaggaggaggagagtgaatcatctgattccgaggaggagagggcccaccggctggcagagctgcaggagcagctgcgagccgtgcacgagcagctagcagccctgagccaaggaccaatatctaagcccaaaagaaagagagagaagaaagagaaaaagaaaaaaaggaaggccgagaagcatcgtggacgggcaggcgctgacgaagatgataagggtcctcgggctcccagaccgccacaacccaaaaaaagtaagaaagctagcgggagcggtggagggtccgccgctctaggccctagcggcttcggtcctagtggcggatccggaactaaacttcctaaaaaagccaccaaaacagccccacctgccctccccacgggctacgacagcgaggaagaagaggagagccggcctatgtcgtatgatgagaaacggcaactgtcactggatatcaacaagctgccgggtgagaagctgggaagagtggtccatattatccaggcacgtgaaccgtctttgagagattcaaacccagaggaaatagaaatcgatttcgagactctcaaacccagcacccttagagaactcgagcggtacgttctgagttgcctgaggaagaaacccaggaagccttacactattaagaagcccgtgggcaagactaaggaggagctagccctggagaagaaaagagaactggagaagaggctgcaggatgtttcgggccagttaaatagcaccaagaaaccgccaaagaaagctaatgaaaagacggagtcctcttccgcacaacaggtcgccgtaagccgactgtctgcatcctcctcctcttccgactcctcatctagctcctcaagctcatccagctcagacactagcgattcggacagtgggtag

SEQ ID NO: 110948 - DNA, 1773 bp, Artificial Sequence
  derived and/or modified sequence
ggccaaatcgtcttcagagtcctccagtgaggaaagtagcagtgagagctcctctgaggaagaggaggaggaagatgaggacgaggaggaagaagagagtgaaagctcagactcagaggaagaaagggctcatcgcttagcagaactacaggaacagcttcgggcagtacatgaacaactggctgctctgtcccagggtccaatatccaagcccaagaggaaaagagagaaaaaagagaaaaagaagaaacggaaggcagagaagcatcgaggccgagctggggccgatgaagatgacaaggggcctagggcaccccgcccacctcaacctaagaagtccaagaaagcaagtggcagtgggggtggcagtgctgctttaggcccttctggctttggaccttctggaggaagtggcaccaagctccccaaaaaggccacaaagacagccccacctgccctgcctacaggttatgattcagaggaggaggaagagagcaggcccatgagttacgatgagaagcggcagctgagcctggacatcaacaaattacctggggagaagctgggccgagttgtgcatataatccaagccagggagccctctttacgtgattcaaacccagaagagattgagattgattttgaaacactcaagccatccacacttagagagcttgagcgctatgtcctttcctgcctacgtaagaaaccccggaagccctacaccattaagaagcctgtgggaaagacaaaggaggaactggctttggagaaaaagcgggaattagaaaagcggttacaagatgtcagcggacagctcaattctactaaaaagccccccaagaaagcgaatgagaaaacagagtcatcctctgcacagcaagtagcagtgtcacgccttagcgcttccagctccagctcagattccagctcctcctcttcctcgtcgtcgtcttcagacaccagtgattcagactcaggctaaggggtcaggccagatggggcaggaaggctccgcaggaccggacccctagaccaccctgccccacctgccccttccccctttgctgtgacacttcttcatctcaccccccccccgcccccctctaggagagctggctctgcagtgggggagggatgcagggacatttactgaaggagggacatggacaaaacaacattgaattcccagccccattggggagtgatctcttggacacagagcccccattcaaaatggggcagggcaagggtgggagtgtgcaaagccctgatctggagttacctgaggccatagctgccctattcacttctaagggccctgttttgagattgtttgttctaatttattttaagctaggtaaggctggggggagggtggggccgtggtcccctcagcctccatggggagggaagaagggggagctctttttttacgttgatttttttttttctactctgttttccctttttccttccgctccatttggggccctgggggtttcagtcatctccccatttggtcccctggactgtctttgttgattctaacttgtaaataaagaaaatattattcaagttttgagttaccttaatatttgcttttgtagtgtttcaaaaggaacatcataagaattgtcttgataattttgagggaaatattactgcagtgagaaaaggcaatagctaacctataattggattgtcttaatttttaaaccagtaggcttttgctgtgtttttaataaagtaaatatgacttttgtaaattga

SEQ ID NO: 110949 - DNA, 987 bp, Artificial Sequence
  derived and/or modified sequence
tgagccaagagcagcagcgagagcagcagcgaggagagcagcagcgagagcagcagcgaggaggaggaggaggaggacgaggacgaggaggaggaggagagcgagagcagcgacagcgaggaggagagagcccacagactggccgagctgcaggagcagctgagagccgtgcacgagcagctggccgccctgagccagggccccatcagcaagcccaagagaaagagagagaagaaggagaagaagaagaagagaaaggccgagaagcacagaggcagagccggcgccgacgaggacgacaagggccccagagcccccagacccccccagcccaagaagagcaagaaggccagcggcagcggcggcggcagcgccgccctgggccccagcggcttcggccccagcggcggcagcggcaccaagctgcccaagaaggccaccaagaccgccccccccgccctgcccaccggctacgacagcgaggaggaggaggagagcagacccatgagctacgacgagaagagacagctgagcctggacatcaacaagctgcccggcgagaagctgggcagagtggtgcacatcatccaggccagagagcccagcctgagagacagcaaccccgaggagatcgagatcgacttcgagaccctgaagcccagcaccctgagagagctggagagatacgtgctgagctgcctgagaaagaagcccagaaagccctacaccatcaagaagcccgtgggcaagaccaaggaggagctggccctggagaagaagagagagctggagaagagactgcaggacgtgagcggccagctgaacagcaccaagaagccccccaagaaggccaacgagaagaccgagagcagcagcgcccagcaggtggccgtgagcagactgagcgccagcagcagcagcagcgacagcagcagcagcagcagcagcagcagcagcagcgacaccagcgacagcgacagcggctag

SEQ ID NO: 110950 - DNA, 2046 bp, Artificial Sequence
  derived and/or modified sequence
atggacatgggcaccatcaagagaagactggagaacaactactactgggccgccagcgagtgcatgcaggacttcaacaccatgttcaccaactgctacatctacaacaagcccaccgacgacatcgtgctgatggcccagaccctggagaagatcttcctgcagaaggtggccagcatgccccaggaggagcaggagctggtggtgaccatccccaagaacagccacaagaagggcgccaagctggccgccctgcagggcagcgtgaccagcgcccaccaggtgcccgccgtgagcagcgtgagccacaccgccctgtacacccccccccccgagatccccaccaccgtgctgaacatcccccaccccagcgtgatcagcagccccctgctgaagagcctgcacagcgccggcccccccctgctggccgtgaccgccgccccccccgcccagcccctggccaagaagaagggcgtgaagagaaaggccgacaccaccacccccacccccaccgccatcctggcccccggcagccccgccagcccccccggcagcctggagcccaaggccgccagactgccccccatgagaagagagagcggcagacccatcaagccccccagaaaggacctgcccgacagccagcagcagcaccagagcagcaagaagggcaagctgagcgagcagctgaagcactgcaacggcatcctgaaggagctgctgagcaagaagcacgccgcctacgcctggcccttctacaagcccgtggacgccagcgccctgggcctgcacgactaccacgacatcatcaagcaccccatggacctgagcaccgtgaagagaaagatggagaacagagactacagagacgcccaggagttcgccgccgacgtgagactgatgttcagcaactgctacaagtacaacccccccgaccacgacgtggtggccatggccagaaagctgcaggacgtgttcgagttcagatacgccaagatgcccgacgagcccctggagcccggccccctgcccgtgagcaccgccatgccccccggcctggccaagagcagcagcgagagcagcagcgaggagagcagcagcgagagcagcagcgaggaggaggaggaggaggacgaggaggacgaggaggaggaggagagcgagagcagcgacagcgaggaggagagagcccacagactggccgagctgcaggagcagctgagagccgtgcacgagcagctggccgccctgagccagggccccatcagcaagcccaagagaaagagagagaagaaggagaagaagaagaagagaaaggccgagaagcacagaggcagagccggcgccgacgaggacgacaagggccccagagcccccagacccccccagcccaagaagagcaagaaggccagcggcagcggcggcggcagcgccgccctgggccccagcggcttcggccccagcggcggcagcggcaccaagctgcccaagaaggccaccaagaccgccccccccgccctgcccaccggctacgacagcgaggaggaggaggagagcagacccatgagctacgacgagaagagacagctgagcctggacatcaacaagctgcccggcgagaagctgggcagagtggtgcacatcatccaggccagagagcccagcctgagagacagcaaccccgaggagatcgagatcgacttcgagaccctgaagcccagcaccctgagagagctggagagatacgtgctgagctgcctgagaaagaagcccagaaagccctacaccatcaagaagcccgtgggcaagaccaaggaggagctggccctggagaagaagagagagctggagaagagactgcaggacgtgagcggccagctgaacagcaccaagaagccccccaagaaggccaacgagaagaccgagagcagcagcgcccagcaggtggccgtgagcagactgagcgccagcagcagcagcagcgacagcagcagcagcagcagcagcagcagcagcagcgacaccagcgacagcgacagcggctag

SEQ ID NO: 110951 - DNA, 2046 bp, Artificial Sequence
  derived and/or modified sequence
atggacatgggcaccatcaagagaagactggagaacaactactactgggccgccagcgagtgcatgcaggacttcaacaccatgttcaccaactgctacatctacaacaagcccaccgacgacatcgtgctgatggcccagaccctggagaagatcttcctgcagaaggtggccagcatgccccaggaggagcaggagctggtggtgaccatccccaagaacagccacaagaagggcgccaagctggccgccctgcagggcagcgtgaccagcgcccaccaggtgcccgccgtgagcagcgtgagccacaccgccctgtacacccccccccccgagatccccaccaccgtgttcaacatcccccaccccagcgtgatcagcagccccctgctgaagagcctgcacagcgccggcccccccctgctggccgtgaccgccgccccccccgcccagcccctggccaagaagaagggcgtgaagagaaaggccgacaccaccacccccacccccaccgccatcctggcccccggcagccccgccagcccccccggcagcctggagcccaaggccgccagactgccccccatgagaagagagagcggcagacccatcaagccccccagaaaggacctgcccgacagccagcagcagcaccagagcagcaagaagggcaagctgagcgagcagctgaagcactgcaacggcatcctgaaggagctgctgagcaagaagcacgccgcctacgcctggcccttctacaagcccgtggacgccagcgccctgggcctgcacgactaccacgacatcatcaagcaccccatggacctgagcaccgtgaagagaaagatggagaacagagactacagagacgcccaggagttcgccgccgacgtgagactgatgttcagcaactgctacaagtacaacccccccgaccacgacgtggtggccatggccagaaagctgcaggacgtgttcgagttcagatacgccaagatgcccgacgagcccctggagcccggccccctgcccgtgagcaccgccatgccccccggcctggccaagagcagcagcgagagcagcagcgaggagagcagcagcgagagcagcagcgaggaggaggaggaggaggacgaggaggacgaggaggaggaggagagcgagagcagcgacagcgaggaggagagagcccacagactggccgagctgcaggagcagctgagagccgtgcacgagcagctggccgccctgagccagggccccatcagcaagcccaagagaaagagagagaagaaggagaagaagaagaagagaaaggccgagaagcacagaggcagagccggcgccgacgaggacgacaagggccccagagcccccagacccccccagcccaagaagagcaagaaggccagcggcagcggcggcggcagcgccgccctgggccccagcggcttcggccccagcggcggcagcggcaccaagctgcccaagaaggccaccaagaccgccccccccgccctgcccaccggctacgacagcgaggaggaggaggagagcagacccatgagctacgacgagaagagacagctgagcctggacatcaacaagctgcccggcgagaagctgggcagagtggtgcacatcatccaggccagagagcccagcctgagagacagcaaccccgaggagatcgagatcgacttcgagaccctgaagcccagcaccctgagagagctggagagatacgtgctgagctgcctgagaaagaagcccagaaagccctacaccatcaagaagcccgtgggcaagaccaaggaggagctggccctggagaagaagagagagctggagaagagactgcaggacgtgagcggccagctgaacagcaccaagaagccccccaagaaggccaacgagaagaccgagagcagcagcgcccagcaggtggccgtgagcagactgagcgccagcagcagcagcagcgacagcagcagcagcagcagcagcagcagcagcagcgacaccagcgacagcgacagcggctag

SEQ ID NO: 110952 - protein, 545 aa, Artificial Sequence
  derived and/or modified sequence
MLPGAWLLWTSLLLLARPAQPCPMGCDCFVQEVFCSDEELATVPLDIPPYTKNIIFVETSFTTLETRAFGSNPNLTKVVFLNTQLCQFRPDAFGGLPRLEDLEVTGSSFLNLSTNIFSNLTSLGKLTLNFNMLEALPEGLFQHLAALESLHLQGNQLQALPRRLFQPLTHLKTLNLAQNLLAQLPEELFHPLTSLQTLKLSNNALSGLPQGVFGKLGSLQELFLDSNNISELPPQVFSQLFCLERLWLQRNAITHLPLSIFASLGNLTFLSLQWNMLRVLPAGLFAHTPCLVGLSLTHNQLETVAEGTFAHLSNLRSLMLSYNAITHLPAGIFRDLEELVKLYLGSNNLTALHPALFQNLSKLELLSLSKNQLTTLPEGIFDTNYNLFNLALHGNPWQCDCHLAYLFNWLQQYTDRLLNIQTYCAGPAYLKGQVVPALNEKQLVCPVTRDHLGFQVTWPDESKAGGSWDLAVQERAARSQCTYSNPEGTVVLACDQAQCRWLNVQLSPQQGSLGLQYNASQEWDLRSSCGSLRLTVSIEARAAGP

SEQ ID NO: 110953 - DNA, 21 bp, Artificial Sequence
  derived and/or modified sequence
ggaaatccctggcaatgtgat

SEQ ID NO: 110954 - DNA, 21 bp, Artificial Sequence
  derived and/or modified sequence
ggtaatccctggcaatgtgat

SEQ ID NO: 110955 - DNA, 21 bp, Artificial Sequence
  derived and/or modified sequence
atcacattgccagggatttcc

SEQ ID NO: 110956 - DNA, 21 bp, Artificial Sequence
  derived and/or modified sequence
atcacattgccagggattacc

SEQ ID NO: 110957 - DNA, 1638 bp, Artificial Sequence
  derived and/or modified sequence
atgctgccaggtgcctggctgctgtggaccagcttactgctcctcgcacgacccgcgcaaccctgcccgatgggctgtgactgctttgtacaggaagtcttctgctccgatgaggagttagccactgtgccactggacatccctccatataccaaaaatatcattttcgtcgaaaccagctttaccacgctcgagactagggctttcggtagtaacccaaatctgactaaagtggtgttccttaatactcaactctgtcagtttagaccagacgctttcggaggtctccccagattagaggacctcgaagttaccggcagcagttttctgaatttatccactaatatcttcagtaacctgacaagtttgggaaagctgaccttgaattttaacatgctggaggctttaccagaaggacttttccaacatttagcagccctggagtctttgcacctgcagggtaaccaactacaggcattgccaagacggctgtttcagcccctaacacacctgaagactctcaatctagctcagaacttgcttgcacagctaccagaggaactgtttcaccctttaactagcctgcagacccttaaactctccaacaacgcgctctcaggcctgccacagggagttttcggcaaactgggtagtttacaggagttgtttttagactctaacaacatcagcgaactgcctccacaggtgttttcccagctgttctgtctggagcgtctctggctgcagcgaaacgcaataacgcatctccccttatctatatttgctagtctcggcaacctgactttcttgagcctgcagtggaatatgctccgggtcctccctgcaggcctcttcgcccacacaccttgcctggttggattaagcctcacccacaatcagcttgaaacggtggcagaaggtacttttgcgcacttgagcaacctgagaagtttaatgctgagctataacgcaattacacatctgccggcgggcatattcagagacctggaggagctggtgaaactctaccttggatcaaacaatctcaccgcccttcatccagccttgttccaaaacctgtccaagctcgagttgctgtccctgtctaaaaaccaattgacaactctaccagagggcatcttcgacactaattataatcttttcaacctcgccctccacggtaacccttggcagtgtgattgccatcttgcgtatctgtttaattggctgcagcagtacactgacaggcttctcaacattcagacatactgcgccggccctgcttacctaaaaggacaggtcgtccccgccctcaacgagaaacagttggtgtgcccagtgacccgcgatcacctgggatttcaagtgacttggcctgatgaatcaaaggccggaggaagctgggacctcgccgtgcaggaaagagctgccagaagccaatgtacctattctaaccccgagggcacagttgttctggcttgtgatcaggcacaatgtcgctggctgaacgtgcagcttagccctcaacagggatctcttggtctgcagtataatgcaagccaggagtgggacctccgttcgagctgtggttcacttcgcctaacagtcagtattgaggcccgggcagccgggccctag

SEQ ID NO: 110958 - DNA, 1638 bp, Artificial Sequence
  derived and/or modified sequence
atgctcccaggtgcctggctcctctggactagtttgctcctcctcgctaggccggcacagccttgccctatgggttgcgattgcttcgtgcaggaggtattctgctcagatgaagagcttgccacagttcccctcgatatcccaccgtacacaaaaaatatcatcttcgtggaaacgtctttcacgacactggagactagggcattcggctccaaccctaacttaactaaggtagtattcttaaatacccagttgtgtcagtttagaccagacgccttcgggggtcttccacgattggaagatctggaagtcaccggtagcagcttcttaaacctcagcacaaatatattcagcaatctgacatctctgggcaagttgacactgaattttaacatgctggaagcccttccggagggactgttccagcacctcgctgcactagagtccctgcatctgcagggaaaccagttacaggcactaccacgcaggttgttccaacctttgacacacctcaagacacttaatctggctcaaaatctgctggcgcagctgcccgaggagctgtttcaccctctcacttctcttcaaacccttaaactgtcaaacaacgccctgtcaggcctgccccagggggtgttcgggaagctgggatctttacaggaactcttccttgattctaacaatatttctgaactgccgccacaggtcttttcccagctcttttgtctcgagagactgtggctgcaaagaaacgccattactcacctgccgttatccatattcgccagcctggggaatttgaccttcctcagcctgcaatggaacatgttacgagtgttgcctgcaggccttttcgcccataccccctgtctggtgggattgagtttaacacataatcagcttgagaccgtggccgagggtacttttgcacacctaagcaacctccggagcctcatgttgtcatacaatgctattacacaccttccagcaggaattttccgcgatttggaagagctggttaagctgtatctgggcagcaacaatctgacggccctccatcctgcgctgttccagaatctgagtaagctggaacttctttccctttctaaaaaccagttgaccacacttccagaaggaatctttgacactaattacaatttgttcaacctggctctgcatggcaatccatggcagtgtgactgccaccttgcttacttgttcaactggctgcagcagtacaccgaccgcctacttaatatccagacttactgcgcaggccccgcttacctaaaaggccaggtggttccagctctgaacgagaaacagctggtttgtccggtcacccgtgatcaccttggctttcaggttacctggccagacgaatcaaaagccggaggctcttgggatctagccgtgcaggaacgggctgcgcgctcccagtgcacttactcgaaccctgaaggcactgtggtactggcttgcgaccaagcacagtgtcgatggctgaatgtgcaactgtctccccaacagggatccctaggcctgcaatacaacgcatctcaggagtgggatctgcgttcatcctgtgggtcacttcgcttgacagtgtccatcgaagcccgggcggctggaccctag

SEQ ID NO: 110959 - DNA, 1638 bp, Artificial Sequence
  derived and/or modified sequence
atgctgcccggggcctggctgctgtggaccagcctgctgctgctggcccggcctgcccagccctgccccatgggctgtgactgctttgtgcaggaggtgttctgcagtgatgaggagctggccaccgtgcccctggacatccccccctacaccaagaacatcatctttgtggagaccagcttcaccaccctggagacccgggccttcggcagcaaccccaacctgaccaaggtggtgttcctgaacacccagctgtgccagttccggccagatgcctttggaggcctgccccggctggaggacctggaggtgacaggcagcagcttcctgaacctgagcaccaacatcttcagcaacctgaccagcctgggcaagctgaccctgaacttcaacatgctggaggccctgcctgagggcctcttccagcacctggccgccctggagagcctgcacctgcagggcaaccagctgcaggccctgccccggcggctcttccagcccctgacccacctgaagaccctgaacctggcccagaacctgctggcccagctgcctgaggagctgttccaccccctgaccagcctgcagaccctgaagctgagcaacaatgccctgagcggcctgccccagggcgtgtttgggaagctgggcagcctgcaggagctgttcctggacagcaacaacatcagcgagctgcccccccaggtgttcagccagctgttctgcctggagcggctgtggctgcagagaaatgccatcacccacctgcccctgagcatctttgccagcctgggcaacctgaccttcctgagcctgcagtggaacatgctgcgggtgctgcctgctggcctgtttgcccacaccccctgcctggtgggcctgagcctgacccacaaccagctggagaccgtggccgagggcacctttgcccacctgagcaacctgcggagcctgatgctgagctacaatgccatcacccacctgcctgctggcatcttccgggacctggaggagctggtgaagctgtacctgggcagcaacaacctgacagccctgcacccagccctcttccagaacctgagcaagctggagctgctgagcctgagcaagaaccagctgaccaccctgcctgagggcatctttgacaccaactacaacctcttcaacctggccctgcacggcaacccctggcagtgtgactgccacctggcctacctgttcaactggctgcagcagtacacagaccggctgctgaacatccagacctactgtgccggccctgcctacctgaagggccaggtggtgcctgccctgaatgagaagcagctggtgtgccctgtgacccgggaccacctgggcttccaggtgacctggccagatgagagcaaggccggcggctcctgggacctggccgtgcaggagcgggccgcccggagccagtgcacctacagcaaccctgagggcaccgtggtgctggcctgtgaccaggcccagtgccgctggctgaatgtgcagctgagcccccagcagggcagcctgggcctgcagtacaatgccagccaggagtgggacctgcggagcagctgtggcagcctgcggctgactgtgtccattgaggcccgggctgctggcccctag

SEQ ID NO: 110960 - DNA, 1638 bp, Artificial Sequence
  derived and/or modified sequence
atgctgcccggcgcctggctgctgtggaccagcctgctgctgctggcccgtcccgctcagccgtgccccatgggatgtgattgctttgtgcaggaagtcttctgttctgatgaagagcttgcgactgtgcccttggacatcccgccgtatacaaaaaacatcatcttcgtcgagacttcctttaccaccctcgaaaccagagctttcggctctaatcccaacctgaccaaggtggtgttcctgaatacacagctctgtcagttcagaccagatgcctttggtggcctgccaagacttgaggacctagaggtgacagggagttccttcctcaacttgtccacaaacatctttagcaacctcacgtcattgggtaagctgaccttgaattttaatatgctcgaggcgctacccgagggtctcttccagcatctcgccgctctggagagcctgcacctacaagggaatcagttgcaggccctgcctagacgcctctttcagcctctaacacatctgaagacattgaacctagctcagaacctcttggcccagctccctgaggaattattccacccattaacatccctacaaaccctgaaactgtccaataacgctttgtcggggctgccccagggtgtgttcgggaagttgggttcactgcaagaactgtttctggatagcaataacatcagcgagttgcccccccaggtcttctctcagcttttttgcttagagcgcctgtggctacagagaaacgccatcactcacttaccactgagcattttcgcaagcctcggaaatctgacattcttgagcctgcagtggaatatgctgcgagttctccccgctggattattcgctcataccccttgtcttgtgggactctccctcacccacaatcaattagaaactgttgccgaaggcacatttgcccatttgtccaacctgcgatccctgatgctgtcttacaacgccatcacacatcttccagccggcatttttagggatctggaggaattagtgaagttgtatctgggctcaaataacctcaccgcactccatccggccctcttccagaatctgagcaagttggagctgctgtctctcagcaagaatcagctgacaacgttacccgaaggcatatttgatactaactacaatttgtttaatctcgccttgcatgggaacccttggcagtgcgattgccacctggcgtatctgttcaactggttgcaacagtacaccgacagactgctgaacattcagacctattgcgcaggtccagcgtatttaaagggtcaagttgtaccagcattgaacgagaagcaactagtgtgtcctgtgaccagggatcatctcggattccaggtgacctggcctgacgagagcaaagccggtggctcttgggatttggccgtgcaagaacgcgcagcccggtcacagtgcacgtatagcaaccccgaggggacggtcgtgcttgcctgcgaccaggcacaatgtagatggctgaacgtgcagttgtccccacaacagggaagtctgggactgcagtacaatgccagccaggagtgggatctccgttccagttgcgggagcctgcggttaacggtttcaattgaggcccgagccgcaggcccctag

SEQ ID NO: 110961 - DNA, 1638 bp, Artificial Sequence
  derived and/or modified sequence
atgctgcccggcgcctggctgctgtggaccagcctgctgctgctggctcgccccgctcaaccatgcccaatggggtgtgactgtttcgtgcaggaggtgttttgttccgacgaggaattggccaccgttccactggacattcccccctatacgaagaatatcatcttcgtggagaccagttttaccaccctcgagactagagcttttggctctaatcccaatctgaccaaggtagtgttcctaaatacgcaactgtgccaattccggccagatgctttcggcggattacctaggttagaagatctggaagttaccggatcctcgttcttaaatctctctaccaatattttcagcaatctgacctctctggggaagctgactctgaactttaacatgctcgaagctttgccggaaggcctgtttcagcacctagctgctcttgagtccttgcacctccaggggaatcaactgcaggccctgcccagacgtctgttccaaccgctcacccatcttaagaccctgaaccttgctcagaatctgctggcccagttgcctgaagaactgtttcatcctctgaccagtctccagaccctgaagttgagtaataatgccctgtccggactgcctcagggcgttttcggtaagctaggctcacttcaagagctgtttctggattcaaataatatctctgaacttcccccgcaggtttttagtcaactgttctgcttagagcgcttgtggctgcaacgaaacgctattacacacctgccactttcgatctttgctagcctcggcaacttgacctttcttagcttgcagtggaatatgctgcgcgtgctgcccgcaggattgttcgcccatactccttgcttagtcggtctgtctctgacgcacaatcaattggaaacagtagcagagggcaccttcgcacacctgagtaacttaagaagtttgatgttgagttacaacgctatcacacaccttcctgcagggatctttagagatttggaagagctggtcaagctgtatttgggctcaaataatctcacagctctccacccagctctgtttcagaatttaagtaaactcgagctcctgtctctgtccaagaaccagctgacgactttacccgaaggcatctttgatactaactacaacctgttcaatttagcactgcacggtaatccatggcagtgcgattgtcatttggcctacctgtttaattggttgcagcagtacacagaccgactgttgaatattcaaacgtattgcgcaggccctgcatatctgaaaggacaggtggtacctgccttgaacgaaaagcagctggtgtgtccggtaacgcgcgatcacctgggttttcaggttacgtggcccgacgagagtaaagctggtgggtcttgggatctcgcagtgcaagaaagagcagccaggtcccagtgcacgtatagcaatcctgaaggaactgtggtcctggcatgcgatcaggcccagtgcagatggctgaacgtgcagctcagtccccagcagggcagccttggcctgcaatataacgcctcacaagagtgggatctgcgatcctcctgcgggtcccttaggctaacggtctcaattgaagcccgagccgctggtccttag

SEQ ID NO: 110962 - DNA, 1638 bp, Artificial Sequence
  derived and/or modified sequence
atgctccccggagcatggctgctctggacgtctctgctgctgctggcgaggcccgcacagccgtgtccaatgggctgcgattgcttcgtgcaggaagtcttttgttctgacgaggaattggctaccgtgccacttgacatcccaccctacacaaaaaatatcattttcgtagaaacatcctttacgacgctagagacgagagccttcgggtccaaccccaatctgacgaaagtggtattcctgaacacacaattgtgccagtttcgtccggacgcgtttggcggtctgcctaggttggaggatctggaggttaccggctcaagttttctgaacctttccaccaacattttcagtaaccttactagcctagggaaactgaccttgaactttaatatgctggaggccttacctgagggcctgttccagcatctcgccgcactggagtcccttcatctgcaggggaaccagctccaggctcttccgagaaggctgtttcagcccctgacacaccttaaaaccctcaacctggcacaaaatctgctcgcccagctgcctgaggaattgttccaccccctgacaagccttcagacactcaaactctctaataatgctctgtcaggactgccacagggagtttttggaaaactaggtagcttgcaggagctctttctggatagtaataacatcagcgagttaccgccacaggtcttcagtcagctcttttgtctggagagactttggctacagcgaaatgctattactcatcttcccttgtcaattttcgcctccctcggcaatcttaccttcctgtccctgcaatggaatatgctcagggtacttccggcaggactgtttgctcacaccccttgccttgtgggattgtctcttacgcataatcaactggaaacagtggcagaagggacattcgcccatctaagtaacctgcggagtttaatgctgtcctataatgcaattacccatcttcccgctgggatattccgggatctagaggagctggtgaaactctacctgggtagcaataacctaacagctctccatcctgccctgtttcagaacctttcgaaactcgaactgttaagcctcagcaagaatcagttaacaactctgcctgagggcatcttcgatacaaattataatctcttcaacctggcacttcatggcaacccgtggcagtgcgactgtcacctcgcgtacctattcaattggcttcaacagtacacagatagactgctgaacatccagacatattgcgctggaccagcttacctgaaaggtcaggtggtgcccgcactaaatgaaaagcagctggtctgtcctgttacgagggaccatctgggttttcaggtgacgtggcccgacgaatcaaaagctggcggttcatgggaccttgcggtccaagagagggccgctcggtcacagtgtacctatagcaacccagaggggacagttgtgttagcctgcgatcaggcccagtgccggtggttaaatgtccaattaagccctcagcagggctcactgggactgcagtacaacgcctcccaagagtgggacctcagatcctcttgtggatccttgcgactgactgtaagcattgaagccagagccgcaggaccttag

SEQ ID NO: 110963 - DNA, 1638 bp, Artificial Sequence
  derived and/or modified sequence
atgcttcccggagcatggttattgtggacctccctgcttctcctggccaggccagctcagccatgtccaatgggttgcgattgctttgtgcaggaagtcttttgttccgatgaagagcttgccacagtacccctggacatccctccgtacactaagaatatcatattcgtggaaacgtcctttaccacccttgaaacacgggcattcggctcaaaccctaacctgacaaaggtggttttcctgaacactcagttatgtcagtttaggcctgacgccttcggcggtctgcctcgcctcgaagatctcgaggttacgggatcaagctttcttaatctgagcacgaacatcttttctaatctgacatccctgggtaagctaaccctgaatttcaatatgctggaggctcttcccgagggactgttccaacatctggccgctctcgaatcactacacctgcaaggcaaccagttgcaggctctaccacgtcggttgttccagcctctcacccacttgaagactctgaatctggctcagaacctgctggcacaactgcccgaggaattgttccaccctctcacgtctctgcagactctgaagctgtccaacaatgcattaagcggtctaccccagggtgtctttggcaagctgggcagcctgcaagaactgtttcttgactcaaacaatatttcagaacttcctccacaggtcttttcccagctgttctgcctggaacggctgtggcttcagaggaacgctattacccacctgccgctgtccatcttcgcttcactgggcaatctgacctttctgagcctccagtggaatatgctacgcgttctcccagccggactgtttgcacataccccgtgtctggttggccttagcttaacacataaccagctggagactgtggctgagggcacatttgctcatctgtccaacctgcgatctttgatgctctcgtacaacgccatcactcacctgccggctggcatatttcgggacctggaagaacttgtgaagctctatctcggctcaaacaacctgaccgccttgcaccccgcactctttcagaacctgtctaaactcgagctgcttagcctgagtaaaaatcagttgaccaccctgcctgagggcatctttgacaccaattacaatctgttcaacctggctctccatggcaatccctggcagtgtgattgccacctggcatacctgttcaactggctgcaacaatatacagatcgtttactgaacatccagacatactgcgctggccctgcctacctcaagggacaagtagtgccagcactgaacgaaaagcaattagtgtgtcctgtgactcgcgaccatcttggttttcaggtcacatggcccgacgaatccaaagcaggtggaagctgggacctagcagtgcaggaaagagccgctcgctctcagtgtacctatagtaatcccgaagggaccgtggttctggcgtgtgatcaggcccagtgcaggtggctgaacgtccaactctccccccaacagggtagcttaggactgcagtataacgcaagccaagagtgggaccttagaagctcctgtgggagtctgcgtttgacagtctccatcgaggcgagagccgctggaccttag

SEQ ID NO: 110964 - DNA, 3028 bp, Artificial Sequence
  derived and/or modified sequence
ggattgagctgaccacaggccacaccagactcctctctgctcctgaggaagacagggcagcccggcgccacccgctcggccctcacgaagatgctccctggagcctggctgctctggacctccctcctgctcctggccaggcctgcccagccctgtcccatgggttgtgactgcttcgtccaggaggtgttctgctcagatgaggagcttgccaccgtcccactggacatcccgccatatacgaaaaacatcatctttgtggagacctcgttcaccacattggaaaccagagcttttggcagtaaccccaacttgaccaaggtggtcttcctcaacactcagctctgccagtttaggccggatgccttcggggggctgcccaggctggaggacctggaggtcacaggcagtagcttcttgaacctcagcaccaacatcttctccaacctgacctcgctgggcaagctcaccctcaacttcaacatgctggaggctctgcccgagggtcttttccagcacctggctgccctggagtccctccacctgcaggggaaccagctccaggccctgcccaggaggctcttccagcctctgacccatctgaagacactcaacctggcccagaacctcctggcccagctcccggaggagctgttccacccactcaccagcctgcagaccctgaagctgagcaacaacgcgctctctggtctcccccagggtgtgtttggcaaactgggcagcctgcaggagctcttcctggacagcaacaacatctcggagctgccccctcaggtgttctcccagctcttctgcctagagaggctgtggctgcaacgcaacgccatcacgcacctgccgctctccatctttgcctccctgggtaatctgacctttctgagcttgcagtggaacatgcttcgggtcctgcctgccggcctctttgcccacaccccgtgcctggttggcctgtctctgacccataaccagctggagactgtcgctgagggcacctttgcccacctgtccaacctgcgttccctcatgctctcatacaatgccattacccacctcccagctggcatcttcagagacctggaggagttggtcaaactctacctgggcagcaacaaccttacggcgctgcacccagccctcttccagaacctgtccaagctggagctgctcagcctctccaagaaccagctgaccacacttccggagggcatcttcgacaccaactacaacctgttcaacctggccctgcacggtaacccctggcagtgcgactgccacctggcctacctcttcaactggctgcagcagtacaccgatcggctcctgaacatccagacctactgcgctggccctgcctacctcaaaggccaggtggtgcccgccttgaatgagaagcagctggtgtgtcccgtcacccgggaccacttgggcttccaggtcacgtggccggacgaaagcaaggcagggggcagctgggatctggctgtgcaggaaagggcagcccggagccagtgcacctacagcaaccccgagggcaccgtggtgctcgcctgtgaccaggcccagtgtcgctggctgaacgtccagctctctcctcagcagggctccctgggactgcagtacaatgctagtcaggagtgggacctgaggtcgagctgcggttctctgcggctcaccgtgtctatcgaggctcgggcagcagggccctagtagcagcgcatacaggagctggggaagggggcctctggggcctgaccaggcgacaggtaggggcggaggggagctgagtctccgaagccttggcttttcacatgcaagggacagggttacatccccaaggtgagggggtggagtctggtctgctccactaaccagggtctcctcctcctcttccttcatcgcttctcctggagtgtgcggcctaacaaggccatccttatgccttgcaaagcaccctcaaaagctgcaccacagcctggagaataaaatatcctcagccctgatgcctccccattatgtaacacccaaccgctctcacctacaccctgaggtctattcactgcatcccagtgatacaaagtggaggccactgccttctgacatctggctcaaaagcccagtgtctgtttccatttatttccctggaatttcatttaaaattggtatagagaaaaaaaggatgtgacagaagcagagatgaccagaaagcacaggggcagggttctgactggcgtgtgggagaccctgtggccggcacccacctccacacgaggactaagctctgatttttttatcttgcccaaattcctacctaaggggtctagggagtcgcgccttacaaatcataaattctcatcagatgggttttatttgaccctgtatatcatgacttatttttaatctgactatggcataacattacaagacgaggcaaaaatatttaacccccaaatatatttccttgccctaccttgaacttgccctgcagagtctcttgtgaggagaatccacatcctataaagaagcccctttcccctttgttttccttcctttctttccagtccaggagatcatcaactaagagccaggcaccccttttaagtcgataagaaacagtttacaacctgctctctctctctctgaagtctgctgagagcttcccctgcacaataaaacttggcctccacgatcctttatcttaacctgaacattcctttccattgatcccaggtcttcagctaagctcaaccaattgtcaaccagaaaatgtttaaatttacctacagcctggaagcacccacccccgctgcttcgagttgtcctgcctttctgaactcaaccaatgtatttcttaaatgtatttgattgatgcctcattcctccctaaaatgtataaaaccaagctgtacctcgaccaccttgggcacatgttcccaggccctcctgaggtctgtgtcacgggccatggccactcatatttggctcagaataaatctcttcaaatatttta

SEQ ID NO: 110965 - DNA, 2008 bp, Artificial Sequence
  derived and/or modified sequence
gaccacaggccacaccagactcctctctgctcctgaggaagacagggcagcccggcgccacccgctcggccctcacgatgctccctggagcctggctgctctggacctccctcctgctcctggccaggcctgcccagccctgtcccatgggttgtgactgcttcgtccaggaggtgttctgctcagatgaggagcttgccaccgtcccactggacatcccgccatatacgaaaaacatcatctttgtggagacctcgttcaccacattggaaaccagagcttttggcagtaaccccaacttgaccaaggtggtcttcctcaacactcagctctgccagtttaggccggatgccttcggggggctgcccaggctggaggacctggaggtcacaggcagtagcttcttgaacctcagcaccaacatcttctccaacctgacctcgctgggcaagctcaccctcaacttcaacatgctggaggctctgcccgagggtcttttccagcacctggctgccctggagtccctccacctgcaggggaaccagctccaggccctgcccaggaggctcttccagcctctgacccatctgaagacactcaacctggcccagaacctcctggcccagctcccggaggagctgttccacccactcaccagcctgcagaccctgaagctgagcaacaacgcgctctctggtctcccccagggtgtgtttggcaaactgggcagcctgcaggagctcttcctggacagcaacaacatctcggagctgccccctcaggtgttctcccagctcttctgcctagagaggctgtggctgcaacgcaacgccatcacgcacctgccgctctccatctttgcctccctgggtaatctgacctttctgagcttgcagtggaacatgcttcgggtcctgcctgccggcctctttgcccacaccccgtgcctggttggcctgtctctgacccataaccagctggagactgtcgctgagggcacctttgcccacctgtccaacctgcgttccctcatgctctcatacaatgccattacccacctcccagctggcatcttcagagacctggaggagttggtcaaactctacctgggcagcaacaaccttacggcgctgcacccagccctcttccagaacctgtccaagctggagctgctcagcctctccaagaaccagctgaccacacttccggagggcatcttcgacaccaactacaacctgttcaacctggccctgcacggtaacccctggcagtgcgactgccacctggcctacctcttcaactggctgcagcagtacaccgatcggctcctgaacatccagacctactgcgctggccctgcctacctcaaaggccaggtggtgcccgccttgaatgagaagcagctggtgtgtcccgtcacccgggaccacttgggcttccaggtcacgtggccggacgaaagcaaggcagggggcagctgggatctggctgtgcaggaaagggcagcccggagccagtgcacctacagcaaccccgagggcaccgtggtgctcgcctgtgaccaggcccagtgtcgctggctgaacgtccagctctctcctcagcagggctccctgggactgcagtacaatgctagtcaggagtgggacctgaggtcgagctgcggttctctgcggctcaccgtgtctatcgaggctcgggcagcagggccctagtagcagcgcatacaggagctggggaagggggcctctggggcctgaccaggcgacaggtaggggcggaggggagctgagtctccgaagccttggcttttcacatgcaagggacagggttacatccccaaggtgagggggtggagtctggtctgctccactaaccagggtctcctcctcctcttccttcatcgcttctcctggagtgtgcggcctaacaaggccatccttatgccttgcaaagcaccctcaaaagctgcaccacagcctggagaataaaatatcctcagccctga

SEQ ID NO: 110966 - DNA, 1638 bp, Artificial Sequence
  derived and/or modified sequence
atgctgcccggcgcctggctgctgtggaccagcctgctgctgctggccagacccgcccagccctgccccatgggctgcgactgcttcgtgcaggaggtgttctgcagcgacgaggagctggccaccgtgcccctggacatccccccctacaccaagaacatcatcttcgtggagaccagcttcaccaccctggagaccagagccttcggcagcaaccccaacctgaccaaggtggtgttcctgaacacccagctgtgccagttcagacccgacgccttcggcggcctgcccagactggaggacctggaggtgaccggcagcagcttcctgaacctgagcaccaacatcttcagcaacctgaccagcctgggcaagctgaccctgaacttcaacatgctggaggccctgcccgagggcctgttccagcacctggccgccctggagagcctgcacctgcagggcaaccagctgcaggccctgcccagaagactgttccagcccctgacccacctgaagaccctgaacctggcccagaacctgctggcccagctgcccgaggagctgttccaccccctgaccagcctgcagaccctgaagctgagcaacaacgccctgagcggcctgccccagggcgtgttcggcaagctgggcagcctgcaggagctgttcctggacagcaacaacatcagcgagctgcccccccaggtgttcagccagctgttctgcctggagagactgtggctgcagagaaacgccatcacccacctgcccctgagcatcttcgccagcctgggcaacctgaccttcctgagcctgcagtggaacatgctgagagtgctgcccgccggcctgttcgcccacaccccctgcctggtgggcctgagcctgacccacaaccagctggagaccgtggccgagggcaccttcgcccacctgagcaacctgagaagcctgatgctgagctacaacgccatcacccacctgcccgccggcatcttcagagacctggaggagctggtgaagctgtacctgggcagcaacaacctgaccgccctgcaccccgccctgttccagaacctgagcaagctggagctgctgagcctgagcaagaaccagctgaccaccctgcccgagggcatcttcgacaccaactacaacctgttcaacctggccctgcacggcaacccctggcagtgcgactgccacctggcctacctgttcaactggctgcagcagtacaccgacagactgctgaacatccagacctactgcgccggccccgcctacctgaagggccaggtggtgcccgccctgaacgagaagcagctggtgtgccccgtgaccagagaccacctgggcttccaggtgacctggcccgacgagagcaaggccggcggcagctgggacctggccgtgcaggagagagccgccagaagccagtgcacctacagcaaccccgagggcaccgtggtgctggcctgcgaccaggcccagtgcagatggctgaacgtgcagctgagcccccagcagggcagcctgggcctgcagtacaacgccagccaggagtgggacctgagaagcagctgcggcagcctgagactgaccgtgagcatcgaggccagagccgccggcccctag

SEQ ID NO: 110967 - RNA, 21 nt, Artificial Sequence
  derived and/or modified sequence
ggaaaucccuggcaaugugau

SEQ ID NO: 110968 - RNA, 21 nt, Artificial Sequence
  derived and/or modified sequence
gguaaucccuggcaaugugau

SEQ ID NO: 110969 - RNA, 21 nt, Artificial Sequence
  derived and/or modified sequence
aucacauugccagggauuucc

SEQ ID NO: 110970 - RNA, 21 nt, Artificial Sequence
  derived and/or modified sequence
aucacauugccagggauuacc

SEQ ID NO: 110971 - protein, 347 aa, Artificial Sequence
  derived and/or modified sequence
MRECGGGPGAGKRLCAICGDRSSGKHYGVYSCEGCKGFFKRTIRKDLTYSCRDNKDCTVDKRQRNRCQYCRYQKCLATGMKREAVQEERQRGKDKDGDGEGAGGAPEEMPVDRILEAELAVEQKSDQGVEGPGGTGGSGSSPNDPVTNICQAADKQLFTLVEWAKRIPHFSSLPLDDQVILLRAGWNELLIASFSHRSIDVRDGILLATGLHVHRNSAHSAGVGAIFDRSLSRVLTELVSKMRDMRMDKTELGCLRAIILFNPDAKGLSNPSEVEVLREKVYASLETYCKQKYPEQQGRFAKLLLRLPALRSIGLKCLEHLFFFKLIGDTPIDTFLMEMLEAPHQLA

SEQ ID NO: 110972 - DNA, 1044 bp, Artificial Sequence
  derived and/or modified sequence
atgcgcgaatgcggcggaggaccgggagcaggcaaacgcttgtgcgcaatttgcggagacagatctagcggaaagcattacggggtgtacagttgcgaaggttgcaagggatttttcaaaagaacaattcggaaggacctgacttacagttgcagggacaataaggactgcacagttgataagcgccaacggaacaggtgtcagtactgtaggtatcaaaagtgcttggccaccggaatgaagagagaggccgtacaggaggaacgccagagaggcaaggataaggacggcgatggggagggggccggcggtgcccccgaggaaatgcccgtcgatcgaatcctggaagccgagcttgccgttgagcaaaagagcgaccagggcgtagaggggcccggcggtaccggtggcagtggttcgagccccaatgaccccgtgactaatatctgccaagcagccgataagcagctttttacattggtcgagtgggccaagagaatcccccacttctcaagcttgcctttagacgatcaggttatcctcctgagggctggctggaatgagttgctcattgcctctttctcacatagatccatcgatgtgagagacggaatcctgctagcgacagggctccatgtccacaggaattctgcccactccgccggcgtcggcgctatctttgacagatccctttcgcgggtactgactgaactggtctctaagatgagggatatgagaatggacaagaccgagttgggttgccttcgcgctataatcctattcaatccggatgctaagggcctgtccaatcccagcgaagtagaggtcctccgcgagaaggtatatgcttccctggagacatactgtaaacagaagtatcccgagcagcaaggacggttcgcgaagctcctcctaaggcttcccgctctgaggagtattgggctgaagtgtcttgaacacttattttttttcaagctgattggcgacacccccattgacaccttcctcatggaaatgctagaggctccccaccagctggcctag

SEQ ID NO: 110973 - DNA, 1044 bp, Artificial Sequence
  derived and/or modified sequence
atgagagagtgcggcggcgggcctggcgctggtaagaggctgtgcgcaatatgcggtgaccggagctcaggaaaacactatggagtctatagttgtgaggggtgtaaaggctttttcaagaggaccattcgaaaggatctgacatattcctgccgcgacaacaaggactgcacggtggataagcgtcaaagaaacaggtgccagtattgtcgctatcaaaagtgtctcgcaaccggaatgaagagagaggctgtccaggaggaaagacagcgtggcaaagacaaggatggggacggtgaaggggctgggggtgctcccgaagaaatgccagtggatcggattctggaagccgaacttgcagtcgaacaaaagagtgaccagggggtagaggggccaggagggaccggagggtccggatcttcacctaatgatccagtcactaacatctgccaagccgctgataaacagctttttaccctggtcgaatgggctaagagaatcccacacttctcatctcttcctcttgacgatcaggtgatcctgcttagagcaggatggaatgaacttctaatagccagcttctctcaccgaagcatcgatgtgcgtgacggaatccttctggcgactgggctgcatgttcacaggaactcggcgcactccgccggtgttggcgccatcttcgatcggagcctgtcacgtgtcctaacagagctcgtctcgaaaatgagagatatgaggatggacaagaccgagctcgggtgtctgcgggctattatcctttttaacccagatgctaagggtttgagcaaccctagcgaagtggaagtgctccgtgaaaaggtctacgctagcctcgagacctattgtaaacagaagtatcccgaacagcagggtcggtttgcaaagttgctgcttcgacttcccgcgcttagatcaatcggcctgaagtgcctcgagcacttgttcttttttaagctgataggagacacacccatcgacacctttcttatggagatgttagaggctccccatcagctggcgtag

SEQ ID NO: 110974 - DNA, 1044 bp, Artificial Sequence
  derived and/or modified sequence
atgagagagtgcggagggggtcccggagccgggaaacggctgtgcgcaatttgcggtgatcggtcctcagggaaacactacggggtgtactcctgtgaagggtgtaaggggttctttaagcgcaccatcaggaaagatctgacctacagctgtcgcgataacaaggactgtaccgtggataaaaggcagcgaaatcggtgtcagtactgccgataccagaagtgtctggcaacgggcatgaagagggaggctgtgcaagaagaaagacagcggggcaaggacaaggacggggacggggagggcgccggcggggctcctgaggaaatgccggtggaccggatactggaagctgagctcgcagtcgagcagaaatctgatcagggggtagagggccccggcggaacaggtggatccggctcgtcacctaacgatccagtgactaacatctgtcaggctgcagacaaacaactgtttactctggtcgagtgggctaaacggatccctcactttagctccctcccacttgacgaccaggtcatccttttgcgcgccgggtggaacgagctcctcatcgcaagcttttcccaccgaagtattgacgtgagggacggcattctcctggccaccggcctccacgtgcacagaaattccgcccactcggctggggtcggagccattttcgatcgaagtctctcgagagtgttaactgaactggtgagcaagatgagggatatgcggatggataagactgagcttgggtgtttaagggccattatcctgttcaacccagacgctaagggcttgtctaatccgtcggaagtggaggtccttcgcgagaaggtgtatgcctcactggagacctactgtaaacagaagtacccggagcagcaggggcgatttgcgaaacttctcttacgccttcctgccctgaggtctataggcttaaagtgcctggaacacctgttctttttcaaactgatcggcgacactccaattgataccttcttaatggaaatgctggaggctccccaccagctggcatag

SEQ ID NO: 110975 - DNA, 1044 bp, Artificial Sequence
  derived and/or modified sequence
atgcgggagtgcggtggcggccctggcgccggcaagagattgtgcgcaatttgcggagataggtcatctggcaagcactacggtgtgtattcttgtgagggatgcaagggcttcttcaaaaggaccatccgcaaagacctgacgtactcatgtagggacaacaaggactgtactgtggacaaacggcaaaggaataggtgtcaatattgcagatatcaaaagtgtctggccactgggatgaagcgggaggccgtgcaggaggagcggcagaggggaaaggataaggacggcgacggcgagggtgccggcggcgcccccgaggagatgccagttgatcgcattttggaggccgagttggctgtggaacagaaatcagaccagggagtggagggtccgggcggcaccgggggaagcgggtccagccctaatgatcccgttactaacatttgccaagccgccgacaagcagctgtttaccctcgtagaatgggcaaagcggatccctcacttcagttccctcccattggacgatcaggtgatcctgctcagagctgggtggaacgaacttttaatcgcatccttttcccacaggtcaattgacgtccgcgatggtatcctcctggccacggggcttcacgtgcataggaacagcgcccactccgcaggggttggggcaattttcgatcggtcccttagcagagttttaaccgagctggtttcgaagatgagagacatgagaatggacaaaacagagctcgggtgcttaagggccatcatcctgttcaatccagacgcaaaggggctatcaaatccctccgaagtcgaagtgcttagggagaaggtgtatgcatctctcgaaacatactgcaagcaaaagtatcctgaacagcagggtcggtttgcaaaactcctgctgcgcctgcctgccctgaggtccataggcctcaagtgcctagagcatctattcttcttcaagcttatcggcgacacgcccatcgatacttttctgatggaaatgttggaggccccccaccagctggcttag

SEQ ID NO: 110976 - DNA, 1044 bp, Artificial Sequence
  derived and/or modified sequence
atgcgcgaatgcgggggggggcccggagccgggaagagactgtgcgctatctgtggtgatcggtcctccggcaagcactatggagtgtactcatgcgaggggtgcaagggcttctttaagcgaaccatcaggaaagacctgacttactcctgtagagataataaggattgcacagtagacaaacgacagagaaatcggtgtcaatattgcagatatcagaagtgtttagcaaccggcatgaaaagagaggctgtccaggaggaacgccaaagaggaaaggacaaggatggggacggggagggcgctgggggcgccccggaagagatgcccgtcgacagaattctcgaggcagagcttgcggtagagcagaaatcagaccaaggcgtagagggacctggcggcaccggtggctctgggtcctccccaaatgatccagtcaccaacatctgtcaggccgccgataagcaactgttcaccctggtggagtgggccaagcgcataccccacttcagctcactccccttggatgaccaagtgatcctgctgagagccggttggaacgaacttctgatcgctagtttctctcacaggtcaattgacgtgagagatggcattctccttgctaccggcttacatgttcaccgaaacagcgcccactccgccggggtcggagccatatttgatagatccctgagccgggtgctgacagagttagtgtcgaagatgcgggatatgcgcatggataagacagagcttgggtgcctgcgtgccataatactgttcaatccagatgctaaggggctttcgaatcccagtgaggttgaagtgctgcgcgaaaaagtgtatgcgtcactcgaaacctactgcaaacagaaatacccggagcagcaaggtcgatttgctaagctccttctgaggctcccagctctccgttctataggcctgaaatgtctggaacatctgttctttttcaagcttattggtgacactccaattgatacatttctcatggaaatgctcgaggcgccccaccagcttgcatag

SEQ ID NO: 110977 - DNA, 1044 bp, Artificial Sequence
  derived and/or modified sequence
atgagagaatgtggcggcggccctggggccggcaagaggctgtgtgccatctgtggggacaggagcagcggcaagcactatggagtgtacagctgtgagggctgcaagggcttcttcaagaggaccatcaggaaggacctgacctacagctgccgggacaacaaggactgcaccgtggacaagaggcagaggaaccgctgccagtactgccgctaccagaagtgcctggccaccggcatgaagcgggaggccgtgcaggaggagcggcagaggggcaaggacaaggatggagatggagagggcgctgggggcgcccctgaggagatgcctgtggaccgcatcctggaggccgagctggccgtggagcagaagagtgaccagggcgtggagggccctgggggcactggaggcagcggcagcagccccaatgaccctgtgaccaacatctgccaggccgctgacaagcagctgttcaccctggtggagtgggccaagaggatcccccacttcagcagcctgcccctggatgaccaggtgatcctgctgcgggccggctggaatgagctgctgattgccagcttcagccacaggagcattgatgtgagagatggcatcctgctggccaccggcctgcacgtgcacagaaattctgcccacagcgctggggtgggcgccatctttgacaggagcctgagccgggtgctgacagagctggtgtccaagatgagggacatgaggatggacaagacagagctgggctgcctgcgggccatcatcctcttcaacccagatgccaagggcctgagcaaccccagcgaggtggaggtgctgcgggagaaggtgtatgccagcctggagacctactgcaagcagaagtacccagagcagcagggccgctttgccaagctgctgctgcggctgcctgccctgcggagcatcggcctgaagtgcctggagcacctgttcttcttcaagctgattggagacacccccatcgacaccttcctgatggagatgctggaggccccccaccagctggcctag

SEQ ID NO: 110978 - DNA, 1044 bp, Artificial Sequence
  derived and/or modified sequence
atgcgggagtgcggcggcggccccggcgccggcaagcggctgtgcgcaatttgtggcgaccggagttctggaaagcactatggcgtgtactcttgcgaaggttgtaagggcttctttaagaggaccattcggaaagatctcacgtacagctgccgagacaacaaggattgcactgtcgacaaacgccagagaaaccgctgccagtactgccgctaccagaagtgtctggctactgggatgaagagggaggctgtgcaggaggaaaggcaacgcgggaaagataaggacggcgacggcgagggcgctgggggcgcacctgaggagatgcctgtcgacagaatactcgaagctgaactcgcggtcgagcagaagagcgaccagggtgtagagggcccgggtggaaccggcggtagcggatcctctcctaacgaccctgttaccaatatttgtcaggcagctgacaaacagttattcacattggtggaatgggccaagaggatcccacatttcagcagtctacccctggatgaccaggtcatactgctgagggccggctggaacgagttactgattgcctccttcagccatcgatcgattgatgtaagagacggaattcttctagccaccgggcttcacgtgcaccggaacagtgcccacagcgcaggcgttggcgcgattttcgataggtccctcagtcgggtgttgacagagctggtgtcaaagatgcgtgacatgcgaatggataaaactgagctgggctgcctacgtgccattatcctgtttaaccctgacgctaaaggactttccaatccctcagaagttgaggtacttcgcgagaaagtttatgcctcccttgaaacttactgcaagcaaaagtaccctgaacaacaaggaagattcgccaagctgttattgagattgccggctcttcgatcaattggcttaaagtgcctcgagcacttattcttttttaaacttatcggcgacacgcccatcgacacatttctaatggagatgttggaagctccacaccagctggcctag

SEQ ID NO: 110979 - DNA, 1044 bp, Artificial Sequence
  derived and/or modified sequence
atgcgggagtgcggcggcggccccggcgccggcaagcggctgtgcgctatttgtggcgaccggtcgagcggaaagcactacggggtctactcctgtgaggggtgtaaggggttcttcaaacggacgatacgcaaagatttgacctactcatgccgagacaataaggattgtacagtggataagcgccagcgcaataggtgccagtactgcaggtatcaaaagtgtctggcaactgggatgaagcgagaagcagtgcaagaggaaagacagcggggcaaagacaaggacggtgatggagagggcgctggaggcgcccctgaagaaatgcccgtggaccgcatcctggaagctgagctggcagtggagcagaaatcagatcagggggtggagggacctggaggcactggggggagcggaagtagtcctaatgaccccgtgaccaacatttgtcaggcagcagataagcagctgtttaccctggttgagtgggctaaaaggatcccccacttttcatcactaccattagatgaccaggttattcttctgcgggcaggctggaacgaattactgatagcttctttctcgcacaggtccattgacgtgcgagatgggattctcttagctacaggcctccatgtccatcgaaacagcgctcattcggctggcgttggggccatctttgataggtcgctgagcagggtattgaccgaactggtatcaaagatgcgagatatgaggatggataaaaccgagcttggatgtttgagagctattattttgtttaaccctgatgcaaaagggctttcaaatccaagtgaggtagaagtactcagggagaaggtatatgcctccctggagacctactgcaagcaaaagtatcccgaacagcaaggcagatttgccaaactcctacttcgactgccggccttgaggtccattggtctaaaatgcttggaacacctgtttttcttcaagctcataggcgacacaccgatcgacaccttcctcatggagatgctggaagctcctcatcagctggcttag

SEQ ID NO: 110980 - DNA, 1044 bp, Artificial Sequence
  derived and/or modified sequence
atgcgggagtgcggcggcggccccggcgccggcaagcggctgtgcgctatatgcggcgaccgaagttccggtaagcactacggcgtatactcctgcgaagggtgcaaggggttcttcaagaggacaatccggaaagatctgacatattcatgccgggataacaaagactgcaccgttgacaaacggcagcgcaaccgatgtcagtactgtcgttatcaaaaatgtctggcaacgggcatgaagcgggaagccgtccaggaagagaggcagcgaggcaaggataaggacggcgatggagaaggagccgggggggcccctgaggagatgcccgtggatcgaattttagaagccgaactggctgtggagcagaagtctgaccagggcgtcgaaggtccaggcggtacgggaggatcaggaagctcccccaatgacccagtgacaaatatttgccaggccgccgacaagcagctgttcacactggttgagtgggcaaagcggatcccccactttagctctctacctttagatgatcaggttatccttctgcgtgcaggttggaatgaactgttaattgcctctttttcacaccgctccatagatgtgcgcgacgggatccttcttgcaacaggcttgcacgtacataggaatagcgcccacagcgcaggagtgggagccatttttgatagaagtctgagtcgggttttgaccgaacttgtgagcaagatgcgcgatatgcgtatggataaaacagagctgggatgcctgagggctattattctctttaaccccgatgccaagggtctcagtaacccctccgaagttgaggtgctgcgggagaaggtctatgcttctctcgaaacatattgtaagcagaaatatccagagcagcagggaagatttgcgaagctgctgctcagactaccagctttaagaagcatagggctcaagtgtctggagcatcttttcttcttcaagctcataggagacacacccattgacacctttctcatggagatgctcgaggcacctcatcagcttgcatag

SEQ ID NO: 110981 - DNA, 1044 bp, Artificial Sequence
  derived and/or modified sequence
atgcgggagtgcggcggcggccccggcgccggcaagcggctgtgcgccatttgtggagaccggagctcaggaaagcactacggcgtatactcttgtgagggctgcaagggattctttaagcgcaccatccgtaaagatttgacatattcttgtcgagacaataaggactgcacagtggacaagcggcagcgtaatagatgccagtactgccgttaccagaaatgcctcgccacgggaatgaaaagagaggcggtgcaggaggagcggcaacggggcaaagataaggacggcgatggagaaggagccgggggcgcacccgaggaaatgccagtggacagaatcctggaagccgaactcgctgtggagcaaaagtccgaccaaggcgtggaaggtccgggagggacaggaggttccggatcatcacccaacgacccggtcactaatatttgccaggctgctgacaagcagctgtttaccctggttgagtgggccaaacgaatcccacactttagttccttaccgctggacgaccaggtgattctgctccgagccggctggaacgaactactcattgcgtctttcagccatcggagcattgacgtacgagacgggatcctcttggccacaggcctgcacgtacaccgcaattcggcacattccgctggggtaggtgcaatcttcgaccgctcactctctcgggtcctcacggagctggtgtctaagatgagagatatgcggatggataaaaccgagctgggatgcctgcgggccattatcctgttcaaccctgacgctaagggcctgtcaaatccttccgaggtagaggtgctccgcgagaaggtctacgccagtctggaaacctattgtaagcagaaatacccagagcagcagggcaggttcgccaagctgttgctgaggctgcctgcactgcggtcaataggactgaagtgtctggagcatctctttttctttaaactcatcggcgacacgcctatcgacacgttccttatggaaatgcttgaggccccccatcaactggcttag

SEQ ID NO: 110982 - DNA, 1044 bp, Artificial Sequence
  derived and/or modified sequence
atgcgggagtgcggcggcggccccggcgccggcaagcggctgtgcgccatatgcggcgaccggtcatccggcaaacactacggcgtgtatagctgcgagggctgtaagggtttctttaagaggacaatccggaaggatctgacttactcttgcagagataataaggattgtacagttgataagcggcaaaggaaccgatgtcaatattgtcgctaccagaaatgtctagccaccgggatgaaacgtgaagccgtgcaggaggaacggcagaggggcaaagataaggacggcgatggcgaaggcgctggcggtgcgccagaagaaatgcccgtggatcgaattctggaagccgaactcgccgttgagcagaaatcagaccagggagtcgaaggccccgggggaaccgggggaagtggttccagtcccaatgaccctgtgacaaatatttgtcaggccgctgacaagcagctctttaccttggtggaatgggccaagcggattccacacttctccagtctacctctcgatgaccaggtcatcttgctgagagctggctggaatgagctgctgattgctagcttttcgcacaggtcgattgatgtaagagacggcatcctgctggccacagggttacacgtgcaccgaaactccgctcactcagcaggtgtgggtgcgatctttgatcggagcctgtctcgcgtgctcaccgagctggtaagcaagatgcgtgatatgcgtatggacaagaccgaactcggttgcctgcgggcgatcatcctcttcaaccccgacgccaaaggcctgtctaatccatccgaggtcgaagtgctacgggaaaaagtctatgcatctctcgaaacctactgcaagcaaaagtaccctgaacagcagggcagatttgccaaactcttattgcggttgcccgctctgcggtctatcggactaaaatgtctggagcacctgttcttctttaagcttatcggtgataccccaatcgacacattcttgatggaaatgctcgaggccccgcatcagctggcctag

SEQ ID NO: 110983 - DNA, 1044 bp, Artificial Sequence
  derived and/or modified sequence
atgcgcgaatgcggcggtggccctggcgctggaaagagactatgcgcgatttgtggtgaccgaagttccgggaagcactatggcgtgtattcctgcgaaggttgcaagggcttcttcaaaaggactattagaaaggacctgacttacagttgccgtgataacaaggattgtactgtagataagcggcagcggaatagatgccaatactgtcgttatcagaaatgtctggccaccggcatgaaaagagaggctgtgcaggaggagcgtcagcgaggcaaggacaaggacggtgacggtgagggcgcaggaggtgccccagaagagatgccggtcgacagaattctggaggctgagcttgctgtagaacagaagagcgatcagggggtggaaggacctgggggtacagggggatccggatcctcaccgaacgacccagttaccaatatctgtcaggccgctgacaaacaactgtttacgctggttgagtgggctaaaagaattcctcacttctcctccctgcccttagacgaccaggtcatactgcttagagccggttggaatgaattgctgattgcaagcttttcccaccgcagcattgacgtaagggatggtattctgttagccacagggttgcatgttcacaggaactctgctcattcggcaggagtgggagccatcttcgatcggtctctgtccagagtgctgaccgaacttgtgtccaagatgcgggacatgcggatggataagactgagctgggatgcctaagggctattatattgttcaaccctgacgcaaaaggtctctcaaacccaagcgaagttgaagtgctgagggaaaaagtttatgccagcctcgagacatattgtaagcagaaataccccgagcagcagggcaggtttgctaaactgctgctgcggttgcccgctctgaggagtataggtctgaagtgtctcgaacacctctttttttttaagcttattggcgatacccctatcgataccttccttatggaaatgctggaggctccgcaccagctggcctag

SEQ ID NO: 110984 - DNA, 1044 bp, Artificial Sequence
  derived and/or modified sequence
atgagagaatgcggagggggtcccggagctggcaaacgactatgtgccatctgcggcgatagaagcagtggaaaacattacggggtctactcctgcgagggatgtaagggctttttcaagcggacaattagaaaggatttgacatactcctgccgtgacaacaaagactgtaccgtggacaagaggcagcggaaccgttgccagtattgcaggtaccagaagtgcctcgccaccgggatgaaaagagaagctgtccaggaggaacggcagagggggaaagacaaagatggagatggcgaaggagccggtggcgcaccggaagagatgcccgtggaccgcatcctagaagccgagctggctgtggagcagaagtccgaccaaggagtggagggacctgggggaacagggggaagtggctctagtcctaatgatcctgttaccaatatctgccaggccgcagataagcagctcttcacactggttgaatgggcaaagcggattccccatttcagtagccttccccttgatgaccaggtgatcttactgcgcgctggatggaacgagctgctgattgcgagtttctcacatcggtccatagacgtaagggatggaatccttttggcgacaggcttacatgtgcaccggaatagtgcccacagcgcaggcgttggcgctattttcgatagaagcctctctagggtgctgacagagctcgtgtccaaaatgcgagatatgcggatggacaagactgaactagggtgcctgcgcgctataatcctgtttaacccggacgcaaaaggactgagcaacccttctgaggtggaggtcctcagagagaaggtttacgcctccctggaaacttattgcaaacagaaataccctgaacagcaggggaggtttgccaaacttctgcttaggttacccgctttacggagcattggtttgaaatgtctagaacatctcttcttctttaagctgatcggagacacaccaattgacaccttcctcatggagatgctggaagctccccaccagcttgcttag

SEQ ID NO: 110985 - DNA, 1044 bp, Artificial Sequence
  derived and/or modified sequence
atgagagaatgtggtgggggacctggagccggaaagaggctttgtgccatctgtggcgaccggagtagcgggaaacactatggcgtgtacagctgcgagggctgtaaaggtttttttaagaggacaatcagaaaggacttgacctacagctgccgcgataataaagactgcactgtcgacaagcggcagagaaatcggtgccagtactgccgctatcagaagtgtctggctacaggtatgaaaagggaagccgtgcaggaggagcgacaacgcggaaaagataaggatggcgacggagagggagccggaggcgcacccgaagagatgcctgttgaccggattctggaggctgagctggcagtggagcagaagtcggatcaaggagtagaaggacctgggggtactggcggatctggaagctcacccaacgatccagtcacaaacatctgtcaagccgcagataagcagctcttcaccctggtcgaatgggcaaagagaattccccactttagttccttacctctggacgaccaggtgatccttcttcgcgctggttggaacgagctgctcatcgcttccttttcccacaggagcatcgacgtccgggacggaatcctgctggcaacgggtctgcatgtacatcgcaattcggcacattcagctggagttggtgccatctttgaccgcagcctgtctcgggtcctgacagagctggtttctaagatgcgtgacatgcgaatggacaaaactgaattgggatgtctgcgggcaattattctgttcaacccagacgcaaagggtctctccaacccaagtgaggtagaggtgctacgcgaaaaagtgtatgccagcctagagacttattgtaaacagaagtatccagaacagcagggcagatttgctaagctgctgttgaggctgcccgcactgcgaagcatcggacttaagtgcctggaacacttatttttctttaaactcataggcgatacgcccatcgacacattcctcatggagatgctcgaggcccctcatcagctcgcctag

SEQ ID NO: 110986 - DNA, 1044 bp, Artificial Sequence
  derived and/or modified sequence
atgcgcgaatgcgggggtggtccgggagctgggaagcgtctttgcgccatctgtggggatcggtccagcggcaaacattatggtgtttactcttgtgagggatgtaaaggcttcttcaaacgcaccattcggaaagatctgacttattcttgtcgtgataataaggactgtacagtggataagcgccaaagaaatcgttgtcagtattgcagatatcaaaagtgcctcgcaactggaatgaaacgtgaagccgtgcaggaggaacggcagcgaggaaaagataaagatggcgatggcgagggagcgggtggagccccagaggaaatgcccgtggatcgcattctggaagctgagctggccgtggaacaaaaatctgatcagggggttgagggcccaggagggactggaggcagcggcagctctccgaatgacccagttactaatatttgccaggcagccgataagcagctgttcacactggtggagtgggccaaacgcataccccactttagctcactgcctctggacgaccaggttatcctcttgcgggcaggctggaatgaactgttaatcgctagtttcagccacagaagcattgacgttcgagacgggatcttattggcaacaggtctccacgtgcacaggaattcagcccatagcgccggtgtaggcgcaatcttcgacaggtcactctcccgagttctgaccgagctggtgagtaaaatgcgcgacatgcgaatggacaaaaccgaactaggttgtttgcgagccattattctctttaatccggatgccaagggcctgagtaacccttctgaggtggaggttctccgggaaaaggtgtatgcttctctggagacatattgcaaacagaaatatccagagcaacagggaaggttcgcaaaactcttgttacggctcccggcattacggagcataggcctcaagtgccttgaacacctgttctttttcaagttaattggcgataccccaatcgatactttcctgatggagatgctcgaggcaccacaccagctggcttag

SEQ ID NO: 110987 - DNA, 1044 bp, Artificial Sequence
  derived and/or modified sequence
atgcgagagtgcggagggggaccaggggctggaaagcgtctctgtgcaatttgtggagacagatccagtggtaagcactacggagtttactcctgcgagggttgcaagggattctttaaacgtacaatccggaaggacctgacttactcctgccgggataacaaagattgtactgtcgataaacgtcaacgtaatcgctgtcagtactgcaggtaccagaagtgtctagccactggcatgaaacgggaggcagttcaagaagaacggcaaagggggaaggacaaagatggagatggggaaggggcaggcggagcccctgaagagatgcccgtggaccggattctggaagcggaattggccgtagagcagaaatctgatcagggcgtcgagggcccaggcggtaccggcggaagtggctcctctcctaacgacccagttaccaatatctgccaggcagccgataaacaactcttcaccctggttgaatgggctaaacggatcccccacttttctagtcttcccctagatgaccaagtcatccttctgcgcgctggttggaatgaacttctgatcgcttctttctcacaccggtcaatcgatgtccgtgatggcattttactcgccaccggtctacatgtccaccgcaacagcgctcactcagctggcgttggggcaatatttgatcgcagcttatctagagtattgactgaactggttagtaagatgcgcgatatgagaatggacaaaaccgaactggggtgtctgcgtgcaattatcttattcaaccctgacgccaagggcctgtctaatcccagcgaagtggaagtgttgcgtgaaaaggtatacgcctcgctggaaacgtactgtaaacagaagtacccggagcaacaaggaagatttgcaaagctcctactgcggctgcctgcactgagatctatcggtcttaaatgcctggagcacctcttcttttttaagctgattggagataccccaatagatacttttttaatggagatgctggaggctcctcatcagctggcatag

SEQ ID NO: 110988 - DNA, 1227 bp, Artificial Sequence
  derived and/or modified sequence
accttcgccctaatgcctttaccaatatggcggcactccggtagcgacgaatccatcctgcactgacacgcatgcgcgagtgtggaggtggccctggggctggcaaacggctatgtgcaatctgcggggacagaagctcaggcaaacactacggggtttacagctgtgagggttgcaagggcttcttcaaacgcaccatccgcaaagaccttacatactcttgccgggacaacaaagactgcacagtggacaagcgccagcggaaccgctgtcagtactgccgctatcagaagtgcctggccactggcatgaagagggaggcggtacaggaggagcgtcagcggggaaaggacaaggatggggatggggagggggctgggggagcccccgaggagatgcctgtggacaggatcctggaggcagagcttgctgtggaacagaagagtgaccagggcgttgagggtcctgggggaaccgggggtagcggcagcagcccaaatgaccctgtgactaacatctgtcaggcagctgacaaacagctattcacgcttgttgagtgggcgaagaggatcccacacttttcctccttgcctctggatgatcaggtcatattgctgcgggcaggctggaatgaactcctcattgcctccttctcacaccgatccattgatgttcgagatggcatcctccttgccacaggtcttcacgtgcaccgcaactcagcccattcagcaggagtaggagccatctttgatcggtccctctccagggtgctgacagagctagtgtccaaaatgcgtgacatgaggatggacaagacagagcttggctgcctgagggcaatcattctgtttaatccagatgccaagggcctctccaaccctagtgaggtggaggtcctgcgggagaaagtgtatgcatcactggagacctactgcaaacagaagtaccctgagcagcagggacggtttgccaagctgctgctacgtcttcctgccctccggtccattggccttaagtgtctagagcatctgtttttcttcaagctcattggtgacacccccatcgacaccttcctcatggagatgcttgaggctccccatcaactggcctgagctcagacccagacgtggtgcttctcacactggaggagcacacatccaagagggactccaagccctggggcagggtggggggccatgttcccagaaccttgatggggtgaga

SEQ ID NO: 110989 - DNA, 1227 bp, Artificial Sequence
  derived and/or modified sequence
accttcgccctaatgcctttaccaatatggcggcactccggtagcgacgaatccatcctgcactgacacgcatgcgcgagtgtggaggtggccctggggctggcaaacggctatgtgcaatctgcggggacagaagctcaggcaaacactacggggtttacagctgtgagggttgcaagggcttcttcaaacgcaccatccgcaaagaccttacatactcttgccgggacaacaaagactgcacagtggacaagcgccagcggaaccgctgtcagtactgccgctatcagaagtgcctggccactggcatgaagagggaggcggtacaggaggagcgtcagcggggaaaggacaaggatggggatggggagggggctgggggagcccccgaggagatgcctgtggacaggatcctggaggcagagcttgctgtggaacagaagagtgaccagggcgttgagggtcctgggggaaccgggggtagcggcagcagcccaaatgaccctgtgactaacatctgtcaggcagctgacaaacagctattcacgcttgttgagtgggcgaagaggatcccacacttttcctccttgcctctggatgatcaggtcatattgctgcgggcaggctggaatgaactcctcattgcctccttttcacaccgatccattgatgttcgagatggcatcctccttgccacaggtcttcacgtgcaccgcaactcagcccattcagcaggagtaggagccatctttgatcggtccctctccagggtgctgacagagctagtgtccaaaatgcgtgacatgaggatggacaagacagagcttggctgcctgagggcaatcattctgtttaatccagatgccaagggcctctccaaccctagtgaggtggaggtcctgcgggagaaagtgtatgcatcactggagacctactgcaaacagaagtaccctgagcagcagggacggtttgccaagctgctgctacgtcttcctgccctccggtccattggccttaagtgtctagagcatctgtttttcttcaagctcattggtgacacccccatcgacaccttcctcatggagatgcttgaggctccccatcaactggcctgagctcagacccagacgtggtgcttctcacactggaggagcacacatccaagagggactccaagccctggggcagggtggggggccatgttcccagaaccttgatggggtgaga

SEQ ID NO: 110990 - DNA, 1044 bp, Artificial Sequence
  derived and/or modified sequence
atgagagagtgcggcggcggccccggcgccggcaagagactgtgcgccatctgcggcgacagaagcagcggcaagcactacggcgtgtacagctgcgagggctgcaagggcttcttcaagagaaccatcagaaaggacctgacctacagctgcagagacaacaaggactgcaccgtggacaagagacagagaaacagatgccagtactgcagataccagaagtgcctggccaccggcatgaagagagaggccgtgcaggaggagagacagagaggcaaggacaaggacggcgacggcgagggcgccggcggcgcccccgaggagatgcccgtggacagaatcctggaggccgagctggccgtggagcagaagagcgaccagggcgtggagggccccggcggcaccggcggcagcggcagcagccccaacgaccccgtgaccaacatctgccaggccgccgacaagcagctgttcaccctggtggagtgggccaagagaatcccccacttcagcagcctgcccctggacgaccaggtgatcctgctgagagccggctggaacgagctgctgatcgccagcttcagccacagaagcatcgacgtgagagacggcatcctgctggccaccggcctgcacgtgcacagaaacagcgcccacagcgccggcgtgggcgccatcttcgacagaagcctgagcagagtgctgaccgagctggtgagcaagatgagagacatgagaatggacaagaccgagctgggctgcctgagagccatcatcctgttcaaccccgacgccaagggcctgagcaaccccagcgaggtggaggtgctgagagagaaggtgtacgccagcctggagacctactgcaagcagaagtaccccgagcagcagggcagattcgccaagctgctgctgagactgcccgccctgagaagcatcggcctgaagtgcctggagcacctgttcttcttcaagctgatcggcgacacccccatcgacaccttcctgatggagatgctggaggccccccaccagctggcctag

SEQ ID NO: 110991 - protein, 789 aa, Artificial Sequence
  derived and/or modified sequence
MLEGNYQVMLKSGTNILYWRTTGILMGSKAVKPVLVKNITIEGVAYTSECFPCKPGTFSNKPGSFNCQVCPRNTYSEKGAKECIRCKDDSQFSEEGSSECTERPPCTTKDYFQIHTPCDEEGKTQIMYKWIEPKICREDLTDAIRLPPSGEKKDCPPCNPGFYNNGSSSCHPCPPGTFSDGTKECRPCPAGTEPALGFEYKWWNVLPGNMKTSCFNVGNSKCDGMNGWEVAGDHIQSGAGGSDNDYLILNLHIPGFKPPTSMTGATGSELGRITFVFETLCSADCVLYFMVDINRKSTNVVESWGGTKEKQAYTHIIFKNATFTFTWAFQRTNQGQDNRRFINDMVKIYSITATNAVDGVASSCRACALGSEQSGSSCVPCPPGHYIEKETNQCKECPPDTYLSIHQVYGKEACIPCGPGSKNNQDHSVCYSDCFFYHEKENQSLHYDFSNLSSVGSLMNGPSFTSKGTKYFHFFNISLCGHEGKKMALCTNNITDFTVKEIVAGSDDYTNLVGAFVCQSTIIPSESKGFRAALSSQSIILADTFIGVTVETTLKNINIKEDMFPVPTSQIPDVHFFYKSSTATTSCINGRSTAVKMRCNPTKSGAGVISVPSKCPAGTCDGCTFYFLWESAEACPLCTEHDFHEIEGACKRGFQETLYVWNEPKWCIKGISLPEKKLATCETVDFWLKVGAGVGAFTAVLLVALTCYFWKKNQKLEYKYSKLVMTTNSKECELPAADSCAIMEGEDNEEEVVYSNKQSLLGKLKSLATKEKEDHFESVQLKTSRSPNI

SEQ ID NO: 110992 - DNA, 2370 bp, Artificial Sequence
  derived and/or modified sequence
atgttggaggggaactatcaggtgatgctcaagtctggtacgaatattctgtattggagaacaacggggatattaatgggatcaaaggccgtgaagcctgtattggtgaagaatattactatagaaggggtagcatacacctctgagtgtttcccgtgcaagcctgggaccttttcaaataagcccggcagcttcaactgccaggtatgtccccgcaacacctattctgaaaaaggggccaaagagtgcatacgttgcaaagatgatagccagtttagcgaggagggctcctctgagtgcactgagcgcccaccttgcactaccaaggattacttccagatccacaccccatgtgatgaagaaggcaagacccaaattatgtacaagtggatagaacctaaaatttgcagagaggatctgaccgacgccattagactgcctccgagcggggagaagaaagattgcccgccttgtaatcccggattctataacaacggctcgtcctcctgccatccctgtccaccaggcaccttctcagacggcacaaaggagtgccgtccatgcccggccgggacggaacccgccctcgggttcgaatataagtggtggaatgtactgcccggaaacatgaagactagctgctttaacgtcggcaactccaagtgcgacggcatgaatgggtgggaagtggcaggtgatcacatccagagtggcgcagggggttccgacaacgactacctgattctgaatctgcacatcccaggtttcaaaccgcctacatccatgaccggcgccaccgggtccgaacttggcagaattacattcgtcttcgaaacattatgttcagcggactgtgtactttatttcatggtggatattaataggaaaagtacgaacgttgtcgagagttgggggggcacgaaagaaaagcaggcatacacgcatattatattcaagaacgcgacatttactttcacttgggccttccaaagaaccaaccagggacaggataatagacgattcattaacgacatggtgaagatctattctattaccgccaccaacgcagtggacggcgtggcgtcgtcttgcagggcatgtgccctcggctcggagcagtctgggtcttcctgcgtgccatgcccacccgggcattatatcgagaaggagactaatcagtgcaaagaatgtccgccagatacttaccttagtatccatcaggtttatggcaaggaggcatgtataccctgtgggcccggctcaaagaataatcaagatcatagcgtgtgctatagtgattgtttcttctatcacgaaaaagagaaccagtctctacactacgacttttcaaatctgagttcggtcggatcattaatgaacggcccatcattcacttcgaagggtactaagtacttccattttttcaatataagcttatgtggacacgagggcaaaaagatggccctatgcacaaacaacatcacagacttcacagtgaaagaaatcgtggccggctccgacgattataccaatctagtcggagcttttgtttgccaaagcaccattatccctagcgagtctaaggggttcagggcggcacttagctctcagagcatcatcctcgctgatactttcatcggggttacagttgagaccaccctgaagaatatcaacattaaagaagatatgtttccagtaccaacatctcagatccctgacgtgcactttttctataaaagctccaccgccacaacatcttgcattaatgggaggtctacggccgtgaaaatgcgctgcaaccccaccaagtccggggctggcgtgatttctgtgccatcaaagtgtcctgccggcacatgcgatggatgcaccttctatttcctgtgggagagcgccgaggcatgtccactatgcactgagcacgatttccacgaaattgagggcgcctgcaaacggggctttcaggagactctgtatgtttggaatgagccgaagtggtgtataaaaggcatttcattaccagagaagaaactggcaacctgtgagacagtagacttttggttaaaggtcggagcaggggtaggcgctttcacggcagtgttgcttgtggctctcacctgttacttctggaagaaaaatcagaaactggaatataaatattccaagctggtgatgacaaccaacagcaaagagtgcgagctgccagctgccgacagttgcgctattatggaaggcgaagacaatgaggaggaagtggtatattctaacaaacagagcctgcttggaaagcttaaatcactggccactaaggagaaggaggatcatttcgagagtgtccagctgaagacgtcccggtcgccgaatatctag

SEQ ID NO: 110993 - DNA, 2370 bp, Artificial Sequence
  derived and/or modified sequence
atgctggagggcaactaccaggtgatgctgaagagcggcaccaacatcctgtactggaggaccaccggcatcctgatgggcagcaaggctgtgaagcctgtgctggtgaagaacatcaccattgaaggagtggcctacaccagcgagtgcttcccctgcaagccaggcaccttcagcaacaagccaggcagcttcaactgccaggtgtgccccaggaacacctacagcgagaagggggccaaggagtgcatccgctgcaaggatgacagccagttcagcgaggagggcagcagtgaatgtacagagcggcccccctgcaccaccaaggactacttccagatccacaccccctgtgatgaggagggcaagacccagatcatgtacaagtggattgagcccaagatctgccgggaggacctgacagatgccatccggctgcccccatctggagagaagaaggactgccccccctgcaaccctggcttctacaacaacggcagcagcagctgccacccctgccccccaggcaccttcagtgatggcaccaaggagtgccggccctgcccagctggaacagagcccgccctgggctttgagtacaagtggtggaatgtgctgcccggcaacatgaagaccagctgcttcaacgtgggcaacagcaaatgtgatggcatgaatggctgggaggtggccggggaccacatccagagcggggccggcggcagtgacaatgactacctgatcctgaacctgcacatccctggcttcaagccacccacctccatgactggagccaccggcagcgagctgggccgcatcacctttgtgtttgagaccctgtgcagcgctgactgtgtgctgtacttcatggtggacatcaacaggaagagcaccaacgtggtggagagctggggcggcaccaaggagaagcaggcctacacccacatcatcttcaagaatgccaccttcaccttcacctgggccttccagaggaccaaccagggccaggacaacagacgcttcatcaatgacatggtgaagatctacagcatcacagccaccaatgctgtggatggagtggccagcagctgccgggcctgtgccctgggcagcgagcagagcggcagcagctgtgtgccctgccccccaggccactacatcgagaaggagaccaaccagtgcaaggagtgccccccagacacctacctgagcatccaccaggtgtatggcaaggaggcctgcatcccctgtggccctggcagcaagaacaaccaggaccacagcgtgtgctacagcgactgcttcttctaccacgagaaggagaaccagagcctgcactatgacttcagcaacctgagctctgtgggcagcctgatgaatggccccagcttcaccagcaagggcaccaagtacttccacttcttcaacatcagcctgtgtggccacgagggcaagaagatggccctgtgcaccaacaacatcacagacttcaccgtgaaggagatcgtggccggcagtgatgactacaccaacctggtgggcgcctttgtgtgccagagcaccatcatccccagcgagagcaagggcttccgggccgccctgagcagccagagcatcatcctggccgacaccttcatcggcgtgacagtggagaccaccctgaagaacatcaacatcaaggaggacatgtttcctgtgcccaccagccagatcccagatgtgcacttcttctacaagagcagcacagccaccaccagctgcatcaatggccgcagcacagctgtgaagatgcgctgcaaccccaccaagagcggggccggggtcatctctgtgcccagcaagtgcccagctggcacctgtgatggctgcaccttctacttcctgtgggagagcgctgaggcctgccccctgtgcacagaacatgacttccacgagattgagggcgcctgcaagaggggcttccaggagaccctgtatgtgtggaatgagcccaagtggtgcatcaagggcatcagcctgcctgagaagaagctggccacctgtgaaacagtggacttctggctgaaggtgggcgctggggtgggcgccttcaccgctgtgctgctggtggccctgacctgctacttctggaagaagaaccagaagctggagtacaagtacagcaagctggtgatgaccaccaacagcaaagaatgtgagctgcctgctgctgacagctgtgccatcatggagggggaggacaatgaggaggaggtggtgtacagcaacaagcagagcctgctgggcaagctgaagagcctggccaccaaggagaaggaggaccactttgagagcgtgcagctgaagaccagccgcagccccaacatctag

SEQ ID NO: 110994 - DNA, 2370 bp, Artificial Sequence
  derived and/or modified sequence
atgctggagggcaactaccaggtgatgctgaagagcggcaccaacatcttgtactggcgcactaccgggatcttaatgggcagtaaggcggtcaagcccgtgctcgtcaaaaacatcactattgaaggcgtggcttacaccagcgagtgctttccttgtaaaccaggaacgtttagcaataagcctggttcattcaactgccaggtttgtcccagaaatacatactccgaaaaaggggccaaagagtgtatcagatgtaaggatgatagccagttttcggaggaggggagttctgaatgcacagagagaccaccatgtacgaccaaagactattttcagatccacaccccctgtgatgaggaaggaaaaactcagataatgtataaatggatcgaaccaaagatttgcagggaagatttgacggatgcaataagattaccacccagcggagagaaaaaagactgccctccttgcaatccaggcttttataacaatggctcctccagctgtcacccttgtcctccagggacattctccgacggcaccaaagaatgcagaccctgccccgccggtaccgagcccgctctgggctttgagtacaagtggtggaatgtgctgccaggaaacatgaaaactagctgttttaacgtcgggaactctaagtgtgacggaatgaatggctgggaggtggccggggatcacatccagagcggcgccggaggatccgacaatgactacctgatcctgaatctgcacatccccggctttaagcctcctacttctatgactggcgcgacaggatcggaacttggtagaattactttcgttttcgagacactgtgctctgccgactgtgtgctctacttcatggtggacataaacagaaagagcaccaacgtggtcgaaagctggggcggcacaaaagagaaacaggcgtatactcacatcatattcaaaaatgccacctttactttcacgtgggccttccagagaaccaatcagggccaggataacaggcgctttattaatgatatggtgaaaatctactccatcacagcgactaacgccgtagacggagttgcctcctcttgcagagcctgtgccttagggtctgagcagagtgggagttcatgcgtcccttgtccccccggtcactacatcgaaaaggaaactaatcagtgcaaggagtgtccacctgacacgtacctgtccattcaccaggtctatgggaaggaggcatgcattccttgtggccctggatccaagaataaccaggaccattctgtttgctacagtgattgtttcttctatcacgaaaaagagaaccagtccttgcattatgacttttcaaatctatcctcggtgggatccctcatgaacggaccatcattcacctccaagggaactaagtacttccacttcttcaacatatccctttgtggccatgagggcaagaaaatggccttgtgcactaacaacatcacagactttaccgttaaagaaatcgtggccggctcagatgactataccaatctggtcggtgcatttgtatgccagagcactataatcccgtcagagtctaaagggtttcgggctgcactatcaagccagtcaatcattctcgcagacaccttcataggggttactgttgaaacgacactgaagaacatcaacatcaaagaagacatgtttccagttccaacctcccaaatacccgatgtccacttcttttacaagtcttcgaccgcaaccacaagctgcatcaacggacggagtacggcagtgaaaatgaggtgcaatccaaccaagagtggcgccggcgtaataagcgtgccatccaaatgtcctgctggcacatgcgatggctgcacattttattttctgtgggaatctgccgaagcctgccccctgtgcaccgagcatgacttccatgaaatcgaaggggcctgtaaacggggttttcaggagactctttatgtgtggaacgaacccaagtggtgcataaaaggcatctctctgcccgaaaaaaagcttgcaacgtgcgaaaccgtggacttttggctaaaagtgggcgcaggcgtgggcgcttttactgctgtgctccttgtcgcccttacatgttatttttggaaaaagaatcaaaagcttgaatacaaatactccaagctggtgatgacaacaaattccaaagagtgtgagctgccagctgctgactcttgcgcaatcatggaaggcgaagataacgaggaagaagtggtgtactccaataagcagagtctgctcggaaagctcaaaagccttgcgacgaaagagaaagaggatcattttgagagcgtccagctaaagacctcccgttcccctaatatatag

SEQ ID NO: 110995 - DNA, 2370 bp, Artificial Sequence
  derived and/or modified sequence
atgctggagggaaactatcaggtaatgttaaaatctggcacaaacattctgtactggcgaaccacagggattctcatgggcagtaaggctgtgaagccagtactagttaagaatatcaccatagaaggggttgcctacaccagcgaatgctttccatgtaaacccggaaccttctcaaacaaacccggtagcttcaactgccaggtgtgcccacgcaacacttactctgagaagggcgcaaaggagtgcattaggtgcaaggatgattcacagttcagcgaagagggcagcagcgagtgcactgaaaggcccccatgtactacgaaggattactttcaaatacacaccccttgtgatgaagaaggaaagacacaaatcatgtacaagtggatagaacccaagatatgccgcgaggatctgaccgacgccatccgcttgcctccatctggtgagaaaaaagattgtcctccatgcaatccaggattctacaataatggcagtagctcctgtcacccatgtcccccaggtacattttccgacggaactaaggagtgcagaccgtgtcccgctgggacggaacccgcacttggattcgagtacaaatggtggaatgttctgcctggaaacatgaaaacctcttgtttcaacgttggaaacagcaaatgcgatggcatgaacgggtgggaagtcgctggagaccatatccaatctggcgctggagggtccgataacgactatctgatcctgaacctgcacatccccggattcaaacctcccacatcaatgacaggggctacgggcagcgagctgggcagaataaccttcgtgtttgaaaccctctgctccgccgattgtgtcctttacttcatggttgacatcaatagaaaatctaccaacgtcgtggaatcttggggtggcaccaaagagaaacaggcatacacacacattatctttaagaacgctacctttacttttacctgggcgtttcagcgcaccaatcaggggcaagataacagacgattcataaacgacatggtaaagatatattcgatcaccgccacaaatgccgtagacggggtcgccagttcttgcagagcatgcgctctgggctctgagcaatctgggtcatcatgcgtgccatgtccacccggacattatattgaaaaggagaccaaccaatgtaaagagtgtccccctgacacgtatttatcaatacatcaggtatacggtaaggaagcctgcatcccctgtgggccagggtccaagaataaccaggaccattcggtttgctattctgactgtttcttttatcacgaaaaggaaaaccagtctctccactacgactttagcaacctctcttcagttggcagcttaatgaatggtccctccttcactagcaagggcacaaaatatttccatttttttaacatatcactgtgcgggcatgaaggcaaaaagatggcactgtgtaccaataacatcaccgactttacagttaaggagatagtggctgggtccgatgattatactaatctcgtcggcgcattcgtgtgccagagtaccataattccatcagaatcaaaagggttccgggcagcactgtcatctcagtcaatcatactggcagatacattcattggcgtgacagtggagacaaccctcaagaacattaatatcaaagaggacatgtttccagtccctacaagtcaaatcccggacgtgcattttttttataaaagttctacggctacaacaagttgtatcaatgggcgttctactgctgtgaagatgcggtgtaaccctaccaagtctggcgctggcgtcattagcgtgccaagtaaatgcccagccggtacatgcgatggctgtacgttttacttcctttgggaaagcgcagaagcatgtcctctgtgtactgaacacgatttccacgagatagaaggcgcatgcaaacggggtttccaagagacactttatgtctggaatgagccaaaatggtgcatcaagggcattagcctccccgagaagaaacttgccacctgtgagaccgtcgacttctggctgaaagtaggtgcaggggtgggcgcatttacggccgttttgctggtagccttgacttgctacttctggaagaagaatcaaaagctggaatataagtattccaagcttgtaatgaccacgaactcaaaagagtgtgagctgcctgctgccgacagctgtgccatcatggaaggcgaggataacgaggaggaagtagtgtactctaataaacagtctctcctgggtaagctcaaaagcctggctacgaaggaaaaggaggaccactttgagtccgttcaacttaaaacctctcgttcgcccaatatttag

SEQ ID NO: 110996 - DNA, 5932 bp, Artificial Sequence
  derived and/or modified sequence
atgcttgaaggcaattaccaggtaatgctgaaatcaggcacaaacatactctactggagaactacaggcatccttatgggttctaaggcggtcaagcctgtgctggtaaaaaatatcacaattgaaggggtggcgtacacatcagaatgttttccttgcaagccaggcacattcagcaacaaaccaggttcattcaactgccaggtgtgtcccagaaacacctattctgagaaaggagccaaagaatgtataaggtgtaaagacgactctcaattttcagaggaaggatccagtgagtgtacagagcgccctccctgtaccacaaaagactatttccagatccatactccatgtgatgaagaaggaaagacacagataatgtacaagtggatagagcccaaaatctgccgggaggatctcacagatgctattagattgcccccttctggagagaagaaggattgtccgccttgcaaccctggattttataacaatggatcatcttcttgccatccctgtcctcctggaacattttcagatggaaccaaagaatgtagaccatgtccagcaggaacggagcctgcacttggctttgaatataaatggtggaatgtccttcctggcaacatgaaaacttcctgcttcaatgttgggaattcaaagtgcgatggaatgaatggttgggaggtggctggagatcatatccagagtggggctggaggttctgacaatgattacctgatcttaaacttgcatatcccaggatttaaaccaccaacatctatgactggagccacgggttctgaactaggaagaataacatttgtctttgagaccctctgttcagctgactgtgttttgtacttcatggtggatattaatagaaaaagtacaaatgtggtagaatcgtggggtggaaccaaagaaaaacaagcttacacccatatcatcttcaagaatgcaacttttacatttacatgggcattccagagaactaatcagggtcaagataatagacggttcatcaatgacatggtgaagatttattctatcacagccactaatgcagttgatggggtggcgtcctcatgccgtgcctgtgccctcggttctgaacagtcgggttcatcgtgtgtcccctgccctccaggccactacattgagaaagaaaccaaccagtgcaaggaatgtccacctgacacctacctgtccatacatcaggtctatggcaaagaggcttgtattccatgcgggcctgggagtaaaaacaatcaggaccattcggtttgctatagtgactgctttttctaccatgaaaaagaaaatcagagtttgcactatgactttagcaacctcagcagtgtgggctcattaatgaatggccccagcttcacctccaaaggaacaaaatacttccatttcttcaatatcagtttatgtgggcatgaggggaagaagatggctctctgtaccaacaatataacagactttacagtaaaagaaatagtggcagggtcagatgattacacaaatttggtaggggcatttgtatgccagtcaacaattattccttctgaaagtaagggtttccgagcagccttatcatcacaatccatcattctggcagatacattcataggagtcacagttgaaaccacattgaaaaatattaatataaaagaagatatgttcccagttccaacaagccaaataccagatgtgcatttcttttataagtcttctacagcaacaacatcttgtattaatggccgatcaactgctgtgaaaatgaggtgtaatcctactaaatctggagcaggagtgatttcagtccccagcaagtgcccagcaggtacctgtgatgggtgtacgttctatttcctgtgggagagtgctgaagcttgccctctgtgtacggagcatgacttccatgagattgagggagcctgcaagagaggatttcaggaaaccttgtatgtgtggaatgaacctaaatggtgcattaaaggaatttctttgcctgagaaaaagttggcaacctgtgaaacggttgacttttggctgaaggtgggagccggtgtgggagcttttactgccgttttgctggtggctctgacctgctacttctggaaaaagaatcaaaaactggaatacaaatattccaagttagtaatgacgactaactcaaaagagtgtgaactcccggctgcagacagttgtgctatcatggaaggagaagataatgaagaggaagttgtatattccaataaacagtcactactaggaaaactcaaatctttggcaaccaaggaaaaagaagaccattttgaatctgttcaactgaaaacctcaagatccccaaatatatgaagagacagtgctgtagccttgagactaatgaacaaagaaacctgctctagttttacaggaccatattttagggtctgtcctcatacctgtcacattggtgatctcacagaggagggccatgccgctgaaaagggaaggagattgaaacatttgattgccttatcacatggtcaagtaccttgccaaataaaggaaagcaaatgatttgggtctcaactgaagatgaagctcaactcaggaagagatttatctgtatatacacataactgaaaaccaagtttaagcccaccaatgcactgctgatgcatgccatataattaatgggtaacttttattctttatgatgtctacataacaagtgtgatttggaaggcacatgtgagcatatgcattatgatccaatttatgttttttctttgtttatattttggggaaaattaaaatttttttaaggtatatttttcccattatttattttcctgaccttaaaacagcttttctactaaaaaatggtgagcaatgaagacaataaatttttcatttttccataggttatcttctcttgatttaaatttcaggaagagttagcatgtgcttgggttatctagatttataattgcctttgaaattccatcctcgttggagctggtaagaagggcttgactgaaagtttgaaggaatctaaaaaacaaaaaagtaagaaaggtaacgagaagccctaattctccattaatgcaaactagctgctagtatcatagaagtcaaatgacttaaaacagtttatgtagtgctagaagtataattaaagtaaataggaaagcttgtcaatcaaatcactggcaaaatcatgaagaagagagtgagaaggtttgtctataagtacagatgactgtatgaaatactggggtaatttcatggtctccagaaaatgtcagtgggacttttgttctttgtcaagcaccagaggttatatggttatttttctgctgcaagactttgaggatgttgactttctcagaaactttttaaaaaaataatccaataaggcaggaattcagttttgaaaaattacatataattgtattcataataagaatgtggttatttcataagcagttatgaaagaattattgttcttattcaaaagtgatccagataattgtgatattttctatggtgggctactggtattagcacgacttggatattatttgttgaaggaagtatgaatgaagttggatttgaccaatttcgtgtaaaccttaattgatttaaaactgggaaagaggggggtttcctggccattgctgatctaaggtgctcttatttgtttccaataaacagtaatctttatagaccttaatgcagatttaaaaaaatagttgtgattggctgagagaggcagggcatatatgtagggaaatgatttgccccaagcattccaatgaagtatgacttgtaacttttgtgtctgaaggtggtgtctttatttttgtggaaaatgggagaaaaatgaataattgtgtttatttggctgattggtaatacactagaccattctgttattattgaatgaatgttttgtgtatatctctgctgttgcacatatgagtataggtgaggttgtcattgtttgctctgggattcagggagggagtcactttgcataaacctttttttgcatttaatttcttgaatgttcttataaagaagacattatgttggcattcttcatttttatcctgccaacagagtgcttatgagcatgtctgcattttgatcaaaatttaaacagaagagtgaaaatacatttgaaatgaaccctttcagaggaaccctggcaaagctgtatagactggacagagtgagaaaacttccacagccacctgtcacctttctcctcatcttccactgtgttcaatatgtatgttccaagccatagagataattgggattttctcccaggtagcttctttcttctcctgtcactggactaaaatctctgacatgtcaaaaatgccttaaattttaatgaactctccgaaaatgtagttgatattggagaatttattttatttctaattttagatattaaatatattttgtcagcacagtcccatctttgggaaggaggtgattttttcccttggattccagtggtttgtcattttatttcaagcactgaagaagtatgacagaaagaatattatggggaaaatatttagaccaatcctggctataaaatttcctttagttttatgcctggcctttgcaaagctcagtgaaatgttgaaaggaataaattaatcatgtttctgtgacttttgattgacacttgttccttttcccccctaagtggtagaagaagttatttgttatttttctaaaaggcacaattttgaagccttaactacttcattaagtcaactgttgcctataacatctcttagcactcgtcaaaacgtatttaaatcaattttccaatggatgagaacatgtcttctgtggataaattatattatgtcatttaacaacattgagcattttgatatgtgttcactgaattaaaaaacctgaatttcattattgttgacttttcccctctttagttactagtaatcacatcctttctaggattaaaaatatttcatagtatttttgtgtagatgtctgtccttattttcttcccaaagaaaaaaggttgtttaaattgattatgtggaagaattacttgggtccagtctttagcatctggggtctccaggtccccaggtgggtcatgattgactgcttcttcaagacccatcttgccaactctcacttgatgtctgtcaatagaactacttcctgtggcacatggttatttctaatgggaggctaatgtgtacataatttctctcttcctcatagaaataaatttctctgggggttgctgtgagaggatgacttcattagccatgtttaaagtgagtgtactgctcacgtttatctttgtacactaagagtatgtagagttgatcttcagagaaactaaacctccctcatatctatttatagtaatcatgaatatgattgcagttgacaggcccaactcctaaactgagtttgcccaaagaaaatgtccttagaggagtaaacttttagaaatctcaacacccgactcattcgttggaagctaaaatggaattcatcttcatactaactggctacagattattctcttgctggattttacttttattttaacatttttacatgagttccttttagaatcataaatgaaagaagtaaaactttaagatgggaatgaataattgaaaagagaattatatttactattataattgatattattcgctattatgattacacttgtctagatcagagcccagcaaacattttttttgtaaagggtcagatagtacatagttttggctttgcagggcatgtgggctctattgcatttactcaactctgccattgtagtatgaaagcaaccacatacaaaatgtaaatggatgggcgtggctgcattccaataaaactttatttatggacactg

SEQ ID NO: 110997 - DNA, 2370 bp, Artificial Sequence
  derived and/or modified sequence
atgctggagggcaactaccaggtgatgctgaagagcggcaccaacatcctgtactggagaaccaccggcatcctgatgggcagcaaggccgtgaagcccgtgctggtgaagaacatcaccatcgagggcgtggcctacaccagcgagtgcttcccctgcaagcccggcaccttcagcaacaagcccggcagcttcaactgccaggtgtgccccagaaacacctacagcgagaagggcgccaaggagtgcatcagatgcaaggacgacagccagttcagcgaggagggcagcagcgagtgcaccgagagacccccctgcaccaccaaggactacttccagatccacaccccctgcgacgaggagggcaagacccagatcatgtacaagtggatcgagcccaagatctgcagagaggacctgaccgacgccatcagactgccccccagcggcgagaagaaggactgccccccctgcaaccccggcttctacaacaacggcagcagcagctgccacccctgcccccccggcaccttcagcgacggcaccaaggagtgcagaccctgccccgccggcaccgagcccgccctgggcttcgagtacaagtggtggaacgtgctgcccggcaacatgaagaccagctgcttcaacgtgggcaacagcaagtgcgacggcatgaacggctgggaggtggccggcgaccacatccagagcggcgccggcggcagcgacaacgactacctgatcctgaacctgcacatccccggcttcaagccccccaccagcatgaccggcgccaccggcagcgagctgggcagaatcaccttcgtgttcgagaccctgtgcagcgccgactgcgtgctgtacttcatggtggacatcaacagaaagagcaccaacgtggtggagagctggggcggcaccaaggagaagcaggcctacacccacatcatcttcaagaacgccaccttcaccttcacctgggccttccagagaaccaaccagggccaggacaacagaagattcatcaacgacatggtgaagatctacagcatcaccgccaccaacgccgtggacggcgtggccagcagctgcagagcctgcgccctgggcagcgagcagagcggcagcagctgcgtgccctgcccccccggccactacatcgagaaggagaccaaccagtgcaaggagtgcccccccgacacctacctgagcatccaccaggtgtacggcaaggaggcctgcatcccctgcggccccggcagcaagaacaaccaggaccacagcgtgtgctacagcgactgcttcttctaccacgagaaggagaaccagagcctgcactacgacttcagcaacctgagcagcgtgggcagcctgatgaacggccccagcttcaccagcaagggcaccaagtacttccacttcttcaacatcagcctgtgcggccacgagggcaagaagatggccctgtgcaccaacaacatcaccgacttcaccgtgaaggagatcgtggccggcagcgacgactacaccaacctggtgggcgccttcgtgtgccagagcaccatcatccccagcgagagcaagggcttcagagccgccctgagcagccagagcatcatcctggccgacaccttcatcggcgtgaccgtggagaccaccctgaagaacatcaacatcaaggaggacatgttccccgtgcccaccagccagatccccgacgtgcacttcttctacaagagcagcaccgccaccaccagctgcatcaacggcagaagcaccgccgtgaagatgagatgcaaccccaccaagagcggcgccggcgtgatcagcgtgcccagcaagtgccccgccggcacctgcgacggctgcaccttctacttcctgtgggagagcgccgaggcctgccccctgtgcaccgagcacgacttccacgagatcgagggcgcctgcaagagaggcttccaggagaccctgtacgtgtggaacgagcccaagtggtgcatcaagggcatcagcctgcccgagaagaagctggccacctgcgagaccgtggacttctggctgaaggtgggcgccggcgtgggcgccttcaccgccgtgctgctggtggccctgacctgctacttctggaagaagaaccagaagctggagtacaagtacagcaagctggtgatgaccaccaacagcaaggagtgcgagctgcccgccgccgacagctgcgccatcatggagggcgaggacaacgaggaggaggtggtgtacagcaacaagcagagcctgctgggcaagctgaagagcctggccaccaaggagaaggaggaccacttcgagagcgtgcagctgaagaccagcagaagccccaacatctag

SEQ ID NO: 110998 - protein, 167 aa, Artificial Sequence
  derived and/or modified sequence
MIITTWIVYILARKGVGLPFLPITSSDIDVVESEAVSVLHHWLKKTEEEASRGIKEKLSINHPSQGVREKMSTDSPPTHGQDIHVTRDVVKHHLSKSDLLANQSQEVLEERTRIQFIRWSHTRIFQVPSEMTEDIMRDRIEQVRRSISRLTDVSAQDFSMRPSSSDC

SEQ ID NO: 110999 - DNA, 504 bp, Artificial Sequence
  derived and/or modified sequence
atgatcatcaccacctggatcgtgtacatcctggccagaaagggcgtgggcctgcccttcctgcccatcaccagcagcgacatcgacgtggtggagagcgaggccgtgagcgtgctgcaccactggctgaagaagaccgaggaggaggccagcagaggcatcaaggagaagctgagcatcaaccaccccagccagggcgtgagagagaagatgagcaccgacagcccccccacccacggccaggacatccacgtgaccagagacgtggtgaagcaccacctgagcaagagcgacctgctggccaaccagagccaggaggtgctggaggagagaaccagaatccagttcatcagatggagccacaccagaatcttccaggtgcccagcgagatgaccgaggacatcatgagagacagaatcgagcaggtgagaagaagcatcagcagactgaccgacgtgagcgcccaggacttcagcatgagacccagcagcagcgactgctag

SEQ ID NO: 111000 - DNA, 504 bp, Artificial Sequence
  derived and/or modified sequence
atgataattacgacttggatcgtgtatatcctggcacgcaagggggttggtctgcccttcctccctattacttcctctgatattgacgtggtagagtctgaagctgtatctgttcttcatcactggctgaaaaagactgaggaagaggcctcccgaggtatcaaggaaaaacttagcattaatcacccctctcaaggtgtgagggaaaaaatgtccacagatagcccccccacgcacggtcaggacattcatgtgacacgtgatgtcgtgaaacaccatttgagtaagagcgatctgttggccaatcaatcgcaggaagtcctagaggaacggactcgtatccagttcatccggtggtctcatacaagaatttttcaggtgccctccgagatgactgaagatatcatgcgagaccggatagaacaagtgcgtcggtctatttcccgcttgaccgacgtaagcgctcaggacttctcaatgaggccttcttccagtgattgttag

SEQ ID NO: 111001 - DNA, 504 bp, Artificial Sequence
  derived and/or modified sequence
atgatcattactacatggattgtttacattttggcccggaagggagtgggtctgccctttctgcctattacttcatccgatattgacgtggtagagtccgaagccgtgtcagtcctgcatcactggctcaagaaaactgaggaagaagcaagtagaggtattaaggaaaagctgagcataaatcatccgtcacagggcgtaagagaaaaaatgtctaccgacagcccccccacccacggccaggacatccatgttactagggatgtagtgaagcaccacttatcaaagtccgatctactggccaatcagtcacaagaagtcctggaggaacgcaccaggattcagtttatcagatggagccacaccaggatattccaggtgccctccgagatgacggaggacatcatgcgagatagaatcgagcaggtgcggagatcaataagccggctgaccgacgtgtccgctcaagacttctcaatgcggccctcaagtagcgactgttag

SEQ ID NO: 111002 - DNA, 504 bp, Artificial Sequence
  derived and/or modified sequence
atgatcatcaccacctggatcgtgtacatcctggccaggaagggcgtgggcctgcccttcctgcccatcaccagcagtgacattgatgtggtggagagcgaggccgtgtctgtgctgcaccactggctgaagaagacagaggaggaggccagccggggcatcaaggagaagctgagcatcaaccaccccagccagggcgtgcgggagaagatgagcacagacagcccccccacccacggccaggacatccacgtgaccagagatgtggtgaagcaccacctgagcaagagtgacctgctggccaaccagagccaggaggtgctggaggagaggacccgcatccagttcatccgctggagccacacccgcatcttccaggtgcccagcgagatgacagaggacatcatgagggaccgcatcgagcaggtgcggcgcagcatcagccggctgacagatgtgtctgcccaggacttctccatgaggcccagcagcagtgactgctag

SEQ ID NO: 111003 - DNA, 504 bp, Artificial Sequence
  derived and/or modified sequence
atgatcatcaccacctggatcgtgtacatcctggcccggaagggcgttggcctaccattcctccccataaccagtagtgacattgacgtggtagagtcagaggccgtctcagtgctgcaccactggctcaaaaagactgaagaggaagcttctagaggcattaaggaaaagctgtcgataaatcacccatcacaaggcgtccgcgagaaaatgagtacagacagtccacccacacatggccaggacattcacgttacgcgcgacgtagtgaagcatcatctcagcaagagcgatttgctggccaaccagagtcaagaggttctggaagagcgcactcggattcaatttattcgatggagtcacacacgaatctttcaagtgcccagtgagatgaccgaggatattatgagggacagaatcgagcaggtgaggcggtccatctcgcggctcactgacgtgtctgcccaggacttctcgatgcgaccctcatcttccgattgctag

SEQ ID NO: 111004 - DNA, 504 bp, Artificial Sequence
  derived and/or modified sequence
atgatcatcaccacctggatcgtgtacatcctggcccggaagggcgtgggcttgcccttcttacccatcacttctagcgacatcgacgtcgtggaatcagaagcagtttctgtcctgcatcattggcttaagaagacagaagaggaggcatcccggggcatcaaggaaaaactgtcaataaaccacccatcccagggcgtgagggagaagatgagcaccgacagccctccaactcatggccaggatatccatgtcacacgcgatgtcgtgaagcatcacttatccaagtctgacttgttggcaaaccagagccaggaagtgctagaagagcggactaggattcagttcatcagatggagccataccagaatattccaggtcccctctgagatgaccgaagacatcatgcgggacagaatagagcaggtgcggcgctcaatttcccggctgaccgacgtctccgcccaggacttttccatgcgtcctagctcttccgattgctag

SEQ ID NO: 111005 - DNA, 504 bp, Artificial Sequence
  derived and/or modified sequence
atgattatcacgacttggatcgtgtacatattagcaaggaagggcgtcggcctcccattcctgcctatcacctcttccgacattgacgtggtcgagagcgaagccgtttccgtcctccaccactggctgaaaaagactgaggaagaagcatcacggggaatcaaggagaaattaagcatcaaccatccgtcacaaggcgtgcgagagaaaatgagcaccgactcccctccaacccacggtcaggacatacatgttacaagagatgttgtgaagcaccatctttctaagagtgacttacttgccaaccagtcccaggaagtgctcgaggagaggacccgaatccagttcatccggtggtctcacaccagaatcttccaggtgccctccgaaatgacagaagatatcatgcgcgaccgaatcgagcaggtgagacgctccatctctcgattgaccgacgtgtccgcgcaggacttctcaatgaggccgtcttcaagtgactgttag

SEQ ID NO: 111006 - DNA, 504 bp, Artificial Sequence
  derived and/or modified sequence
atgatcatcacaacttggattgtgtacattttagcgagaaaaggcgttggacttcctttcctaccaatcacaagctctgatattgacgtggtggaatcagaagcagtgtcagttctgcaccattggctgaagaagactgaagaggaggcatccagaggaattaaggagaaacttagcataaaccatccgtcccagggcgtgcgagagaagatgtcgaccgactcacctccgacacatgggcaggacattcatgtgaccagagacgtggtaaagcaccatctgagtaaatcagatcttctggccaaccagagtcaagaagtcctggaggagcggaccagaattcaatttattaggtggagccatacaagaattttccaggttccgagcgagatgaccgaggatattatgcgggatagaatcgagcaggtgcgtcgatcgatctcaagactgaccgacgtcagcgcccaggatttctctatgcgcccatccagctcagactgctag

SEQ ID NO: 111007 - DNA, 861 bp, Artificial Sequence
  derived and/or modified sequence
aggcagcttcaatggaaggagggagccaagaagggggcctggtatacattcaaagatgataattacgacatggattgtgtatattcttgctcggaaaggtgtagggcttcccttcctaccaataaccagttcggacattgacgttgtggaaagtgaggctgtgtctgtactacatcattggttgaaaaaaacagaagaagaggcttctcggggcataaaggaaaagctgtccatcaaccacccttcccagggtgtaagggagaagatgtccactgactcccctcccacccatggccaggacatccacgtgaccagagatgtggtgaagcaccacctctctaagtctgatttgttggcaaaccagagccaagaggtcctagaggagagaacacgaatccagttcataagatggagccacactcgtatcttccaagtgccaagtgagatgacagaggacatcatgcgagatcgaatagagcaggtgagacgaagcatatcccgtcttacagatgtctcagctcaggacttcagtatgagaccctcctcctcagactgctgagagcaacagatggagctttgggaacgcggagaacagtggggttacagggagtcatcatcagccctaccccttggccaaccacatctccctgctgtgtcccctgggcatttctctacctcccaggtggaagtccttcagggtccagcagcaacctgtatcagaagaacatccttctctgcttgacctgaagaagggccagacctgggcagaaagactccagcaggtgagctcttcatgcgacagtgtcagcactggagtcttcttgctgaactgcgaataaagagatgtgctgtttaacaacc

SEQ ID NO: 111008 - DNA, 653 bp, Artificial Sequence
  derived and/or modified sequence
ctcccttcaatgaccttcctgtcccataggagttctcaggcagcttcaatggaaggagggagccaagaagggggcctggtatacattcaaagatgataattacgacatggattgtgtatattcttgctcggaaaggtgtagggcttcccttcctaccaataaccagttcggacattgacgttgtggaaagtgaggctgtgtctgtactacatcattggttgaaaaaaacagaagaagaggcttctcggggcataaaggaaaagctgtccatcaaccacccttcccagggtgtaagggagaagatgtccactgactcccctcccacccatggccaggacatccacgtgaccagagatgtggtgaagcaccacctctctaagtctgatttgttggcaaaccagagccaagaggtcctagaggagagaacacgaatccagttcataagatggagccacactcgtatcttccaagtgccaagtgagatgacagaggacatcatgcgagatcgaatagagcaggtgagacgaagcatatcccgtcttacagatgtctcagctcaggacttcagtatgagaccctcctcctcagactgctgagagcaacaggtggaagtccttcagggtccagcagcaacctgtatcagaagaacatcc

SEQ ID NO: 111009 - protein, 453 aa, Artificial Sequence
  derived and/or modified sequence
MDGEWLCLRELDDISLTPDPEPTHEDSWEDLTDLVEQMRDDTEDPNYLMANERMNLMNMAKLSIKGLIESALNLGRTLDSDYAPLQQFFVVMEHCLKHGLKAKKTFLGQNKSFWGPLELVEKLVPEAAEITASVKDLPGLKTPVGRGRAWLRLALMQKKLSEYMKALINKKELLSEFYEPNALMMEEEGAIIAGLLVGLNVIDANFCMKGEDLDSQVGVIDFSMYLKDGNSSKGTEGDGQITAILDQKNYVEELNRHLNATVNNLQAKVDALEKSNTKLTEELAVANNRIITLQEEMERVKEESSYILESNRKGPKQDRTAEGQALSEARKHLKEETQLRLDVEKELEMQISMRQEMELAMKMLEKDVCEKQDALVSLRQQLDDLRALKHELAFKLQSSDLGVKQKSELNSRLEEKTNQMAATIKQLEQSEKDLVKQAKTLNSAANKLIPKHH

SEQ ID NO: 111010 - DNA, 1362 bp, Artificial Sequence
  derived and/or modified sequence
atggacggcgagtggctgtgcctgagagagctggacgacatcagcctgacccccgaccccgagcccacccacgaggacagctgggaggacctgaccgacctggtggagcagatgagagacgacaccgaggaccccaactacctgatggccaacgagagaatgaacctgatgaacatggccaagctgagcatcaagggcctgatcgagagcgccctgaacctgggcagaaccctggacagcgactacgcccccctgcagcagttcttcgtggtgatggagcactgcctgaagcacggcctgaaggccaagaagaccttcctgggccagaacaagagcttctggggccccctggagctggtggagaagctggtgcccgaggccgccgagatcaccgccagcgtgaaggacctgcccggcctgaagacccccgtgggcagaggcagagcctggctgagactggccctgatgcagaagaagctgagcgagtacatgaaggccctgatcaacaagaaggagctgctgagcgagttctacgagcccaacgccctgatgatggaggaggagggcgccatcatcgccggcctgctggtgggcctgaacgtgatcgacgccaacttctgcatgaagggcgaggacctggacagccaggtgggcgtgatcgacttcagcatgtacctgaaggacggcaacagcagcaagggcaccgagggcgacggccagatcaccgccatcctggaccagaagaactacgtggaggagctgaacagacacctgaacgccaccgtgaacaacctgcaggccaaggtggacgccctggagaagagcaacaccaagctgaccgaggagctggccgtggccaacaacagaatcatcaccctgcaggaggagatggagagagtgaaggaggagagcagctacatcctggagagcaacagaaagggccccaagcaggacagaaccgccgagggccaggccctgagcgaggccagaaagcacctgaaggaggagacccagctgagactggacgtggagaaggagctggagatgcagatcagcatgagacaggagatggagctggccatgaagatgctggagaaggacgtgtgcgagaagcaggacgccctggtgagcctgagacagcagctggacgacctgagagccctgaagcacgagctggccttcaagctgcagagcagcgacctgggcgtgaagcagaagagcgagctgaacagcagactggaggagaagaccaaccagatggccgccaccatcaagcagctggagcagagcgagaaggacctggtgaagcaggccaagaccctgaacagcgccgccaacaagctgatccccaagcaccactag

SEQ ID NO: 111011 - DNA, 1362 bp, Artificial Sequence
  derived and/or modified sequence
atggatggagaatggctctgtctgagggaacttgacgacatatcccttacccctgacccagagccgactcatgaagacagttgggaggatctgacagatttagtcgaacaaatgcgggatgatacagaagatcccaattatctgatggccaatgagcgcatgaatttgatgaacatggctaaactgagcatcaaggggctgattgagagcgccctgaacctcggtcgaacactggactcagactacgccccactccaacagttcttcgtggtgatggagcattgcctgaaacatgggctgaaggctaaaaagacttttctgggccaaaacaagtcattctggggacctttagagctggttgaaaagctggtgccagaagctgcggaaatcaccgctagtgtcaaggacctccctggtctcaagacaccggtaggacgcgggcgcgcctggctgcgacttgcactgatgcaaaaaaagttgagtgagtatatgaaagctcttatcaataaaaaggaactgctttctgagttttacgagccgaatgcactaatgatggaggaggagggagccattatcgctgggctgctggtagggttgaatgtgattgatgcaaatttctgcatgaaaggagaggacttggactcacaggtaggtgtgatcgacttttcgatgtatctgaaagatggtaattcaagtaaaggtacagagggggacggacagataacggccattctcgaccaaaaaaactacgttgaggaactgaatagacaccttaacgccactgtaaataatctgcaggccaaagttgacgcactggaaaaatctaacactaagctgacagaagagctggccgttgccaacaatcgtatcatcacccttcaagaggagatggagcgggtgaaggaggagtccagctatattttggaatcgaaccggaaaggtccaaaacaggatcgtaccgcggaaggacaggccctcagtgaagcccgcaagcacctcaaagaggagacacaactgagactggatgttgagaaagagttagagatgcagatttctatgcggcaggagatggaacttgccatgaaaatgttagagaaagatgtgtgtgagaaacaagacgcactggttagcttgagacaacaactggacgatctgagagctctgaagcacgagctagccttcaagctccagtctagcgacttaggcgttaagcagaagagcgaactgaatagcaggctggaggaaaagactaatcagatggcggccacaataaagcagctggaacagagtgaaaaagatcttgtgaaacaggctaagacactcaattctgccgcaaacaagttaatccccaaacaccactag

SEQ ID NO: 111012 - DNA, 1362 bp, Artificial Sequence
  derived and/or modified sequence
atggatggagagtggctgtgcctgcgggagctggatgacatcagcctgaccccagaccctgagcccacccatgaagattcctgggaggacctgacagacctggtggagcagatgagagatgacacagaggaccccaactacctgatggccaatgaaagaatgaacctgatgaacatggccaagctgagcatcaagggcctcatcgagagcgccctgaacctgggccgcaccctggacagcgactatgcccccctgcagcagttctttgtggtgatggagcactgcctgaagcacggcctgaaggccaagaagaccttcctgggccagaacaagagcttctggggccccctggagctggtggagaagctggtgcctgaggccgctgagatcacagcctctgtgaaggacctgcccggcctgaagacccctgtgggccggggccgggcctggctgcggctggccctgatgcagaagaagctgtctgagtacatgaaggccctgatcaacaagaaggagctgctgtctgagttctatgagcccaatgccctgatgatggaggaggagggcgccatcatcgccggcctgctggtgggcctgaatgtgattgatgccaacttctgcatgaagggggaggacctggacagccaggtgggcgtcatcgacttctccatgtacctgaaggatggcaacagcagcaaaggaacagaaggagatggccagatcacagccatcctggaccagaagaactacgtggaggagctgaacagacacctgaatgccaccgtgaacaacctgcaggccaaggtggatgccctggagaagagcaacaccaagctgacagaggagctggccgtggccaacaaccgcatcatcaccctgcaggaggagatggagcgggtgaaggaggagagcagctacatcctggagagcaacaggaagggccccaagcaggacagaacagctgagggccaggccctgtctgaggccaggaagcacctgaaggaggagacccagctgcggctggatgtggagaaggagctggagatgcagatctccatgaggcaggagatggagctggccatgaagatgctggagaaggatgtgtgtgagaagcaggatgccctggtgtccctgcggcagcagctggatgacctgcgggccctgaagcatgagctggccttcaagctgcagagcagtgacctgggcgtgaagcagaagtctgagctgaacagccggctggaggagaagaccaaccagatggccgccaccatcaagcagctggagcagagcgagaaggacctggtgaagcaggccaagaccctgaacagcgctgccaacaagctgatccccaagcaccactag

SEQ ID NO: 111013 - DNA, 1362 bp, Artificial Sequence
  derived and/or modified sequence
atggacggcgagtggctgtgcctgcgggagctggacgacatcagcctgaccccagacccagagccaacccacgaggacagctgggaggatctcaccgacttggtggagcaaatgagggatgacactgaggatccgaattatcttatggccaatgagcgcatgaatctgatgaacatggcgaagctgtccattaaagggttgattgaatcagcgctgaacctgggaagaacactagattcagactatgcacccctccagcagttttttgttgtgatggagcactgtctgaagcatgggttgaaagcaaagaagacctttctgggccaaaataagtccttttggggcccactcgaactggtggaaaagctggttcccgaagcagccgaaatcactgcgagtgtgaaggacctcccaggcttaaaaacgcccgttggccgtgggagggcttggctacgcctggccttgatgcaaaaaaaattgtcagagtacatgaaagccctgataaacaagaaggagctgctctctgagttctatgaacccaatgcccttatgatggaggaggaaggcgctataatcgccggactgctggtcggcctcaacgtgattgacgcaaacttctgcatgaagggcgaagatttggactctcaggtgggggtgatcgattttagtatgtaccttaaggatggcaattcgtcgaaaggaaccgaaggcgatgggcagattacagccattctggaccagaagaactacgtggaagagctaaaccgacatctgaatgccactgtcaataatttgcaggccaaagtcgatgctttagagaaatcaaataccaaactaaccgaggagctcgcagttgcaaataaccgcatcatcactctgcaggaagaaatggaacgcgtgaaggaagaatcctcctacattctagagtccaaccggaagggcccgaagcaggacagaaccgctgagggacaagctctctctgaagctagaaaacacctcaaagaagaaacgcagctccgtctggacgtggagaaagaactcgagatgcagatttcaatgcgccaagaaatggaactagctatgaaaatgttggaaaaagacgtatgtgagaaacaagatgccctggtgagcctgaggcagcagcttgacgatctccgcgctctaaagcacgagctagctttcaaactgcagagcagcgatctcggcgttaaacaaaagtcggaactgaattcaaggctagaggagaagaccaaccagatggccgcaaccatcaagcagctcgaacaaagtgagaaggacttggtaaaacaggctaaaaccctgaattcagctgcaaacaagctgatcccgaaacatcactag

SEQ ID NO: 111014 - DNA, 1362 bp, Artificial Sequence
  derived and/or modified sequence
atggatggcgagtggctctgcctcagagagctggacgatatctcactgacccctgacccagagccaacacatgaagatagctgggaggatctgacagacctcgtggagcagatgcgtgacgacacagaggatccaaactaccttatggcaaatgagcgaatgaacctcatgaacatggcaaagctttccatcaaggggctaattgaatcagcactgaacttaggtaggactctcgattctgattatgcccctctccaacagttttttgtggttatggagcactgcctcaaacatgggctgaaagctaaaaagacgtttctaggacagaataaaagcttctggggtcctctagagctcgtggagaaattggttcctgaagctgcggagatcacagcctctgtcaaagacctcccaggactcaaaacccctgttgggagggggagagcatggctccgtcttgcgcttatgcaaaagaaactgagtgagtacatgaaagctctgataaataagaaggaactactcagcgaattctatgagcctaacgcactcatgatggaagaagaaggggctattatcgccggactccttgtagggttgaacgtgatagacgctaatttttgtatgaagggggaggatctggactcacaggttggcgtgatcgatttttccatgtatctaaaggatgggaactcaagcaagggcactgaaggagacgggcaaataacggcaattttagaccaaaaaaattacgtggaagagctcaaccgtcacctcaatgctaccgttaacaaccttcaggcaaaagtcgacgcattagagaaatctaataccaaacttacagaggaattagctgtggcaaacaacaggattattacactgcaggaggagatggaacgggtcaaggaggagagcagctacatcctggagtcaaataggaagggcccaaaacaggaccgaaccgctgaaggtcaggccctctcagaggcaagaaaacatctgaaggaggagacacagctccggctggacgtagaaaaggaattggaaatgcaaatttccatgcgccaggaaatggagctagccatgaagatgttggagaaagacgtgtgtgagaaacaagacgcactcgtttctctgcgccaacagcttgatgacctacgagctctcaaacatgagttagcattcaagctgcagagttccgaccttggcgtgaaacaaaaaagcgagcttaactctagacttgaagagaagacgaatcagatggccgctacgatcaagcagctcgagcagtcggaaaaggatctggtcaaacaggcaaaaacccttaactctgctgctaacaaactcatccctaagcaccactag

SEQ ID NO: 111015 - DNA, 1421 bp, Artificial Sequence
  derived and/or modified sequence
ctttgcaaattccgagtgtccatggatggagaatggctctgcctgcgagagctggatgacatctcacttacacctgacccagagcctacccatgaagactcttgggaggatttgacagatttggtggagcaaatgcgcgatgatacagaagatcctaattatctcatggctaatgaacgcatgaacctcatgaacatggccaagctgagtatcaagggcttgattgaatcagctctgaacctggggaggactcttgactctgactatgcacctctccagcaattctttgtggtgatggagcactgtctgaaacatggcttgaaagctaaaaaaacttttctcggacaaaataaatccttctgggggcctctagaactggtagaaaagcttgttccagaagccgcagagataacagcaagtgttaaagatcttccaggacttaagacaccagtaggtagaggaagagcctggcttcgtttggcattaatgcaaaagaaactttcagaatatatgaaagctttgatcaataagaaagaacttctcagtgaattctacgaacccaatgccctcatgatggaagaagaaggagccataattgctggtctgttggtgggtctgaatgtcattgatgccaatttctgtatgaaaggagaagacttggactctcaggttggagttatagatttttcaatgtatctcaaggacgggaacagcagtaaaggtactgaaggagacggtcagattactgcaattctggaccagaagaactatgtagaagaactgaacagacatttgaatgctactgtaaacaaccttcaggcaaaagtagatgcattagaaaaatccaacactaaactgacagaggagcttgcagttgcaaacaacaggatcattaccttacaagaagaaatggaacgagttaaagaggaaagttcctacatactggaatccaatcggaagggtcccaagcaagacagaactgcagaagggcaagcactaagtgaagcaagaaagcatttaaaagaagagacacaattacgattggatgttgagaaagaactggagatgcagatcagcatgaggcaggagatggaattggctatgaagatgctggagaaggatgtctgtgagaagcaggatgccctggtatctcttcggcagcagctggatgacctcagagctctcaagcatgaacttgcctttaagctgcagagttcagacttaggagtaaaacagaaaagtgaactaaacagtcgcttggaagagaagactaatcagatggctgctaccattaaacaacttgaacaaagtgaaaaggatttggtgaaacaggcaaagaccttaaatagtgcagcaaataaactgatcccaaaacatcattaggcatttttaagttggtcacgtcgcaagtccgatatcac

SEQ ID NO: 111016 - DNA, 1095 bp, Artificial Sequence
  derived and/or modified sequence
atggccagagccagcgaggccgtgagcagaatcctggaggagtggcacaaggccaaggtggaggccatgaccctggacctggccctgctgagaagcgtgcagcacttcgccgaggccttcaaggccaagaacgtgcccctgcacgtgctggtgtgcaacgccgccaccttcgccctgccctggagcctgaccaaggacggcctggagaccaccttccaggtgaaccacctgggccacttctacctggtgcagctgctgagaatgttctgcgccgcccagctgctgcccgtgagcctgtggagcccccagagccccatcgacctgcagatcctgaccaccccctgggagaactggaccagcgtggccagcctgcagcagaagaccaccatcggcagatgctggctgatcaccggccccagcagcgccaccagcagcagccccaccagctgcaccgtggcccccaccagaggccacgtggagagaagcgccagctggaagtacgacgtgctgcagcacagcagccagctggtgggcgtgcacaccgccgtgtacctgggcgaggccttccaccaggtgcacgccaccggcagctgccaccacagagtgctgtgctgctgccccagaaccggcggcagcggcagagacgtgctgcagcagctgctgcccctgcacgccctgaccagaagcagcgagagaagagacggccccgaccccgtgggcagcgagagactgatccaggagagactggccagccccgccaagtggagcagcgagagaatgggcacccacaccagacccgtgtgcgtgcccagcagaaagtgccagggccccctgcccaacgtgccccccacccagatcagaaagagcaagggcaacaagagcagccacaacagagtgaagaacctgaagtaccagtgggaggccggcaacagctggggcaaggtgagcctgttctggggctgggccagacacagaagcctgtgcttcctggtggtggcctgcctgaaggtgaagacctgcctggtgtgcagattcagaatcagcctggagaagcaccagcagttcagcttcttctactgctacagaatcgcctag

SEQ ID NO: 111017 - DNA, 1095 bp, Artificial Sequence
  derived and/or modified sequence
atggctagagcatccgaggccgtgagtaggatactggaggaatggcacaaggcaaaggtagaagctatgactcttgaccttgccctcctaaggagtgtgcagcatttcgccgaggcatttaaggccaaaaatgtgcccctccatgtgctggtatgcaacgccgcgacctttgcgcttccttggtcgctgactaaggacggtctagagaccacattccaggtcaaccatctcggccatttctacctggtgcagctgctgagaatgttttgcgcagcccagttgctgcccgtcagcctctggtccccccagtcccccattgacttacagatcttgaccacgccttgggaaaactggaccagtgtagccagcctgcagcaaaagactactatcggtagatgctggctaatcaccgggccaagctccgctacctcgagcagtcccaccagctgcacagttgcccccactcggggccacgttgagcgatctgcctcctggaagtacgacgtcctccagcactccagccagctcgtgggtgtgcacaccgcagtttatctaggggaagcttttcaccaagtgcatgcgaccggctcgtgccatcaccgtgtactttgttgttgtcctagaaccgggggttcaggacgagacgtgctgcagcaacttttgcctcttcacgctctgaccaggtcctccgaaaggcgtgacggtccagaccccgttggctctgagaggctcatacaagaacgccttgcatctcctgctaaatggtcaagcgaacgtatgggcacccatacgaggccagtttgcgtcccctctcgaaagtgtcagggaccccttcctaatgtgccccccacacagattcggaaatccaagggcaataagagctcccacaaccgcgtgaagaatttgaaataccaatgggaagcaggaaacagctggggcaaggtgagcctgttttgggggtgggcacggcatcgctctctctgttttctggtcgtcgcctgtcttaaggtgaaaacttgtctggtatgcaggtttaggattagccttgagaagcaccaacagttcagttttttctactgctatcggatcgcctag

SEQ ID NO: 111018 - DNA, 1095 bp, Artificial Sequence
  derived and/or modified sequence
atggcccgggccagcgaggccgtgagccgcatcctggaggagtggcacaaggccaaggtggaggccatgaccctggacctggccctgctgcggtctgtgcagcactttgctgaggccttcaaggccaagaatgtgcccctgcacgtgctggtgtgcaatgctgccacctttgccctgccctggagcctgaccaaggatggcctggagaccaccttccaggtgaaccacctgggccacttctacctggtgcagctgctgaggatgttctgtgccgcccagctgctgcctgtgtccctgtggagcccccagagccccatcgacctgcagatcctgaccaccccctgggagaactggacctctgtggccagcctgcagcagaagaccaccatcggccgctgctggctgatcaccggccccagcagcgccaccagcagcagccccaccagctgcaccgtggcccccacccggggccacgtggagaggtctgcctcctggaagtatgatgtgctgcagcacagcagccagctggtgggcgtgcacacagctgtgtacctgggggaggccttccaccaggtgcacgccaccggcagctgccaccaccgggtgctgtgctgctgccccaggactggaggcagcggcagagatgtgctgcagcagctgctgcccctgcacgccctgaccaggagcagcgagaggagagatggccctgaccctgtgggcagcgagcggctcatccaggagcggctggccagccctgccaagtggagcagcgagaggatgggcacccacaccaggcctgtgtgtgtgcccagcaggaagtgccagggccccctgcccaacgtgccccccacccagatcaggaagagcaagggcaacaagagcagccacaacagagtgaagaacctgaagtaccagtgggaggccggcaacagctggggcaaggtgtccctcttctggggctgggcccggcacaggagcctgtgcttcctggtggtggcctgcctgaaggtgaagacctgcctggtgtgccgcttccgcatcagcctggagaagcaccagcagttctccttcttctactgctacagaattgcctag

SEQ ID NO: 111019 - protein, 377 aa, Artificial Sequence
  derived and/or modified sequence
MAEEVVVVAKFDYVAQQEQELDIKKNERLWLLDDSKSWWRVRNSMNKTGFVPSNYVERKNSARKASIVKNLKDTLGIGKVKRKPSVPDSASPADDSFVDPGERLYDLNMPAYVKFNYMAEREDELSLIKGTKVIVMEKCSDGWWRGSYNGQVGWFPSNYVTEEGDSPLGDHVGSLSEKLAAVVNNLNTGQVLHVVQALYPFSSSNDEELNFEKGDVMDVIEKPENDPEWWKCRKINGMVGLVPKNYVTVMQNNPLTSGLEPSPPQCDYIRPSLTGKFAGNPWYYGKVTRHQAEMALNERGHEGDFLIRDSESSPNDFSVSLKAQGKNKHFKVQLKETVYCIGQRKFSTMEELVEHYKKAPIFTSEQGEKLYLVKHLS

SEQ ID NO: 111020 - protein, 75 aa, Artificial Sequence
  derived and/or modified sequence
MAEEVVVVAKFDYVAQQEQELDIKKNERLWLLDDSKSWWRVRNSMNKTGFVPSNYVERKNSARKASIVKNLKDTL

SEQ ID NO: 111021 - protein, 115 aa, Artificial Sequence
  derived and/or modified sequence
MAEEVVVVAKFDYVAQQEQELDIKKNERLWLLDDSKSWWRVRNSMNKTGFVPSNYVERKNSARKASIVKNLKDTLGIGKVKRKPSVPDSASPADDSFVDPGERLYDLNMPAYVKF

SEQ ID NO: 111022 - protein, 129 aa, Artificial Sequence
  derived and/or modified sequence
MAEEVVVVAKFDYVAQQEQELDIKKNERLWLLDDSKSWWRVRNSMNKTGFVPSNYVERKNSARKASIVKNLKDTLGIGKVKRKPSVPDSASPADDSFVDPGERLYDLNMPAYVKFNYMAEREDELSLIK

SEQ ID NO: 111023 - DNA, 1134 bp, Artificial Sequence
  derived and/or modified sequence
atggccgaggaggtggtggtggtggccaagttcgactacgtggcccagcaggagcaggagctggacatcaagaagaacgagagactgtggctgctggacgacagcaagagctggtggagagtgagaaacagcatgaacaagaccggcttcgtgcccagcaactacgtggagagaaagaacagcgccagaaaggccagcatcgtgaagaacctgaaggacaccctgggcatcggcaaggtgaagagaaagcccagcgtgcccgacagcgccagccccgccgacgacagcttcgtggaccccggcgagagactgtacgacctgaacatgcccgcctacgtgaagttcaactacatggccgagagagaggacgagctgagcctgatcaagggcaccaaggtgatcgtgatggagaagtgcagcgacggctggtggagaggcagctacaacggccaggtgggctggttccccagcaactacgtgaccgaggagggcgacagccccctgggcgaccacgtgggcagcctgagcgagaagctggccgccgtggtgaacaacctgaacaccggccaggtgctgcacgtggtgcaggccctgtaccccttcagcagcagcaacgacgaggagctgaacttcgagaagggcgacgtgatggacgtgatcgagaagcccgagaacgaccccgagtggtggaagtgcagaaagatcaacggcatggtgggcctggtgcccaagaactacgtgaccgtgatgcagaacaaccccctgaccagcggcctggagcccagccccccccagtgcgactacatcagacccagcctgaccggcaagttcgccggcaacccctggtactacggcaaggtgaccagacaccaggccgagatggccctgaacgagagaggccacgagggcgacttcctgatcagagacagcgagagcagccccaacgacttcagcgtgagcctgaaggcccagggcaagaacaagcacttcaaggtgcagctgaaggagaccgtgtactgcatcggccagagaaagttcagcaccatggaggagctggtggagcactacaagaaggcccccatcttcaccagcgagcagggcgagaagctgtacctggtgaagcacctgagctag

SEQ ID NO: 111024 - DNA, 228 bp, Artificial Sequence
  derived and/or modified sequence
atggccgaggaggtggtggtggtggccaagttcgactacgtggcccagcaggagcaggagctggacatcaagaagaacgagagactgtggctgctggacgacagcaagagctggtggagagtgagaaacagcatgaacaagaccggcttcgtgcccagcaactacgtggagagaaagaacagcgccagaaaggccagcatcgtgaagaacctgaaggacaccctgtag

SEQ ID NO: 111025 - DNA, 348 bp, Artificial Sequence
  derived and/or modified sequence
atggccgaggaggtggtggtggtggccaagttcgactacgtggcccagcaggagcaggagctggacatcaagaagaacgagagactgtggctgctggacgacagcaagagctggtggagagtgagaaacagcatgaacaagaccggcttcgtgcccagcaactacgtggagagaaagaacagcgccagaaaggccagcatcgtgaagaacctgaaggacaccctgggcatcggcaaggtgaagagaaagcccagcgtgcccgacagcgccagccccgccgacgacagcttcgtggaccccggcgagagactgtacgacctgaacatgcccgcctacgtgaagttctag

SEQ ID NO: 111026 - DNA, 390 bp, Artificial Sequence
  derived and/or modified sequence
atggccgaggaggtggtggtggtggccaagttcgactacgtggcccagcaggagcaggagctggacatcaagaagaacgagagactgtggctgctggacgacagcaagagctggtggagagtgagaaacagcatgaacaagaccggcttcgtgcccagcaactacgtggagagaaagaacagcgccagaaaggccagcatcgtgaagaacctgaaggacaccctgggcatcggcaaggtgaagagaaagcccagcgtgcccgacagcgccagccccgccgacgacagcttcgtggaccccggcgagagactgtacgacctgaacatgcccgcctacgtgaagttcaactacatggccgagagagaggacgagctgagcctgatcaagtag

SEQ ID NO: 111027 - DNA, 1134 bp, Artificial Sequence
  derived and/or modified sequence
atggccgaagaagtcgtagtggtagcaaagttcgactacgtcgcgcagcaggagcaggaacttgacattaagaaaaacgaacgtctgtggctgctggatgattcgaaatcttggtggcgcgtgcgaaacagcatgaataagaccggatttgtgccgagcaactacgttgagaggaaaaatagcgcccggaaagcgagtatagtcaagaaccttaaagacactttagggataggcaaagtgaagaggaagccttcagttccagattcagccagccctgccgacgactcattcgtcgatccaggtgagaggttgtacgacttaaatatgccagcttacgtgaaattcaactatatggccgaaagggaggacgagctctctctaatcaaagggacaaaagtcattgtgatggagaagtgttcagacggttggtggaggggctcctacaacggtcaagtaggatggttcccctccaactatgtaacagaggaaggggatagcccactgggagatcacgtggggtctctgtccgaaaagctggccgccgttgtgaataatctgaataccgggcaggtactccatgtagtgcaggctttatacccattcagctctagtaatgatgaggaattgaatttcgagaagggagatgtgatggacgtgattgaaaagcccgaaaacgacccggaatggtggaaatgcagaaagataaatggaatggttgggctggtgcctaagaactacgttaccgtgatgcaaaataacccacttaccagcggccttgagccttctcctccacagtgcgattatataagaccctcgcttactggtaagttcgctgggaacccctggtattacgggaaggtgacaagacatcaggccgagatggcactcaacgaacgcggtcatgagggagatttccttataagggattcggaatcttcacccaacgatttcagcgtgagtctgaaagcacagggaaagaataaacattttaaagtgcagctcaaagaaactgtatactgcattggccagaggaaattcagtactatggaggaactggtagaacactataaaaaggctcccatattcacatccgaacagggtgaaaagctgtacctggttaaacatctgtcctag

SEQ ID NO: 111028 - DNA, 228 bp, Artificial Sequence
  derived and/or modified sequence
atggccgaggaagttgttgtggtggccaagttcgactatgttgcccaacaagagcaagagctcgacatcaagaagaatgagcgcctctggctgctcgatgactccaagagctggtggcgggtaaggaatagtatgaataagaccggtttcgtcccatccaactatgtcgagcgcaagaactctgcgaggaaggcttcaatagttaaaaaccttaaggacaccctgtag

SEQ ID NO: 111029 - DNA, 1134 bp, Artificial Sequence
  derived and/or modified sequence
atggccgaagaggttgtcgtcgtggccaagttcgattacgtggctcagcaggaacaggaactcgacattaagaaaaatgagcgcctttggctgctggacgacagcaaaagctggtggagagtgaggaactccatgaacaaaaccggattcgttccttcgaactatgtggaacgtaagaatagcgctagaaaggccagtatcgttaaaaacctgaaggacactctgggaattggcaaagtcaagaggaaaccgagcgtgcccgatagtgccagcccagcagacgactcctttgtcgatccgggagaacgattgtacgatctgaacatgcctgcctacgtgaagtttaactacatggctgagcgagaggacgagctctctttgatcaaggggaccaaagttatcgtgatggagaaatgttcagacgggtggtggaggggcagttacaacggacaggtcggatggttcccttccaactacgtgacggaagaaggagacagcccactcggtgatcacgtcggtagcctgagcgagaagctggctgccgtggttaataacctgaatacaggtcaagtcctccacgtggtccaggctctttacccattttcatcctcaaacgacgaggagctgaatttcgaaaaaggcgatgtgatggacgtgattgagaaaccagagaacgatccggagtggtggaaatgtaggaaaattaacggtatggtcggactcgttcccaaaaactatgtgacggttatgcagaacaacccattgactagtggtctcgaaccaagccctccgcagtgcgactacattagaccctcccttacgggaaagttcgccggaaatccttggtactacggaaaggtcactcgccatcaggccgagatggccctgaatgagcggggacacgaaggggacttcctgatcagagacagtgagtcaagcccaaatgatttctctgtgtcacttaaggcacaagggaaaaacaaacacttcaaggtccagctgaaggagacggtatactgtattggacagcggaagttttcaaccatggaggagctggtggaacattataaaaaggcacctatcttcacgtccgagcagggcgagaaactttacctggttaaacatctcagctag

SEQ ID NO: 111030 - DNA, 348 bp, Artificial Sequence
  derived and/or modified sequence
atggccgaggaggtagtggttgtggcgaaatttgattacgtcgcccaacaagagcaggaattggatatcaagaagaatgaacgcctgtggttgttggatgacagcaaatcctggtggagagtgagaaactccatgaataagaccggtttcgtgccttctaattacgtcgaaagaaaaaattctgccagaaaagcctccattgtgaagaatctcaaggatactctgggtatcggtaaagtgaaacggaagccctcagtgcctgacagtgcatcccctgctgatgattctttcgtggatccaggggagagattatacgatctcaatatgccggcgtacgtgaagttttag

SEQ ID NO: 111031 - DNA, 390 bp, Artificial Sequence
  derived and/or modified sequence
atggcagaggaggtggtggtggtggcaaagtttgactacgtggctcagcaagaacaggagctggatatcaagaagaacgaacgcctttggcttctcgacgactcaaaatcatggtggagagtccgaaattctatgaataaaaccgggtttgtcccgtcaaactacgtggaacgaaagaactctgctcgtaaggcgtctattgtcaagaatctgaaggacacccttggcattggaaaagtcaagcgcaagccatccgtccccgactcagcctcccctgccgacgactcctttgtggatcctggagagcgcttatacgatctcaacatgccagcctacgtaaaatttaactacatggcggagcgcgaagatgagctctcattgattaaatag

SEQ ID NO: 111032 - DNA, 1134 bp, Artificial Sequence
  derived and/or modified sequence
atggccgaggaggtggtggtggtggccaagtttgattatgtggcccagcaggagcaggagctggacatcaagaagaatgaaaggctgtggctgctggatgacagcaagtcctggtggagggtgaggaacagcatgaacaagacaggctttgtgcccagcaactacgtggagaggaagaacagcgccaggaaggccagcatcgtgaagaacctgaaggacaccctgggcatcggcaaggtgaagaggaagcccagcgtgcctgattctgccagccctgcagatgacagctttgtggaccccggggagcggctgtatgacctgaacatgcctgcctacgtgaagttcaactacatggccgagcgggaggatgagctgagcctcatcaagggcaccaaggtgattgtgatggagaagtgcagtgatggctggtggaggggcagctacaacggccaggtgggctggttccccagcaactacgtgacagaggagggggacagccccctgggggaccacgtgggcagcctgtctgagaagctggccgctgtggtgaacaacctgaacacaggccaggtgctgcacgtggtgcaggccctgtaccccttcagcagcagcaatgatgaggagctgaactttgagaagggagatgtgatggatgtgattgagaagccagaaaatgaccctgagtggtggaagtgcaggaagatcaatggcatggtgggcctggtgcccaagaactacgtgacagtgatgcagaacaaccccctgaccagcggcctggagcccagccccccccagtgtgactacatccggcccagcctgaccgggaagtttgctggcaacccctggtactacggcaaggtgaccaggcaccaggccgagatggccctgaatgaaagaggacatgaaggagacttcctgatccgggacagcgagagcagccccaatgacttctctgtgtccctgaaggcccagggcaagaacaagcacttcaaggtgcagctgaaggagaccgtgtactgcatcggccagaggaagttcagcaccatggaggagctggtggagcactacaagaaggcccccatcttcaccagcgagcagggcgagaagctgtacctggtgaagcacctgtcctag

SEQ ID NO: 111033 - DNA, 228 bp, Artificial Sequence
  derived and/or modified sequence
atggccgaggaggtggtggtggtggccaagtttgattatgtggcccagcaggagcaggagctggacatcaagaagaatgaaaggctgtggctgctggatgacagcaagtcctggtggagggtgaggaacagcatgaacaagacaggctttgtgcccagcaactacgtggagaggaagaacagcgccaggaaggccagcatcgtgaagaacctgaaggacaccctgtag

SEQ ID NO: 111034 - DNA, 348 bp, Artificial Sequence
  derived and/or modified sequence
atggccgaggaggtggtggtggtggccaagtttgattatgtggcccagcaggagcaggagctggacatcaagaagaatgaaaggctgtggctgctggatgacagcaagtcctggtggagggtgaggaacagcatgaacaagacaggctttgtgcccagcaactacgtggagaggaagaacagcgccaggaaggccagcatcgtgaagaacctgaaggacaccctgggcatcggcaaggtgaagaggaagcccagcgtgcctgattctgccagccctgcagatgacagctttgtggaccccggggagcggctgtatgacctgaacatgcctgcctacgtgaagttctag

SEQ ID NO: 111035 - DNA, 390 bp, Artificial Sequence
  derived and/or modified sequence
atggccgaggaggtggtggtggtggccaagtttgattatgtggcccagcaggagcaggagctggacatcaagaagaatgaaaggctgtggctgctggatgacagcaagtcctggtggagggtgaggaacagcatgaacaagacaggctttgtgcccagcaactacgtggagaggaagaacagcgccaggaaggccagcatcgtgaagaacctgaaggacaccctgggcatcggcaaggtgaagaggaagcccagcgtgcctgattctgccagccctgcagatgacagctttgtggaccccggggagcggctgtatgacctgaacatgcctgcctacgtgaagttcaactacatggccgagcgggaggatgagctgagcctcatcaagtag

SEQ ID NO: 111036 - DNA, 1937 bp, Artificial Sequence
  derived and/or modified sequence
accgcgcgtgccccgcctctctcccaagagctacgcggcggcggcggagcgcaggcctcgtgccgttacggccatcacggcggccgcagtggcgtcctggagccctcctcagtgctgaagctgctgaaagatggcagaagaagtggtggtagtagccaaatttgattatgtggcccaacaagaacaagagttggacatcaagaagaatgagagattatggcttctggatgattctaagtcctggtggcgagttcgaaattccatgaataaaacaggttttgtgccttctaactatgtggaaaggaaaaacagtgctcggaaagcatctattgtgaaaaacctaaaggataccttaggcattggaaaagtgaaaagaaaacctagtgtgccagattctgcatctcctgctgatgatagttttgttgacccaggggaacgtctctatgacctcaacatgcccgcttatgtgaaatttaactacatggctgagagagaggatgaattatcattgataaaggggacaaaggtgatcgtcatggagaaatgcagtgatgggtggtggcgtggtagctacaatggacaagttggatggttcccttcaaactatgtaactgaagaaggtgacagtcctttgggtgaccatgtgggttctctgtcagagaaattagcagcagtcgtcaataacctaaatactgggcaagtgttgcatgtggtacaggctctttacccattcagctcatctaatgatgaagaacttaatttcgagaaaggagatgtaatggatgttattgaaaaacctgaaaatgacccagagtggtggaaatgcaggaagatcaatggtatggttggtctagtaccaaaaaactatgttaccgttatgcagaataatccattaacttcaggtttggaaccatcacctccacagtgtgattacattaggccttcactcactggaaagtttgctggcaatccttggtattatggcaaagtcaccaggcatcaagcagaaatggcattaaatgaaagaggacatgaaggggatttcctcattcgtgatagtgaatcttcgccaaatgatttctcagtatcactaaaagcacaagggaaaaacaagcattttaaagtccaactaaaagagactgtctactgcattgggcagcgtaaattcagcaccatggaagaacttgtagaacattacaaaaaggcaccaatttttacaagtgaacaaggagaaaaattatatcttgtcaagcatttatcatgatactgctgaccagaagtgactgctgtgtagctgtaatttgtcatgtaattgaagactgagaaaatgttgggtccagtcgtgcttgattggaaattgttgtttctaaatctatatgagaattgacaataagtatttttattataactcagcccatacatatatactatgtatgcagtgcatctgcatagaacagttccttatccttggccttctgttttattgtttttttctttgctgttttccctttgcttctaatattacagttttgtattttgtaaacaaaaatcaaataatgcatatcagaatctttatatggaagaaatcctttattgcctttcctttgtttccttgtaaaggcaccctgttctgttatggtttttcattatataaaattattatatctatatatgacatatgctaaaatttcttggagagtgttaatcttttctgtgactaaatagcaataataagtggaaaattagaaattatttccaggtattatatttgtcacaggccattgtaaataccaagtatattgtgtctgccataatttttaaaaatacattcattgtcttcagtcatacagcaagacacatgagacatagattagaaaacatgttgtacaattttaatttacaactgttggaaataaaaatcacttaatttttttcca

SEQ ID NO: 111037 - DNA, 557 bp, Artificial Sequence
  derived and/or modified sequence
ctcgtgccgttacggccatcacggcggccgcagtggcgtcctggagccctcctcaggtgagctggagctgcccggctcggcagcgggaagagacagtctcactgtgttgcccaggctggttttgaactcctgcgctcaagtgatcttcccatctctgcctcccaaagagctaggattacaggagtgagccactgcacccagcagcttgatgtttctaaggttcatccatgttatagcacatactggtactgtgtctggaattggtgggttcttggtctctctgacttcaagaatgaagccgcggaccctcgcgtgctgaagctgctgaaagatggcagaagaagtggtggtagtagccaaatttgattatgtggcccaacaagaacaagagttggacatcaagaagaatgagagattatggcttctggatgattctaagtcctggtggcgagttcgaaattccatgaataaaacaggttttgtgccttctaactatgtggaaaggaaaaacagtgctcggaaagcatctattgtgaaaaacctaaaggataccttag

SEQ ID NO: 111038 - DNA, 1971 bp, Artificial Sequence
  derived and/or modified sequence
accgcgcgtgccccgcctctctcccaagagctacgcggcggcggcggagcgcaggcctcgtgccgttacggccatcacggcggccgcagtggcgtcctggagccctcctcaggtgagctggagctgcccggctcggcagcgggaagtgctgaagctgctgaaagatggcagaagaagtggtggtagtagccaaatttgattatgtggcccaacaagaacaagagttggacatcaagaagaatgagagattatggcttctggatgattctaagtcctggtggcgagttcgaaattccatgaataaaacaggttttgtgccttctaactatgtggaaaggaaaaacagtgctcggaaagcatctattgtgaaaaacctaaaggataccttaggcattggaaaagtgaaaagaaaacctagtgtgccagattctgcatctcctgctgatgatagttttgttgacccaggggaacgtctctatgacctcaacatgcccgcttatgtgaaatttaactacatggctgagagagaggatgaattatcattgataaaggggacaaaggtgatcgtcatggagaaatgcagtgatgggtggtggcgtggtagctacaatggacaagttggatggttcccttcaaactatgtaactgaagaaggtgacagtcctttgggtgaccatgtgggttctctgtcagagaaattagcagcagtcgtcaataacctaaatactgggcaagtgttgcatgtggtacaggctctttacccattcagctcatctaatgatgaagaacttaatttcgagaaaggagatgtaatggatgttattgaaaaacctgaaaatgacccagagtggtggaaatgcaggaagatcaatggtatggttggtctagtaccaaaaaactatgttaccgttatgcagaataatccattaacttcaggtttggaaccatcacctccacagtgtgattacattaggccttcactcactggaaagtttgctggcaatccttggtattatggcaaagtcaccaggcatcaagcagaaatggcattaaatgaaagaggacatgaaggggatttcctcattcgtgatagtgaatcttcgccaaatgatttctcagtatcactaaaagcacaagggaaaaacaagcattttaaagtccaactaaaagagactgtctactgcattgggcagcgtaaattcagcaccatggaagaacttgtagaacattacaaaaaggcaccaatttttacaagtgaacaaggagaaaaattatatcttgtcaagcatttatcatgatactgctgaccagaagtgactgctgtgtagctgtaatttgtcatgtaattgaagactgagaaaatgttgggtccagtcgtgcttgattggaaattgttgtttctaaatctatatgagaattgacaataagtatttttattataactcagcccatacatatatactatgtatgcagtgcatctgcatagaacagttccttatccttggccttctgttttattgtttttttctttgctgttttccctttgcttctaatattacagttttgtattttgtaaacaaaaatcaaataatgcatatcagaatctttatatggaagaaatcctttattgcctttcctttgtttccttgtaaaggcaccctgttctgttatggtttttcattatataaaattattatatctatatatgacatatgctaaaatttcttggagagtgttaatcttttctgtgactaaatagcaataataagtggaaaattagaaattatttccaggtattatatttgtcacaggccattgtaaataccaagtatattgtgtctgccataatttttaaaaatacattcattgtcttcagtcatacagcaagacacatgagacatagattagaaaacatgttgtacaattttaatttacaactgttggaaataaaaatcacttaatttttttcca

SEQ ID NO: 111039 - DNA, 571 bp, Artificial Sequence
  derived and/or modified sequence
gcggcggcggcggagcgcaggcctcgtgccgttacggccatcacggcggccgcagtggcgtcctggagccctcctcaggtgagctggagctgcccggctcggcagcgggaagagatagggtctcactgtgttgttcagactggttttgaattcctggcctcaaacgatcctcccaccttggcttctcaacgtgctgggattatagggtgctgaagctgctgaaagatggcagaagaagtggtggtagtagccaaatttgattatgtggcccaacaagaacaagagttggacatcaagaagaatgagagattatggcttctggatgattctaagtcctggtggcgagttcgaaattccatgaataaaacaggttttgtgccttctaactatgtggaaaggaaaaacagtgctcggaaagcatctattgtgaaaaacctaaaggataccttaggcattggaaaagtgaaaagaaaacctagtgtgccagattctgcatctcctgctgatgatagttttgttgacccaggggaacgtctctatgacctcaacatgcccgcttatgtgaaattta

SEQ ID NO: 111040 - DNA, 587 bp, Artificial Sequence
  derived and/or modified sequence
aagagctacgcggcggcggcggagcgcaggcctcgtgccgttacggccatcacggcggccgcagtggcgtcctggagccctcctcagagatagggtctcactgtgttgttcagactggttttgaattcctggcctcaaacgatcctcccaccttggcttctcaacgtgctgggattatagggtgctgaagctgctgaaagatggcagaagaagtggtggtagtagccaaatttgattatgtggcccaacaagaacaagagttggacatcaagaagaatgagagattatggcttctggatgattctaagtcctggtggcgagttcgaaattccatgaataaaacaggttttgtgccttctaactatgtggaaaggaaaaacagtgctcggaaagcatctattgtgaaaaacctaaaggataccttaggcattggaaaagtgaaaagaaaacctagtgtgccagattctgcatctcctgctgatgatagttttgttgacccaggggaacgtctctatgacctcaacatgcccgcttatgtgaaatttaactacatggctgagagagaggatgaattatcattgataaag

SEQ ID NO: 111041 - DNA, 1134 bp, Artificial Sequence
  derived and/or modified sequence
atggccgaggaggtggtggtggtggccaagttcgactacgtggcccagcaggagcaggagttagatattaagaagaatgagagattatggctcttggacgatagtaagagttggtggagggtcagaaacagcatgaataaaaccggctttgtcccctcgaactacgtcgagaggaaaaactcagcacggaaggcctcgatcgtgaagaacctcaaggacacccttggcatcggaaaggtgaagagaaaaccgtccgtgcccgatagcgcctcgccggcggacgactctttcgtggacccgggggaacggctgtacgatttaaatatgcctgcatacgtaaagttcaattacatggcagaacgggaagatgagctgtcccttataaaaggcactaaggttatagtcatggagaagtgcagcgacggatggtggcggggctcctacaacgggcaggtgggctggtttccgagtaattatgtaactgaagagggcgactcccccctgggcgaccatgtcggcagtctaagtgaaaaactggcagcagtggttaataacctgaataccggccaggtcctccacgtggtccaggcactctatcccttcagcagctccaacgatgaggagctcaatttcgagaagggcgacgtgatggatgtgatcgaaaagcctgaaaatgatcccgagtggtggaaatgcagaaagataaacggcatggtgggtctagtcccaaagaattatgtaacggtaatgcagaataaccccctcacctccggtctcgaaccaagcccccctcagtgcgattatatacgacccagtttaaccggtaaatttgccggtaacccctggtattacgggaaggtcactagacatcaggccgaaatggcattgaacgaacggggtcatgagggtgatttcttgattcgggattctgagagttcacctaacgacttttccgtctctctgaaggcacaagggaaaaataagcattttaaggtccagcttaaagagaccgtatattgcataggacagcgtaagttcagtaccatggaagagctggtagaacactacaagaaggctccaatcttcaccagtgagcaaggcgaaaagctgtacctggttaagcacctgtcctag

SEQ ID NO: 111042 - DNA, 228 bp, Artificial Sequence
  derived and/or modified sequence
atggccgaggaggtggtggtggtggccaagttcgactacgtggcccaacaggagcaagaattggatataaagaagaacgagcgattgtggttgctcgatgatagcaaatcctggtggcgagttcggaacagcatgaataagactggtttcgtgcccagtaactacgtggagaggaaaaattctgcccggaaggctagcatcgtgaagaacctcaaggatacactgtag

SEQ ID NO: 111043 - DNA, 1134 bp, Artificial Sequence
  derived and/or modified sequence
atggccgaggaggtggtggtggtggccaagttcgactacgtggcccagcaagagcaggagctggatattaagaagaacgagcgtttgtggctgctcgacgattcaaagagttggtggcgagtgagaaattccatgaacaaaaccggctttgtgccatctaattatgtggaacgcaagaattccgcccggaaggcttccatagttaagaacctgaaagacactctgggcattggtaaggtgaagaggaaaccttccgtgcctgactctgctagtcccgccgacgactcattcgtcgatcctggcgaaagactgtatgacctgaatatgccggcatacgtcaagtttaactatatggccgaacgggaggatgaactgtccctcatcaaaggcactaaggtgatagtgatggagaaatgctctgacggatggtggaggggatcttataacggtcaagtaggctggtttccaagtaactacgtcactgaggagggcgatagcccactgggggatcatgtgggatctttatctgaaaagttggccgcagtagtcaataacctgaacaccggccaggttttgcatgtcgtacaggccctctacccgtttagctcatccaatgatgaagagcttaactttgagaaaggcgacgtgatggacgtgatcgaaaagccagagaatgatccggaatggtggaagtgcagaaagatcaacggcatggttggtctcgtgcccaaaaattacgttaccgtgatgcagaacaaccctctcacgagcgggttagaaccttcacccccgcagtgcgactacatccgacctagccttacaggcaagtttgctgggaatccttggtactatggaaaggtcaccaggcatcaggccgaaatggcgctcaatgaacgcggtcatgagggggacttcctgattcgagacagcgaatcaagtccaaacgacttcagtgtcagcctaaaggctcagggtaaaaataagcacttcaaagtgcaactcaaagagactgtgtattgcatcggccagcgaaagttttcgacaatggaggagctggttgagcactacaaaaaggcccctatcttcacctcagaacagggcgagaagctctatctggtaaagcatttgtcatag

SEQ ID NO: 111044 - DNA, 348 bp, Artificial Sequence
  derived and/or modified sequence
atggccgaggaggtggtggtggtggccaagttcgactacgtggcccaacaggagcaagagctagatataaaaaagaatgagagattgtggcttctggacgactcgaaaagctggtggcgcgttcgaaactccatgaacaaaaccggatttgtgccctctaattatgttgagcggaagaactccgctaggaaggctagtatcgtgaaaaatttgaaggacacgctcggtatcggaaaggttaaaaggaagcctagcgtccccgatagcgcatcccctgctgacgattcctttgtcgaccccggtgaacgactgtacgacctgaacatgcctgcctatgttaagttttag

SEQ ID NO: 111045 - DNA, 390 bp, Artificial Sequence
  derived and/or modified sequence
atggccgaggaggtggtggtggtggccaagttcgactacgtggcccagcaggagcaggagttggacatcaaaaagaacgaacgactctggctcctggacgactcaaaaagttggtggagagtcagaaacagcatgaacaaaacaggattcgtgcccagcaattacgtggagcgaaaaaactccgctcggaaagcatcaatcgtgaagaatctgaaggatacccttggaattgggaaagtcaagagaaagccatctgttcccgattctgctagccccgcagacgatagtttcgtggaccctggggagcgtctctatgatctgaacatgcccgcctatgtaaagttcaattacatggccgagagagaggacgagctgagcctcataaagtag

SEQ ID NO: 111046 - DNA, 1134 bp, Artificial Sequence
  derived and/or modified sequence
atggccgaggaggtggtggtggtggccaagtttgactacgtggcgcaacaggagcaggaactcgatattaagaagaacgagcgcctctggctgctggacgactcaaaatcgtggtggagggtaaggaacagtatgaacaagacaggatttgtaccctctaattatgtcgagcgtaaaaacagcgctagaaaggccagtattgttaaaaatcttaaagatactctcggtattggtaaggtgaagcggaaaccctccgtgcccgacagtgcatcccccgctgacgacagctttgtcgatcctggcgagagactatatgacctgaatatgccagcgtacgttaagttcaattacatggccgagcgcgaagatgaactgagccttataaagggcactaaggttatcgtcatggagaagtgttctgatggatggtggcgaggatcctataacgggcaggtgggttggttcccctctaactacgtaacagaggagggagactcaccactgggtgaccatgtggggagtctatcggaaaaacttgccgctgtggtgaacaacttgaacaccggccaggtgctccacgtggtgcaggccctgtacccattttccagcagcaacgacgaagaactgaatttcgagaagggcgatgtgatggatgtgatcgagaaacctgaaaatgatccagagtggtggaaatgtcgcaagatcaacggaatggtgggtctggtgcctaagaattacgtgacagtcatgcagaacaatcctctcacatcaggactggagcctagcccccctcagtgcgactacatacggccttccctgactggtaaatttgctggaaacccatggtactacggtaaggtaaccaggcaccaggctgagatggctctaaatgagcgcggacatgaaggagattttctcatacgagatagcgagagcagtcccaacgattttagcgtatccctcaaggcacagggcaagaataaacactttaaagtacagctcaaggagaccgtctactgtatcggccagagaaagttttccaccatggaggaactggtagaacactacaagaaagctcctattttcacctcagagcaaggggagaagctgtacctagtcaagcacctatcatag

SEQ ID NO: 111047 - DNA, 228 bp, Artificial Sequence
  derived and/or modified sequence
atggcagaggaagtcgtggtagtagctaagttcgactacgtggctcaacaagagcaggagctcgacataaagaaaaacgaaaggctttggctgttggatgactcaaaaagctggtggagggtcaggaacagtatgaataaaaccgggttcgtgcctagcaactacgtcgaaaggaagaattccgcacggaaggccagcattgtcaagaacctcaaagataccctgtag

SEQ ID NO: 111048 - DNA, 1134 bp, Artificial Sequence
  derived and/or modified sequence
atggctgaagaagtggttgttgtcgctaagtttgactacgtcgcccaacaggagcaggagttagacatcaaaaaaaatgagcgattatggttgcttgacgacagcaagtcatggtggcgcgtcaggaactcaatgaacaagacaggctttgtcccttcaaattacgtcgagcgaaaaaatagcgccagaaaggcttccattgtgaagaatcttaaggacactctagggattgggaaggtgaagagaaagccctctgtgccggatagcgcgtcaccagcagatgatagcttcgtggatccgggagagagactgtacgatttgaatatgcccgcttacgtcaagttcaactatatggcagaacgcgaggacgaactctccctcatcaaagggacaaaggtgatcgtaatggaaaagtgttccgatggatggtggcgcggatcgtacaatggccaagttggatggtttccatccaactacgtaaccgaggaaggcgacagcccactgggagatcacgtaggttcattgtctgaaaaactggcagctgttgtaaataatctgaacacgggccaagtgctgcacgttgtgcaggctttgtacccattctctagctcaaatgatgaagaattgaatttcgaaaaaggcgacgttatggacgtgatcgaaaagcccgagaacgacccagagtggtggaagtgtaggaaaatcaatggaatggtggggttggtcccaaaaaactacgtaactgtcatgcaaaataatccactgacgagtggcttagaacctagtcctccacagtgtgattacattagaccctctctcaccggtaaatttgctggaaatccctggtactacggcaaggtcaccaggcatcaggctgagatggccctcaatgagagaggacacgagggggattttctcatacgggatagcgagagcagccctaacgacttcagcgtgtcattaaaagcccagggtaagaataagcattttaaggtacagttgaaggagacggtgtactgtattggacagaggaagtttagtactatggaagaactcgttgaacactataagaaagctccgatcttcacaagcgagcaaggggagaaactctaccttgtaaaacatctatcctag

SEQ ID NO: 111049 - DNA, 348 bp, Artificial Sequence
  derived and/or modified sequence
atggccgaagaggtggtagtggtcgccaagtttgactacgtggcacagcaagagcaagagcttgacattaaaaaaaatgaacgcctgtggctcctggacgatagcaagtcatggtggcgggtgaggaattccatgaataagacagggttcgttcctagcaactatgtagagaggaaaaatagtgcacggaaagctagcattgtgaagaatttgaaagatacgttgggcatcgggaaagtgaagaggaagccttccgtgcctgatagtgcttcaccagcggatgattcatttgtggaccctggcgaaaggctttacgatttaaatatgcccgcatacgtgaagttttag

SEQ ID NO: 111050 - DNA, 390 bp, Artificial Sequence
  derived and/or modified sequence
atggctgaagaagttgtggtggtagcaaaattcgattatgtggctcaacaagagcaagaactcgatattaagaagaacgaacgactctggctgcttgacgactcaaagtcgtggtggagagttcggaatagcatgaataagactggctttgtgcccagtaactacgttgagagaaaaaattccgcccgaaaggcaagcatcgtgaaaaatctcaaggatacattgggtatcgggaaggtgaagaggaaaccttcagtgccggattccgcctctcctgccgacgacagtttcgtcgaccctggggagcggctgtatgaccttaacatgccagcttacgttaagtttaattacatggcagagcgcgaagacgaacttagcctgatcaagtag

SEQ ID NO: 111051 - DNA, 1101 bp, Artificial Sequence
  derived and/or modified sequence
atggattacagagtcaacattttcctccgccagcagtggaatgaccccaggctcgcatacaacgagtatcctgacgatagcctggatctagacccaagcatgttagacagtatttggaaacctgatctgttcttcgccaatgagaaaggagcacactttcacgaaattaccacagacaataaactcctgaggatctctagaaacggaaatgtcttgtactccatccgaattactttgacgctggcttgtccaatggatcttaaaaatttccccatggacgtgcagacatgtataatgcagcttgagagctttggctacactatgaacgacttgatctttgagtggcaggagcaaggtgcagtccaagtggctgacggattgacactcccacagttcatcctgaaggaagagaaagatctgcggtattgtacaaagcattacaacaccggtaaattcacgtgcatcgaagcacggttccatctggagagacaaatggggtattacctgattcagatgtatatcccctcccttctgattgtgattttgtcttggatctctttttggatcaacatggacgcggcacccgctagggttggactgggcatcacaacagtgttaacaatgacgacccagtccagcggaagccgagcttctctgcctaaggtatcttatgtaaaggccatcgacatctggatggcggtatgcctgctgtttgtcttctccgcccttcttgaatacgctgctgtgaatttcgtctcccggcagcacaaggaactgcttaggttccgccggaagaggcgtcatcacaaagaagacgaagctggcgaaggacgcttcaattttagtgcttacggcatggggccagcctgcctgcaagcaaaagatggaatttcagtcaaaggcgctaataactctaacacaacaaaccctcctcccgctccatcgaagtcaccggaggagatgcgtaagttatttattcagagggccaagaaaattgacaaaatatcacggatcggatttccaatggcctttctgatctttaatatgttctactggatcatttataaaatcgttcgcagggaggacgtccataaccagtag

SEQ ID NO: 111052 - DNA, 1101 bp, Artificial Sequence
  derived and/or modified sequence
atggactacagagtgaacatcttcctgcggcagcagtggaatgacccccggctggcctacaatgagtacccagatgacagcctggacctggaccccagcatgctggacagcatctggaagccagacctcttctttgccaatgaaaaaggagcccacttccacgagatcaccacagacaacaagctgctgcgcatcagcagaaatggaaatgtgctgtacagcatccgcatcaccctgaccctggcctgccccatggacctgaagaacttccccatggatgtgcagacctgcatcatgcagctggagagctttggctacaccatgaatgacctgatctttgagtggcaggagcagggcgctgtgcaggtggctgatggcctgaccctgccccagttcatcctgaaggaggagaaggacctgcgctactgcaccaagcactacaacacaggcaagttcacctgcatcgaggcccgcttccacctggagcggcagatgggctactacctgatccagatgtacatccccagcctgctgattgtcatcctgtcctggatctccttctggatcaacatggatgctgccccagcccgggtgggcctgggcatcaccaccgtgctgaccatgaccacccagagcagcggcagccgggccagcctgcccaaggtgtcctatgtgaaggccatcgacatctggatggctgtgtgcctgctgtttgtgttttctgccctgctggagtatgctgctgtgaactttgtgtcccggcagcacaaggagctgctgcgcttccggaggaagaggaggcaccacaaggaggatgaggccggggagggccgcttcaacttcagcgcctacggcatgggccctgcctgcctgcaggccaaggatggcatctctgtgaagggggccaacaacagcaacaccaccaaccccccaccagcccccagcaagagccctgaggagatgaggaagctgttcatccagagggccaagaagattgacaagatcagccgcatcggcttccccatggccttcctgatcttcaacatgttctactggatcatctacaagatcgtgagaagagaagatgtgcacaaccagtag

SEQ ID NO: 111053 - DNA, 1101 bp, Artificial Sequence
  derived and/or modified sequence
atggactaccgggtgaacatcttcctgcggcagcagtggaacgaccctcgactggcctataatgaatacccagacgacagcctggacttggacccctccatgttggatagcatttggaagccagacctgtttttcgctaatgaaaagggagcccacttccacgagatcactactgacaataaactgctgaggataagccgaaacgggaacgtgctatactcaatccggatcaccttaacgctggcctgcccgatggacctcaagaattttcccatggatgtgcagacctgtattatgcagttagagagttttggatatacgatgaatgatttaatttttgagtggcaggagcagggagcggttcaggtcgcagatggcctgactctcccccagttcatccttaaagaggagaaggacctccgatactgcacaaaacattataacactggcaaattcacttgcatagaagccagatttcacttggagaggcagatggggtattatttaatacagatgtacatccctagtctgctcatcgttatactgagctggatctccttctggattaacatggacgcagcccccgcacgcgtgggcctggggattacaacagtactaacgatgacgacccagtcgagtggctctagggccagcttacctaaagtctcatatgttaaggccatcgacatatggatggcggtttgcctgcttttcgtgttcagtgccttgctcgagtacgccgctgtcaattttgtatcccggcagcacaaagaactgcttcgtttccgcagaaaacggcgccatcataaagaggatgaggctggggaggggcggttcaatttttctgcatacgggatgggacctgcttgtcttcaggccaaggacggcatctctgtcaaaggtgccaacaattctaatactactaatcctcctccagccccctccaaatctcccgaggagatgcggaagctcttcatccagcgtgccaaaaaaatagacaagatttcccggattggcttccctatggcctttctgatcttcaatatgttttactggattatctacaaaattgtgcgaagggaggacgtccacaatcaatag

SEQ ID NO: 111054 - DNA, 1101 bp, Artificial Sequence
  derived and/or modified sequence
atggactacagagtcaacattttcctgaggcagcagtggaatgaccctcggttagcctacaacgaataccccgacgattcccttgacctcgacccctccatgctcgactctatctggaaacccgacctctttttcgccaatgaaaagggagcccactttcatgagatcacaactgacaataagctcctgcgcatctcccggaacggcaacgtgctttattctatccgtataactctcaccttagcttgtcctatggacttaaaaaatttccccatggacgtacagacctgtattatgcagttggagagtttcggctataccatgaatgatctgatctttgagtggcaagagcagggtgccgtccaagtggccgacggactcaccttgccgcaattcatcctgaaggaggagaaggaccttagatactgtactaaacactacaacactggaaagttcacatgcatcgaagcaagatttcacctggagagacaaatgggctattacctgatccagatgtacattccatctttattgatcgtgattctgtcttggattagcttttggattaatatggacgccgcaccagcccgagtggggctgggaatcacaactgtcctgaccatgaccacgcagtcaagcggttcaagagcgtcgcttcctaaggtgtcatacgtgaaagctatcgacatatggatggcagtgtgtctgctgtttgtgttttctgccctgctggagtacgctgctgttaacttcgtgagcagacagcacaaagaactcctgagatttcgaagaaaaagacggcatcacaaggaggatgaggcaggagaaggaaggttcaacttctcagcctatgggatgggccctgcctgcctccaggcaaaagacggaatttctgtcaagggcgcaaataatagtaatacgacaaaccctcctccggctcccagcaagtctccagaggagatgaggaagctcttcatccaacgcgctaagaagattgataagatcagcagaatcggcttccctatggccttccttatcttcaacatgttttactggataatatacaagattgtccggcgtgaggatgtgcacaaccagtag

SEQ ID NO: 111055 - DNA, 1101 bp, Artificial Sequence
  derived and/or modified sequence
atggattatcgtgtcaatatctttctccggcagcaatggaacgatcccaggctggcatacaatgagtacccggacgattctctcgacttggatcccagcatgctcgactctatctggaaacccgacttgttttttgcaaacgaaaaaggagctcactttcacgaaatcacaactgacaacaagctgctccgtattagtcgcaacggtaatgtgctgtattccatcaggatcacactcacgctcgcttgtcctatggatctgaagaattttcctatggacgtccagacgtgcataatgcagcttgaaagtttcggatacactatgaacgatttaattttcgagtggcaggagcaaggtgctgtgcaggtcgcagacggattaaccctgccgcagtttatcctgaaagaggaaaaagacctgcgctattgcactaagcactataacacgggtaaatttacctgtatcgaggccagattccacttggaaagacaaatgggctattacctgatacagatgtatattcctagtctcttaattgtgatcttaagctggatatcattctggataaacatggatgccgccccagcgcgcgttggactggggatcacaactgtacttaccatgacgacccaatcaagtggatcccgcgcctctttgcctaaagtgagctatgtcaaagcaatagatatctggatggcagtgtgtctcctcttcgtctttagtgccctcttggaatacgcggccgtaaactttgtgagccggcagcataaggaacttctgagattccggagaaaacggcgccatcataaggaagatgaggccggcgaagggaggtttaatttctctgcttacgggatgggccctgcatgtctgcaagcaaaggacggaatctccgtcaaaggagccaacaactctaacaccacaaatcccccaccagccccctcaaagtccccagaggagatgcgtaagctgttcattcagcgcgcaaagaagatagacaaaatttcaagaatcggctttcccatggcatttctgattttcaacatgttttactggatcatttataaaatagttaggcgcgaggacgtacataatcagtag

SEQ ID NO: 111056 - DNA, 1101 bp, Artificial Sequence
  derived and/or modified sequence
atggactatcgcgtcaatatctttcttcggcagcagtggaatgatcctcgattggcctacaatgaatatcccgacgactctcttgacttagatccctctatgttagatagcatctggaaaccggacctttttttcgcaaacgaaaagggcgcacattttcatgagattactaccgacaataaattactgcgaattagtcgcaatggtaatgtcctttactccatccgaataactctgacactcgcttgccccatggacttaaagaacttccctatggacgtgcagacctgtataatgcagctggagtcttttggatatactatgaatgatctgatcttcgaatggcaagaacagggcgcagtgcaagttgctgacgggctgacattgcctcagttcatcctcaaagaagagaaagatctacggtactgtaccaagcattataacacagggaaatttacatgcatagaggcccggtttcacctcgaacggcagatgggctactacctcatccagatgtacatccctagcctcttgattgtcatccttagttggatttctttttggatcaacatggacgccgccccagctcgcgtgggtctgggcattaccaccgtactgacgatgactacacagagcagcggatcaagagccagcctgcccaaggtctcgtatgtgaaagccatcgatatttggatggcagtttgtctcttgtttgttttctccgctctactagaatacgctgccgtgaatttcgtgtcaaggcaacacaaagagctgctcaggttcaggcgcaaacggaggcatcacaaagaagatgaagccggtgaaggacgcttcaacttctcagcttacggaatgggccctgcgtgcttacaggctaaggacggtatttcagtgaaaggcgccaacaactcaaacactaccaaccctccacccgctccgtccaagtcacctgaagagatgagaaaactctttatccagagggcaaaaaaaatcgacaaaatctctagaatagggttccctatggcatttctgatcttcaacatgttctactggatcatttacaaaatagtcagaagagaagacgtacacaaccaatag

SEQ ID NO: 111057 - DNA, 1101 bp, Artificial Sequence
  derived and/or modified sequence
atggactacagagtgaacatcttcctgagacagcagtggaacgaccccagactggcctacaacgagtaccccgacgacagcctggacctggaccccagcatgctggacagcatctggaagcccgacctgttcttcgccaacgagaagggcgcccacttccacgagatcaccaccgacaacaagctgctgagaatcagcagaaacggcaacgtgctgtacagcatcagaatcaccctgaccctggcctgccccatggacctgaagaacttccccatggacgtgcagacctgcatcatgcagctggagagcttcggctacaccatgaacgacctgatcttcgagtggcaggagcagggcgccgtgcaggtggccgacggcctgaccctgccccagttcatcctgaaggaggagaaggacctgagatactgcaccaagcactacaacaccggcaagttcacctgcatcgaggccagattccacctggagagacagatgggctactacctgatccagatgtacatccccagcctgctgatcgtgatcctgagctggatcagcttctggatcaacatggacgccgcccccgccagagtgggcctgggcatcaccaccgtgctgaccatgaccacccagagcagcggcagcagagccagcctgcccaaggtgagctacgtgaaggccatcgacatctggatggccgtgtgcctgctgttcgtgttcagcgccctgctggagtacgccgccgtgaacttcgtgagcagacagcacaaggagctgctgagattcagaagaaagagaagacaccacaaggaggacgaggccggcgagggcagattcaacttcagcgcctacggcatgggccccgcctgcctgcaggccaaggacggcatcagcgtgaagggcgccaacaacagcaacaccaccaaccccccccccgcccccagcaagagccccgaggagatgagaaagctgttcatccagagagccaagaagatcgacaagatcagcagaatcggcttccccatggccttcctgatcttcaacatgttctactggatcatctacaagatcgtgagaagagaggacgtgcacaaccagtag

SEQ ID NO: 111058 - DNA, 915 bp, Artificial Sequence
  derived and/or modified sequence
atgatcaccagcgagaccggcaaggccctgatccagacctgcctgaacagccccgacagcccccccagaagcgaccccaccaccgaccagagaatgagcgccaccggcttcgaggagaccgacctgacctaccaggtgagcgagagcgacagcagcggcgagaccaaggacaccctgaagcccgccttcaccgtgaccaacctgcccggcaccaccagcaccatccagaccgcccccagcaccagcaccaccatgcaggtgagcagcggccccagcttccccatcaccaactacctggcccccgtgagcgccagcgtgagccccagcgccgtgagcagcgccaacggcaccgtgctgaagagcaccggcagcggccccgtgagcagcggcggcctgatgcagctgcccaccagcttcaccctgatgcccggcggcgccgtggcccagcaggtgcccgtgcaggccatccaggtgcaccaggccccccagcaggccagccccagcagagacagcagcaccgacctgacccagaccagcagcagcggcaccgtgaccctgcccgccaccatcatgaccagcagcgtgcccaccaccgtgggcggccacatgatgtaccccagcccccacgccgtgatgtacgcccccaccagcggcctgggcgacggcagcctgaccgtgctgaacgccttcagccaggcccccagcaccatgcaggtgagccacagccaggtgcaggagcccggcggcgtgccccaggtgttcctgaccgccagcagcggcaccgtgcagatccccgtgagcgccgtgcagctgcaccagatggccgtgatcggccagcaggccggcagcagcagcaacctgaccgagctgcaggtggtgaacctggacaccgcccacagcaccaagagcgagtag

SEQ ID NO: 111059 - DNA, 915 bp, Artificial Sequence
  derived and/or modified sequence
atgatcacctctgaaactggcaaggccctgatccagacctgtctgaactcgcccgattcaccacctcggagcgatccgacaaccgatcaacggatgagcgcaaccggcttcgaagagacagacctgacataccaagtctcagaaagtgactcctctggcgaaactaaggataccttgaagcccgcgtttactgtcacgaacctcccgggcacaacctctaccattcagaccgcaccctcaactagcaccactatgcaggtcagtagtggccctagtttccctatcaccaactatttggctccagtgtccgcaagtgtcagcccgtccgccgtgtccagcgccaacgggaccgtgttgaaatctactggatcaggccccgtcagctctggaggtttgatgcaattgcccacctccttcacgctcatgccagggggtgctgtggcacaacaggttccagtgcaggcgatccaggtccatcaggcgccccaacaggcctctcccagcagagatagttctaccgatctcacgcagactagtagctctgggaccgtaacattgcccgcaaccataatgacctcaagcgtacccaccactgttggtggacatatgatgtaccctagcccccatgcagtgatgtatgctcctactagcggacttggggacggctcactaactgtgctgaacgcgttcagtcaagcaccgtcaacgatgcaggtgagccactcacaggtgcaggagcctgggggagtcccccaagtctttcttaccgcatcttcaggaaccgttcagatcccagtgtccgccgtgcagctgcaccagatggctgttatcggccaacaggccggatccagctccaatttgacagagcttcaggttgtcaacctggatacagctcactcaacgaaatcagagtag

SEQ ID NO: 111060 - DNA, 915 bp, Artificial Sequence
  derived and/or modified sequence
atgatcaccagcgagaccgggaaggccctgatccagacctgcctgaacagcccagacagccccccaagaagtgaccccaccacagaccagaggatgtctgccactggatttgaggagacagacctgacctaccaggtgtctgagagtgacagcagcggggagaccaaggacaccctgaagccagccttcaccgtgaccaacctgcccggcaccaccagcaccatccagacagcccccagcaccagcaccaccatgcaggtgagcagcggccccagcttccccatcaccaactacctggcccctgtgtctgcctctgtgagccccagcgctgtgtcctctgccaatggaacagtgctgaagagcacaggcagcggccctgtgtcctctgggggcctgatgcagctgcccaccagcttcaccctgatgcctggaggagctgtggcccagcaggtgcctgtgcaggccatccaggtgcaccaggccccccagcaggccagccccagccgggacagcagcacagacctgacccagaccagcagcagcggcaccgtgaccctgcctgccaccatcatgaccagctctgtgcccaccaccgtgggcggccacatgatgtaccccagcccccatgctgtgatgtatgcccccaccagcggcctgggagatggcagcctgactgtgctgaatgccttcagccaggcccccagcaccatgcaggtgagccacagccaggtgcaggagcctggaggagtgccccaggtgttcctgacagccagcagcggcaccgtgcagatccctgtgtctgctgtgcagctgcaccagatggctgtgattggccagcaggccggcagcagcagcaacctgacagagctgcaggtggtgaacctggacacagcccacagcaccaagtctgagtag

SEQ ID NO: 111061 - DNA, 915 bp, Artificial Sequence
  derived and/or modified sequence
atgatcaccagcgagaccggcaaggccctgatccagacctgcctgaactcacccgactcaccgccacgctccgacccaaccactgaccagcgaatgtcagccacagggtttgaggaaacagacctaacctatcaggtgagcgagagtgatagttctggcgaaacaaaggataccctgaagccagcctttactgtcaccaacttaccgggaactacatctaccattcaaacagccccaagcacatctaccacaatgcaggtttcctcgggtccaagcttccccattaccaactacctggcgccggtgtccgctagtgtcagtccctccgctgtgtctagcgccaacggaaccgtcctcaaaagcacgggtagcggacctgtgtcttccggaggtcttatgcagttgcctacctcattcacgctcatgccagggggcgcagtggcacagcaggtgccagtccaggctatccaggtccaccaggccccacagcaagcttcgcccagtagagatagttcaacagacctaacacagacgtcttcatcaggaactgtcacactccccgcaaccattatgacctcttcagtgcctactaccgtgggtgggcacatgatgtacccctctccccatgctgtgatgtatgctccaacctcagggttaggggacggtagtctaaccgttcttaatgccttctcccaagccccttccaccatgcaggtttcccactcccaggtgcaagagcccggaggcgtcccccaagtttttctcaccgcatcctccggtaccgtgcagattccagtgtccgcagtccagttacaccagatggccgtgatcgggcaacaggcaggatcctcaagcaatctaactgagctccaggtggtcaacttagataccgctcattcaacaaagtctgagtag

SEQ ID NO: 111062 - DNA, 915 bp, Artificial Sequence
  derived and/or modified sequence
atgatcacatctgagaccggcaaagctctcatccagacgtgtctgaattcaccagactctccccctagaagtgacccaacaacagaccagcggatgagcgccacaggatttgaggaaaccgacctaacataccaggtgagcgagagcgatagctccggagaaacgaaggacaccttgaagccagccttcactgtcactaatctgcccggtacgaccagcactatccaaacagcgccatctacctctaccactatgcaggtgtcctctggtccaagtttccctataacaaattacctggctccggtcagtgctagcgtgtctcctagtgctgtatcgagcgccaatggcaccgtgcttaagtcaaccgggtctggccctgtgagctccgggggactgatgcagttgcctacctcttttactttgatgcctggaggggctgtggcacagcaggttcctgtgcaagctatccaggtgcaccaagcaccgcagcaggcgtctccctccagagattcctccaccgatctaactcagaccagctcgtccggcaccgtgacactccccgcaacgattatgacttcctccgtgccgacaacagtgggtggccacatgatgtatccttctcctcacgccgtaatgtatgcaccaacctcaggcttgggagatgggtctctgactgttctgaacgccttttcccaggctccaagcacaatgcaggtcagtcacagccaggttcaagagcccggaggggttccacaagtctttttgacggcctccagcggtacagtacaaatccctgtttctgccgtacaactccaccagatggcagttattggacaacaggctggatcaagttctaatttaaccgagctgcaagtagtgaaccttgacaccgcacattcaaccaaaagtgaatag

SEQ ID NO: 111063 - protein, 260 aa, Artificial Sequence
  derived and/or modified sequence
MPQWNVTSVRGKTKCMMKSSDCVIKHAGVYSTGLAMVGAICDFCEAWVCHGRKCLSTHACACPLTDAECVECERGVWDHGGRIFSCSFCHNFLCEDDQFEHQASCQVLEAETFKCVSCNRLGQHSCLRCKACFCDDHTRSKVFKQEKGKQPPCPKCGHETQETKDLSMSTRSLKFGRQTGGEEGDGASGYDAYWKNLSSDKYGDTSYHDEEEDEYEAEDDEEEEDEGRKDSDTESSDLFTNLNLGRTYASGYAHYEEQEN

SEQ ID NO: 111064 - DNA, 783 bp, Artificial Sequence
  derived and/or modified sequence
atgccccagtggaacgtgaccagcgtgagaggcaagaccaagtgcatgatgaagagcagcgactgcgtgatcaagcacgccggcgtgtacagcaccggcctggccatggtgggcgccatctgcgacttctgcgaggcctgggtgtgccacggcagaaagtgcctgagcacccacgcctgcgcctgccccctgaccgacgccgagtgcgtggagtgcgagagaggcgtgtgggaccacggcggcagaatcttcagctgcagcttctgccacaacttcctgtgcgaggacgaccagttcgagcaccaggccagctgccaggtgctggaggccgagaccttcaagtgcgtgagctgcaacagactgggccagcacagctgcctgagatgcaaggcctgcttctgcgacgaccacaccagaagcaaggtgttcaagcaggagaagggcaagcagcccccctgccccaagtgcggccacgagacccaggagaccaaggacctgagcatgagcaccagaagcctgaagttcggcagacagaccggcggcgaggagggcgacggcgccagcggctacgacgcctactggaagaacctgagcagcgacaagtacggcgacaccagctaccacgacgaggaggaggacgagtacgaggccgaggacgacgaggaggaggaggacgagggcagaaaggacagcgacaccgagagcagcgacctgttcaccaacctgaacctgggcagaacctacgccagcggctacgcccactacgaggagcaggagaactag

SEQ ID NO: 111065 - DNA, 783 bp, Artificial Sequence
  derived and/or modified sequence
atgcctcagtggaacgttacttccgtcaggggcaagactaagtgtatgatgaaaagtagcgactgtgtcatcaagcacgccggggtgtacagtaccggcctcgccatggtaggcgctatttgcgacttctgtgaggcatgggtgtgtcacggacgaaagtgtttgtcaacccatgcttgcgcatgccctctcaccgacgctgaatgcgtagagtgcgaaagaggcgtatgggaccacggcggcaggattttctcttgctctttctgccataattttctatgcgaagatgaccaattcgagcaccaagcctcctgtcaggtgctcgaggcggagacgttcaagtgtgtgtcctgcaacaggctagggcagcattcttgtttaagatgtaaggcctgtttctgtgatgatcacacaaggtctaaagtatttaagcaggagaaaggtaaacagcctccttgtccaaaatgcggacacgagacacaggagaccaaagaccttagcatgtctacacgatcgctaaaatttggtcgccaaactgggggcgaagagggggacggtgccagtggctatgacgcttactggaaaaacctgtctagtgacaagtatggcgatacatcctatcatgacgaggaggaggatgagtacgaagccgaggatgatgaagaagaggaggatgaaggccgtaaggactctgatactgaatcatctgacctcttcactaatctgaatttaggcagaacctatgcaagcggctacgcccactacgaagaacaagagaattag

SEQ ID NO: 111066 - DNA, 783 bp, Artificial Sequence
  derived and/or modified sequence
atgccccagtggaatgtgacctctgtgcggggcaagaccaagtgcatgatgaagagcagtgactgtgtgatcaagcatgctggggtgtacagcacaggcctggccatggtgggcgccatctgtgacttctgtgaggcctgggtgtgccacggcaggaagtgcctgagcacccacgcctgtgcctgccccctgacagatgctgaatgtgtggagtgtgagcggggcgtgtgggaccatggaggccgcatcttcagctgcagcttctgccacaacttcctgtgtgaagatgaccagtttgagcaccaggccagctgccaggtgctggaggccgagaccttcaagtgtgtgtcctgcaaccggctgggccagcacagctgcctgcgctgcaaggcctgcttctgtgatgaccacaccaggagcaaggtgttcaagcaggagaagggcaagcagcccccctgccccaagtgtggccacgagacccaggagaccaaggacctgtccatgagcaccaggagcctgaagtttggccggcagacaggaggagaggagggagatggagccagcggctatgatgcctactggaagaacctgagcagtgacaagtacggggacaccagctaccatgatgaggaggaggatgaatatgaagcagaagatgatgaggaggaggaggatgagggcaggaaggacagcgacacagagagcagtgacctcttcaccaacctgaacctgggccgcacctacgccagcggctacgcccactatgaggagcaggagaactag

SEQ ID NO: 111067 - DNA, 783 bp, Artificial Sequence
  derived and/or modified sequence
atgccccagtggaacgtgaccagcgtgcggggcaagaccaagtgcatgatgaaatctagcgactgtgttattaagcacgccggggtgtactctacagggctcgctatggtgggcgctatttgcgacttttgtgaggcctgggtttgtcacggtaggaagtgcctgtccacccacgcatgcgcctgtcccctgacagatgctgaatgcgtggagtgcgagcggggggtgtgggatcacggagggcgtatcttctcctgttcattctgtcataatttcctgtgcgaagacgaccagtttgagcaccaggctagctgccaggtcttagaggctgagacgtttaagtgcgtgtcctgcaatagactcggccaacacagctgtttacggtgtaaggcctgcttttgtgatgatcatactaggagtaaagtctttaagcaggagaaaggtaagcaacccccctgtccgaagtgcgggcacgaaacccaagaaactaaggacctgtcaatgtccacacggagcttaaagttcggccgacaaacagggggtgaagaaggggacggtgccagcggctacgatgcgtactggaagaacctgagcagcgacaaatatggggacaccagctatcatgacgaagaagaggacgagtacgaagccgaagatgatgaagaggaggaggacgaagggagaaaggactcagacactgaaagtagtgatctgttcaccaatctcaatctaggcaggacatatgcttcaggatacgctcattatgaggaacaggaaaactag

SEQ ID NO: 111068 - DNA, 783 bp, Artificial Sequence
  derived and/or modified sequence
atgccccagtggaacgtgacaagcgtcagggggaaaaccaaatgtatgatgaagtcaagtgattgcgtcatcaagcatgctggcgtgtatagcaccggattagccatggtgggggcaatatgtgacttctgtgaagcctgggtttgtcacggcaggaaatgcctcagcacccacgcctgtgcgtgcccccttacagacgcagagtgtgtggaatgcgagcgaggcgtctgggatcatggtggccgtattttcagctgcagcttttgccacaattttctttgcgaagacgaccaatttgagcaccaggcaagctgtcaggtgctcgaggccgaaacgttcaaatgcgtgtcttgcaataggttgggccagcactcttgtctgcggtgcaaagcatgcttctgtgacgatcacacacggagtaaagtcttcaaacaagaaaaaggaaaacagcccccttgccccaagtgtggccatgagacccaagaaacaaaagacctgtccatgagtacgcggagcctgaagtttgggagacagaccgggggtgaggaaggggatggagcatccggctatgacgcttactggaaaaatttgtccagcgataagtatggtgatactagctatcacgatgaggaggaggacgaatatgaggcagaggatgacgaagaggaggaggacgaggggaggaaagattctgacactgaatcaagcgacttattcacaaatttgaatctgggacgaacgtacgctagcggatatgcccactacgaggaacaggaaaattag

SEQ ID NO: 111069 - DNA, 1180 bp, Artificial Sequence
  derived and/or modified sequence
ggaatcggctgtcagcctccctggctgttagtaccttctttcccggagtcctggtccacgagttggatttactgctgtcgcgggtgggcctcacgccattccctgtccctcggccccctgagtgagtccggtctcccggcgaaagtgagcgaggtttgcccggagcgcgcacgaggggaaaatgcctaaaaaaaagactggtgcgaggaagaaggctgagaaccgccgagaacgtgaaaaacaactaagagcatcaagaagcactatagatttagctaaacatccatgtaatgcctcaatggaatgtgacaagtgtcagagggaaaacaaagtgcatgatgaagtcttcagactgtgtcataaagcatgctggtgtatacagtactggccttgcaatggtgggtgcaatatgtgacttctgtgaagcttgggtttgccatggtaggaaatgtctcagtacacatgcttgtgcctgccctcttaccgatgctgagtgtgttgaatgtgaacgaggcgtgtgggaccatggaggcagaatattcagttgttctttttgccataactttctctgtgaagatgatcaatttgagcatcaagccagctgccaggttttagaggcagaaacatttaaatgtgtttcatgcaatcggcttggtcagcactcatgtctccgttgtaaggcttgtttctgtgatgatcatacaaggagcaaagtgtttaagcaagaaaaaggaaaacagcctccttgtcctaaatgtgggcatgaaactcaggagactaaggaccttagcatgtcaacacgctccctgaaatttggcaggcagactggaggtgaagagggagatggagcttctgggtatgatgcttattggaagaacctttcatctgataagtatggtgataccagctaccacgatgaggaggaggatgagtatgaagcagaggatgatgaagaggaagaagatgaaggcagaaaggattcagatactgagtcatcagatttgtttactaatttgaatttaggaaggacctatgctagtggctatgctcactatgaggaacaagagaactaggggagctgctctggtggccgtgtgtgagaggagcaggagtgagtgtgtgtgcttgatgaattgtgtgtggttgttcaaaagtaccttagccacttagccttgtgcag

SEQ ID NO: 111070 - DNA, 996 bp, Artificial Sequence
  derived and/or modified sequence
atggcatttaataagtttaacgttctgcattggcatatagttgacgaccaaagtttcccttaccagagcattacttttccggaactgtccaacaagggctcatatagtctcagccacgtctacactcccaatgacgtgagaatggtcatagaatacgccagactgcgggggattagagtgctgcccgagttcgacactcccggccacaccctctcgtggggaaagggacagaaagatctactgaccccctgttatagtcgacagaataaattagattccttcgggcccataaaccccactctgaacacaacgtacagtttcttaactacattctttaaagagatttccgaggttttcccagatcaattcattcatctgggcggagacgaggtcgaatttaagtgctgggaaagcaaccctaagatacaggactttatgcgacagaaaggctttggcactgacttcaaaaaactggaatccttttatatccagaaagtcctggacatcatcgctacgataaataaaggatcaattgtttggcaggaggtattcgatgataaagcaaagcttgccccagggactatcgttgaagtttggaaggacagcgcctaccccgaagagttgagcagagtaaccgcttcaggattccccgttattctgagcgccccgtggtacctcgacctgatctcctacggacaggactggcgaaaatactacaaggtggaacccctggactttggcgggactcagaagcaaaagcaactgttcatcggcggagaggcctgtctgtggggtgagtacgtggacgctaccaacctgactcccaggctatggccaagagcctctgctgtgggggaacgattgtggagctcaaaagatgtgagggatatggacgatgcgtacgacagactgacaaggcaccgctgcaggatggtggagagagggattgcagcccagcccctgtatgcaggatattgtaaccacgagaacatgtag

SEQ ID NO: 111071 - DNA, 996 bp, Artificial Sequence
  derived and/or modified sequence
atggccttcaacaagttcaacgtgctgcactggcacatcgtggatgaccagagcttcccctaccagagcatcaccttccctgagctgagcaacaagggcagctacagcctgagccacgtgtacaccccaaatgatgtgaggatggtgattgaatatgcccggctgcggggcatccgggtgctgcctgagtttgacaccccaggccacaccctgtcctggggcaagggccagaaggacctgctgaccccctgctacagccggcagaacaagctggacagctttggccccatcaaccccaccctgaacaccacctacagcttcctgaccaccttcttcaaggagatcagcgaggtgtttcctgaccagttcatccacctgggcggagatgaggtggagttcaagtgctgggagagcaaccccaagatccaggacttcatgaggcagaagggctttggaacagacttcaagaagctggagagcttctacatccagaaggtgctggacatcatcgccaccatcaacaagggcagcatcgtgtggcaggaggtgtttgatgacaaggccaagctggcccctggcaccatcgtggaggtgtggaaggacagcgcctacccagaggagctgagccgggtgacagccagcggcttccctgtgatcctgagcgccccctggtacctggacctgatctcctatggccaggactggaggaagtactacaaggtggagcccctggactttggaggcacccagaagcagaagcagctgttcatcggcggggaggcctgcctgtggggcgagtatgtggatgccaccaacctgaccccccggctgtggccccgggccagcgctgtgggggagcggctgtggagcagcaaggatgtgcgggacatggatgatgcctatgaccggctgaccaggcaccgctgcaggatggtggagcggggcattgctgcccagcccctgtatgccggctactgcaaccacgagaacatgtag

SEQ ID NO: 111072 - DNA, 996 bp, Artificial Sequence
  derived and/or modified sequence
atggccttcaacaagttcaacgtgctgcactggcacatcgtggacgaccagtctttcccataccagagcattacattccccgagctatcgaacaaggggtcttactccctgtcgcacgtatatacacctaacgatgtcagaatggtcatcgagtatgcacgcttgaggggcatcagagtgctgcctgaattcgatacacctggccatacactgagttggggtaagggacagaaggaccttctgactccttgctactcccgtcagaacaaactagatagttttgggcccatcaatcctacactgaatacaacttacagttttctgaccactttcttcaaagaaatctctgaagtgtttccagatcaatttattcacctcggcggagatgaagtggagtttaagtgctgggagagcaatccaaagattcaggacttcatgaggcagaaaggctttggcacggactttaagaaattggagtcattttacatacagaaggttctcgacatcatcgccacgattaacaagggaagtatcgtctggcaagaggtttttgacgataaggccaaactggcacccgggacaatcgtggaagtgtggaaagacagcgcgtatcccgaggagctctcacgggtcacggcctcaggcttccccgtgatactgtccgcaccgtggtatctcgacctgatatcctacggtcaagactggaggaaatactacaaggtagagccgctggacttcgggggcacacagaaacaaaagcagctgttcatcgggggggaggcttgcctgtggggcgagtacgtagatgcgacaaatttaacaccccggttgtggcctagggcgtctgcagtgggggagaggctctggtcttcaaaggatgtgagggacatggacgacgcgtatgacaggcttaccaggcaccgatgtcggatggtcgaacgaggaatagccgcacagcccctctacgccggatactgtaaccatgaaaacatgtag

SEQ ID NO: 111073 - DNA, 996 bp, Artificial Sequence
  derived and/or modified sequence
atggccttcaataaatttaatgttcttcactggcacatcgtcgatgaccagagtttcccttaccagtccatcactttccccgaactgtctaacaaaggttcatacagtctgtcccatgtgtataccccaaatgacgtgaggatggttatagaatacgctcgtcttagaggtattagagtgctgccagagttcgacactccgggtcataccctttcatggggtaaggggcagaaagatcttttgaccccctgctatagtaggcagaataagttggattcatttggaccaataaatccaacgctaaacaccacatacagtttcctgaccacttttttcaaagaaatttctgaggtgttcccagaccaattcatccatctgggaggtgatgaggtggaattcaagtgctgggagagtaaccccaagattcaagacttcatgaggcagaaggggttcggaacagatttcaagaagctcgaatccttctatattcaaaaggtactggatattatcgccactattaacaagggctctatcgtctggcaggaagttttcgacgataaggccaagctggctcccggaacgatcgttgaggtttggaaggactctgcgtatcctgaggagctctcacgagttaccgccagtggattcccagtcatcctgagcgctccttggtaccttgacctgattagctatggccaggattggcggaaatattacaaagtggagccactggacttcggcggtacgcagaaacagaagcaattattcattggtggtgaagcctgcctgtggggagagtacgttgatgcaacgaatctaactccacgactatggcctagggcctccgcagtgggagagaggctttggtctagcaaagacgtgagggacatggacgacgcttacgaccgccttaccagacaccgatgcagaatggtggagagagggatagccgctcaacccctgtacgcgggttattgcaatcacgagaacatgtag

SEQ ID NO: 111074 - DNA, 996 bp, Artificial Sequence
  derived and/or modified sequence
atggccttcaacaagttcaacgtgctgcactggcacatcgtggacgaccagagcttcccctaccagagcatcaccttccccgagctgagcaacaagggcagctacagcctgagccacgtgtacacccccaacgacgtgagaatggtgatcgagtacgccagactgagaggcatcagagtgctgcccgagttcgacacccccggccacaccctgagctggggcaagggccagaaggacctgctgaccccctgctacagcagacagaacaagctggacagcttcggccccatcaaccccaccctgaacaccacctacagcttcctgaccaccttcttcaaggagatcagcgaggtgttccccgaccagttcatccacctgggcggcgacgaggtggagttcaagtgctgggagagcaaccccaagatccaggacttcatgagacagaagggcttcggcaccgacttcaagaagctggagagcttctacatccagaaggtgctggacatcatcgccaccatcaacaagggcagcatcgtgtggcaggaggtgttcgacgacaaggccaagctggcccccggcaccatcgtggaggtgtggaaggacagcgcctaccccgaggagctgagcagagtgaccgccagcggcttccccgtgatcctgagcgccccctggtacctggacctgatcagctacggccaggactggagaaagtactacaaggtggagcccctggacttcggcggcacccagaagcagaagcagctgttcatcggcggcgaggcctgcctgtggggcgagtacgtggacgccaccaacctgacccccagactgtggcccagagccagcgccgtgggcgagagactgtggagcagcaaggacgtgagagacatggacgacgcctacgacagactgaccagacacagatgcagaatggtggagagaggcatcgccgcccagcccctgtacgccggctactgcaaccacgagaacatgtag

SEQ ID NO: 111075 - protein, 3165 aa, Artificial Sequence
  derived and/or modified sequence
MTDKSIVILSLMVFHSSFINGKTCRRQLVEEWHPQPSSYVVNWTLTENICLDFYRDCWFLGVNTKIDTSGNQAVPQICPLQIQLGDILVISSEPSLQFPEINLMNVSETSFVGCVQNTTTEDQLLFGCRLKGMHTVNSKWLSVGTHYFITVMASGPSPCPLGLRLNVTVKQQFCQESLSSEFCSGHGKCLSEAWSKTYSCHCQPPFSGKYCQELDACSFKPCKNNGSCINKRENWDEQAYECVCHPPFTGKNCSEIIGQCQPHVCFHGNCSNITSNSFICECDEQFSGPFCEVSAKPCVSLLFWKRGICPNSSSAYTYECPKGSSSQNGETDVSEFSLVPCQNGTDCIKISNDVMCICSPIFTDLLCKSIQTSCESFPLRNNATCKKCEKDYPCSCISGFTEKNCEKAIDHCKLLSINCLNEEWCFNIIGRFKYVCIPGCTKNPCWFLKNVYLIHQHLCYCGVTFHGICQDKGPAQFEYVWQLGFAGSEGEKCQGVIDAYFFLAANCTEDATYVNDPEDNNSSCWFPHEGTKEICANGCSCLSEEDSQEYRYLCFLRWAGNMYLENTTDDQENECQHEAVCKDEINRPRCSCSLSYIGRLCVVNVDYCLGNHSISVHGLCLALSHNCNCSGLQRYERNICEIDTEDCKSASCKNGTTSTHLRGYFFRKCVPGFKGTQCEIDIDECASHPCKNGATCIDQPGNYFCQCVPPFKVVDGFSCLCNPGYVGIRCEQDIDDCILNACEHNSTCKDLHLSYQCVCLSDWEGNFCEQESNECKMNPCKNNSTCTDLYKSYRCECTSGWTGQNCSEEINECDSDPCMNGGLCHESTIPGQFVCLCPPLYTGQFCHQRYNLCDLLHNPCRNNSTCLALVDANQHCICREEFEGKNCEIDVKDCLFLSCQDYGDCEDMVNNFRCICRPGFSGSLCEIEINECSSEPCKNNGTCVDLTNRFFCNCEPEYHGPFCELDVNKCKISPCLDEENCVYRTDGYNCLCAPGYTGINCEINLDECLSEPCLHDGVCIDGINHYTCDCKSGFFGTHCETNANDCLSNPCLHGRCTELINEYPCSCDADGTSTQCKIKINDCTSIPCMNEGFCQKSAHGFTCICPRGYTGAYCEKSIDNCAEPELNSVICLNGGICVDGPGHTFDCRCLPGFSGQFCEININECSSSPCLHGADCEDHINGYVCKCQPGWSGHHCENELECIPNSCVHELCMENEPGSTCLCTPGFMTCSIGLLCGDEIRRITCLTPIFQRTDPISTQTYTIPPSETLVSSFPSIKATRIPAIMDTYPVDQGPKQTGIVKHDILPTTGLATLRISTPLESYLLQELIVTRELSAKHSLLSSADVSSSRFLNFGIRDPAQIVQDKTSVSHMPIRTSAATLGFFFPDRRARTPFIMSSLMSDFIFPTQSLLFENCQTVALSATPTTSVIRSIPGADIELNRQSLLSRGFLLIAASISATPVVSRGAQEDIEEYSADSLISRREHWRLLSPSMSPIFPAKVIISKQVTILNSSALHRFSTKAFNPSEYQAITEASSNQRLTNIKSQAADSLRELSQTCATCSMTEIKSSREFSDQVLHSKQSHFYETFWMNSAILASWYALMGAQTITSGHSFSSATEITPSVAFTEVPSLFPSKKSAKRTILSSSLEESITLSSNLDVNLCLDKTCLSIVPSQTISSDLMNSDLTSKMTTDELSVSENILKLLKIRQYGITMGPTEVLNQESLLDMEKSKGSHTLFKLHPSDSSLDFELNLQIYPDVTLKTYSEITHANDFKNNLPPLTGSVPDFSEVTTNVAFYTVSATPALSIQTSSSMSVIRPDWPYFTDYMTSLKKEVKTSSEWSKWELQPSVQYQEFPTASRHLPFTRSLTLSSLESILAPQRLMISDFSCVRYYGDSYLEFQNVALNPQNNISLEFQTFSSYGLLLYVKQDSNLVDGFFIQLFIENGTLKYHFYCPGEAKFKSINTTVRVDNGQKYTLLIRQELDPCNAELTILGRNTQICESINHVLGKPLPKSGSVFIGGFPDLHGKIQMPVPVKNFTGCIEVIEINNWRSFIPSKAVKNYHINNCRSQGFMLSPTASFVDASDVTQGVDTMWTSVSPSVAAPSVCQQDVCHNGGTCHAIFLSSGIVSFQCDCPLHFTGRFCEKDAGLFFPSFNGNSYLELPFLKFVLEKEHNRTVTIYLTIKTNSLNGTILYSNGNNCGKQFLHLFLVEGRPSVKYGCGNSQNILTVSANYSINTNAFTPITIRYTTPVGSPGVVCMIEMTADGKPPVQKKDTEISHASQAYFESMFLGHIPANVQIHKKAGPVYGFRGCILDLQVNNKEFFIIDEARHGKNIENCHVPWCAHHLCRNNGTCISDNENLFCECPRLYSGKLCQFASCENNPCGNGATCVPKSGTDIVCLCPYGRSGPLCTDAINITQPRFSGTDAFGYTSFLAYSRISDISFHYEFHLKFQLANNHSALQNNLIFFTGQKGHGLNGDDFLAVGLLNGSVVYSYNLGSGIASIRSEPLNLSLGVHTVHLGKFFQEGWLKVDDHKNKSIIAPGRLVGLNVFSQFYVGGYSEYTPDLLPNGADFKNGFQGCIFTLQVRTEKDGHFRGLGNPEGHPNAGRSVGQCHASPCSLMKCGNGGTCIESGTSVYCNCTTGWKGSFCTETVSTCDPEHDPPHHCSRGATCISLPHGYTCFCPLGTTGIYCEQALILIVILEKPKPAERKVKKEALSISDPSFRSNELSWMSFASFHVRKKTHIQLQFQPLAADGILFYAAQHLKAQSGDFLCISLVNSSVQLRYNLGDRTIILETLQKVTINGSTWHIIKAGRVGAEGYLDLDGINVTEKASTKMSSLDTNTDFYIGGVSSLNLVNPMAIENEPVGFQGCIRQVIINNQELQLTEFGAKGGSNVGDCDGTACGYNTCRNGGECTVNGTTFSCRCLPDWAGNTCNQSVSCLNNLCLHQSLCIPDQSFSYSCLCTLGWVGRYCENKTSFSTAKFMGNSYIKYIDPNYRMRNLQFTTISLNFSTTKTEGLIVWMGIAQNEENDFLAIGLHNQTLKIAVNLGERISVPMSYNNGTFCCNKWHHVVVIQNQTLIKAYINNSLILSEDIDPHKNFVALNYDGICYLGGFEYGRKVNIVTQEIFKTNFVGKIKDVVFFQEPKNIELIKLEGYNVYDGDEQNEVT

SEQ ID NO: 111076 - protein, 594 aa, Artificial Sequence
  derived and/or modified sequence
MTDKSIVILSLMVFHSSFINGKTCRRQLVEEWHPQPSSYVVNWTLTENICLDFYRDCWFLGVNTKIDTSGNQAVPQICPLQIQLGDILVISSEPSLQFPEINLMNVSETSFVGCVQNTTTEDQLLFGCRLKGMHTVNSKWLSVGTHYFITVMASGPSPCPLGLRLNVTVKQQFCQESLSSEFCSGHGKCLSEAWSKTYSCHCQPPFSGKYCQELDACSFKPCKNNGSCINKRENWDEQAYECVCHPPFTGKNCSEIIGQCQPHVCFHGNCSNITSNSFICECDEQFSGPFCEVSAKPCVSLLFWKRGICPNSSSAYTYECPKGSSSQNGETDVSEFSLVPCQNGTDCIKISNDVMCICSPIFTDLLCKSIQTSCESFPLRNNATCKKCEKDYPCSCISGFTEKNCEKAIDHCKLLSINCLNEEWCFNIIGRFKYVCIPGCTKNPCWFLKNVYLIHQHLCYCGVTFHGICQDKGPAQFEYVWQLGFAGSEGEKCQGVIDAYFFLAANCTEDATYVNDPEDNNSSCWFPHEGTKEICANGCSCLSEEDSQEYRYLCFLRWAGNMYLENTTDDQENECQHEAVCKDEINRPRYLCII

SEQ ID NO: 111077 - DNA, 9498 bp, Artificial Sequence
  derived and/or modified sequence
atgactgacaaatcaatcgtcattctgagcctgatggtttttcacagctctttcataaatggaaaaacatgtagacggcaattggtggaagaatggcatccacaaccctcatcatatgtggtaaattggacactaacagaaaacatctgcttggacttctacagagattgctggtttttgggtgtaaacactaaaatagatacttcaggcaatcaagctgttccccagatttgccctttgcaaattcaattaggagatatccttgtaatttcttctgaaccatctcttcaatttccagaaataaatttgatgaatgtttctgaaacatctttcgttggctgtgtgcaaaataccacaacggaagatcagttactttttggctgcagactaaaaggaatgcacactgttaattctaagtggctgagtgttgggacacattattttatcacagttatggcaagtggtccatcaccttgtccactgggacttcgactaaatgtgacagtgaaacagcagttctgccaggaatctctgagttcagaattttgctctggtcatggtaaatgtcttagtgaagcttggagcaagacatatagctgccattgccagcctccattttctggaaaatactgccaggaacttgatgcatgttcttttaaaccatgtaaaaataatggcagttgcattaataaaagagaaaattgggatgagcaagcatatgaatgtgtctgtcacccaccatttacaggaaagaattgctcagaaataattggccagtgtcaaccacatgtctgtttccatggaaactgcagcaatattacttcaaatagtttcatttgtgaatgtgatgagcaattttcaggtccattctgtgaggtgtcagcaaaaccttgtgtttctctgcttttttggaaaagaggaatttgcccaaatagcagttctgcttatacttatgaatgcccaaaaggatcttccagccaaaatggtgaaactgatgtcagtgagttttcattagtaccatgtcagaatggtactgactgcatcaaaatatcaaatgatgttatgtgcatctgttcaccaatatttacagatttgctttgtaagagcattcaaacatcatgtgagtcatttcctttgaggaataatgctacatgtaagaaatgtgagaaagattatccttgcagctgtatatcaggatttactgaaaaaaactgtgagaaagcaattgaccactgtaaactgctcagcatcaactgtctgaatgaagaatggtgtttcaatataattggaagattcaaatatgtatgcattccagggtgcacaaaaaatccatgttggtttttgaagaatgtttacctaattcatcaacacctctgctactgtggagtcaccttccatggtatttgccaagataaaggtcctgctcaatttgaatatgtgtggcaattgggatttgcaggatctgaaggcgaaaagtgccaaggggttattgatgcctatttctttctggctgcaaactgcactgaagatgcaacctatgtgaacgatcctgaagataataattcttcatgttggttcccacatgaaggcacaaaagagatttgtgcaaatggatgcagttgtttgagtgaagaagacagtcaggaatatcggtatctatgttttctcagatgggctggcaacatgtatctggaaaatacaactgatgatcaagaaaatgagtgtcaacatgaagctgtttgtaaagatgaaattaatagacccagatgcagctgttctcttagttacattggcagattgtgtgttgtcaatgttgactattgcttagggaaccacagtatatcagtgcatggcctctgcctggccctttcgcacaattgtaactgtagcggtctgcaaagatatgaaaggaacatctgtgagatagatactgaagactgcaaatctgcgtcctgcaaaaatggaacaactagtacacatttaaggggatatttcttccgcaagtgtgtcccaggatttaaaggtacgcaatgtgaaattgatatagatgagtgtgcttcacatccctgcaaaaatggagccacctgcattgaccaacctggtaattacttctgccagtgtgtgcctccatttaaagtggttgatggcttttcctgcttatgcaatccaggctatgttgggataagatgtgaacaggacattgatgactgcatcctgaatgcctgtgagcacaattctacctgcaaagacctgcatctcagctaccagtgtgtgtgcctatctgattgggaaggaaatttttgtgaacaagaatccaatgagtgtaaaatgaatccttgcaagaacaattccacctgtactgacctttacaaaagctatcgatgtgagtgtacatctggatggactggacagaactgtagtgaagaaataaatgaatgcgactctgatccatgcatgaatggaggtctttgtcatgaatctaccatccctggacaatttgtatgtctgtgcccacccctttatactggacaattttgccaccaacgctataacctttgtgacctacttcataacccttgcagaaacaactcaacatgcttagctttggtagacgcaaatcagcattgtatttgtagagaagaatttgaaggtaaaaactgtgaaattgatgtgaaagactgcctcttcctttcctgccaggattatggtgactgtgaagatatggtcaacaatttcaggtgtatttgcagacctgggttttctggatctctgtgtgaaattgaaattaatgaatgttcctctgaaccttgcaaaaataatggaacatgtgtggatctgacaaacagatttttttgtaattgtgaacctgagtaccatgggcccttctgtgaacttgatgtaaataaatgtaaaatctcaccttgtctagatgaagaaaattgtgtctacaggactgatggatacaactgcctctgtgcccctggttatacaggcatcaactgtgaaataaatctagatgaatgcctatcagagccctgtctccatgatggagtttgtatcgatggcatcaatcattatacctgtgactgcaagagtgggttttttggaacacactgtgaaacaaacgccaatgattgcctttcaaatccttgtctacatggaaggtgcacagaacttattaatgaatatccatgttcatgtgatgcagatgggactagcacacaatgtaagatcaaaattaatgactgcacatcaatcccttgtatgaatgaaggcttctgtcagaagtcagcacatggatttacttgcatttgcccacgtggatacactggtgcatactgtgaaaaaagcattgataattgtgctgagcctgaacttaattcagtcatctgtcttaatggagggatctgtgttgatgggcctggacatacttttgactgcagatgtcttcctggattttctggtcaattttgtgaaattaatataaatgaatgctcttcatcaccatgtctacatggtgcagactgtgaagatcacatcaatggatatgtttgcaaatgccaaccaggatggtctggacaccactgtgagaatgagcttgagtgcattcccaactcatgtgttcatgaactctgcatggagaatgaacctggctcgacatgtttatgcacacctggatttatgacctgctccattgggcttctttgtggtgatgaaataaggagaattacctgtttaactcccatctttcaaagaacagatcccatttccacacagacatatacaattcccccttctgagactttggtcagcagctttccatctataaaggctactagaataccagccataatggacacttacccagttgatcaaggtccaaaacagacaggcattgtcaagcacgacattctcccaaccactggtttggcaacattaagaattagcacacccttggaaagctacttactccaagaactgattgtcactagagagctttcagcaaaacacagtcttctttcttccgcagatgtttcctcttctcgattcctgaattttggtattcgtgacccagcacaaattgtccaggacaaaacatcggtatcacatatgcctattcgaacttcagcagccacactaggtttcttttttcctgataggagagcaaggaccccatttatcatgtcttccttaatgtcagattttatttttcctacacaatctttattatttgagaactgtcagactgttgctttatctgctaccccaacgacttcagtaattagaagcattccaggggctgatattgagctaaacaggcagtcattactctcccgtggattcctgcttatagctgcctccataagtgcaactccagttgtctctaggggggctcaagaggatattgaagaatattcagctgattctttaatttcaagaagagagcactggagattgctcagcccctcgatgtctcccatttttcctgctaaggtaattatatctaaacaggtaaccatcttaaactcatcagctctgcaccggttcagtacaaaagccttcaatcccagtgaatatcaggctattactgaggcttcaagcaaccagagactcacaaacatcaaatcacaggctgctgattctttaagagaattaagccaaacatgtgcaacatgttctatgactgaaataaaatcctctcgtgaattctcagatcaagttttgcatagcaaacagtcccacttttatgagacattctggatgaactcagcgatattagccagctggtatgcactaatgggagctcaaactatcacttctgggcattcattttcttctgctactgaaataacaccatcagtggcattcacagaagtgccatctttatttccttctaaaaagagtgcaaaaagaacaattttatcctcatccttggaagaatccattaccctatcaagtaatttggatgttaatttatgtttggataagacttgtttatccattgtcccttcacaaactatctcttcagacttgatgaattctgatttgacttcaaaaatgactactgatgaactgtcagtatcagaaaacattttaaaactattgaaaataagacaatatggcataactatgggacccactgaggtactaaatcaagagagcttattggacatggaaaaaagtaaaggatctcatacactgttcaaacttcacccaagtgatagttctctggattttgagttaaacttacaaatttatccggatgttactttaaagacatattcagaaattacacatgcaaatgacttcaaaaataatctgccaccattgacaggctcagtgcctgatttttcagaagtcaccaccaatgttgcattttatacagtttcagcaactccagcactttcaatacagacgtcttcctccatgtctgtaattaggccagattggccatattttacagattatatgacctctcttaaaaaagaggtcaagacttcttcagaatggtccaaatgggaacttcagcctagtgtgcaatatcaggaatttcccactgcaagccggcatcttcccttcactagatctcttactttgtcttcactggaatccattctggcacctcaacggctgatgatttctgatttcagttgtgttcgttattatggagattcttatctagaatttcagaatgtggctttaaatccacaaaataacatctccctagaatttcagaccttcagctcctatggacttctgctgtatgtcaagcaagactcaaatttagtagatggattttttattcaattgtttattgaaaatggtactttaaagtaccacttttactgtcctggtgaagcaaaatttaaaagcattaatactactgttagagtggacaacgggcaaaagtatacactgcttatcaggcaagaattggatccatgtaacgctgagctgactattttagggaggaatacacaaatatgcgaatctatcaatcatgtactcggaaaacccctgccaaaatcaggatctgtcttcattggtggatttccagaccttcatgggaaaatccagatgcctgtaccagtcaagaattttactggctgcatagaagttatagaaataaataactggagatctttcattccatccaaggcagtgaaaaactatcacattaacaattgcagatcccagggatttatgctgtctccaacagcctcctttgttgatgcttctgatgtgacacaaggggttgataccatgtggacttctgtcagcccctctgttgcagcaccctctgtgtgccagcaggatgtatgccacaatggaggcacatgccatgccatcttcctctccagtggcatagtgtcattccaatgtgactgtccactacatttcactggccgcttctgtgaaaaagatgcaggtttattctttccatctttcaatgggaattcctatttagaactgccctttttgaagtttgtcctggagaaggaacataacagaactgttaccatctacttgactataaaaacaaacagtttaaatggaactattctttacagtaatgggaataattgtggaaagcagtttcttcatttatttcttgtggaaggaaggccatcagttaaatatgggtgtggaaattctcaaaatattttgactgtttctgctaattacagcattaacacaaatgcattcacccctatcacaatacgctacacaacgcctgttggcagccctggagttgtttgtatgattgaaatgactgcagatggaaaacctccagtacagaagaaagacacagagatttcccatgcctctcaggcatattttgaatcaatgttccttggccatattcctgcaaatgttcaaattcataagaaagcaggtcctgtttatgggttcaggggctgcattctagaccttcaagtaaacaacaaagaattcttcatcatcgatgaagcacgacatggaaagaatattgagaactgccacgtcccttggtgtgctcatcatctgtgccgcaacaatggcacctgcatcagtgataatgaaaatctgttttgtgagtgtccaaggctgtattcaggcaagctgtgccagtttgcaagttgtgaaaacaacccatgtggaaatggtgccacctgtgttccaaaatccggaacagatattgtctgcctctgcccatatgggaggtctggacccctctgcactgatgctattaatattactcagccaaggttcagtggcacagatgcctttggatacacctcattcctggcttattcacggatctcagacatcagcttccattatgaattccacctgaagtttcagctggcaaacaaccactcagcactgcaaaataacttgatattttttactggacagaaaggccatgggttgaatggcgatgacttcctggctgtgggcctgctcaatggcagtgtggtttatagttataacctggggtctggcatagcaagcatcaggagcgagcccctcaatctgagccttggagtccacactgttcatctgggcaagttcttccaagagggctggctgaaggtagatgatcataaaaataaatccattatcgccccaggaagactggttggtctcaatgtcttcagtcagttttatgtaggtggctacagtgaatacactccagatctcttaccaaatggagcagattttaaaaatggttttcaaggctgtattttcactcttcaagttcgcactgagaaggatggccatttcagaggactgggaaatcctgagggccacccaaatgctggacgcagtgttggccagtgtcatgcttctccctgcagtttaatgaaatgtggcaatggtgggacatgcatagagagtggaactagtgtttactgcaattgtaccactgggtggaaaggatcattctgcacagagacagtttctacctgtgatcctgaacatgaccctccacaccactgtagcagaggagcaacctgcatttcattacctcatggatacacctgtttctgtcctctaggaaccactggaatctactgtgaacaagcacttatcctcattgtgatcttggaaaagccaaaaccagcagaacggaaagtgaagaaggaggctttatccataagtgatccatctttcagaagcaatgagttatcctggatgtcttttgcttcctttcatgttcgaaaaaagacacatattcaattgcagtttcagcctctcgctgcagatggtatcctattttatgctgcacaacacttaaaagcccaatcaggtgattttttatgcatctctttagtaaatagttccgttcaacttcgctacaaccttggcgacagaactatcattctagaaactctccaaaaagtaactataaacggaagtacttggcatataataaaagcaggaagagttggtgcagaaggctacctggatctagatgggataaatgtaacagaaaaggcctccactaaaatgagttctctggacacaaatacagacttctatattggaggagtatcttctttaaatcttgtaaatcccatggcaatagaaaatgaacctgtaggttttcaaggctgtatccgacaagttatcataaataatcaagaattacaattaactgaatttggagcaaaaggtggctcaaatgtaggtgactgtgatgggacagcctgtgggtacaacacatgcagaaatggaggtgaatgtacagtaaatggcacaactttttcttgcagatgtttgccagattgggctggaaatacatgtaaccagtctgtgtcctgtttgaataatctttgcctccaccaatctttatgtatacctgaccaatcattttcttacagttgcctgtgtactttgggttgggtgggaaggtattgtgaaaacaaaacttcattttcaactgcaaaatttatgggtaattcttacattaaatacattgatccaaattatagaatgagaaacctccagttcactactatatccttaaatttcagtaccactaaaacagaaggtctaattgtatggatgggaatagctcaaaatgaagaaaatgattttctggcaattggtctccataatcagaccttgaaaatagcagttaacttgggagaaagaatctctgtgcctatgagctataacaatggcacattctgttgtaataaatggcaccatgtagttgtaattcaaaatcagactcttatcaaggcctacataaataacagtctaattctttccgaggatattgatccacataaaaactttgtggctctaaactatgatggcatttgttatctagggggctttgaatatggtagaaaggtaaatatcgttactcaagagatttttaaaaccaattttgttggcaaaattaaagatgttgtattttttcaggaaccaaaaaacattgaactaattaaattagaaggatacaatgtttatgatggagatgaacaaaatgaggttacataa

SEQ ID NO: 111078 - DNA, 10485 bp, Artificial Sequence
  derived and/or modified sequence
gatacacgctaggcatgtccagacattaaccgtaatcagaagcctcctagggttgcaagcctccttggctaatggttgggctttgtgcctcactcttctcttacacctggggagtcaagtctggatcctctgctccatatttatttagcaaataaaacactgatctcaaacagcaacggaacctgtgtacttgaggtgttttttgaaaactaatcagaagaggaatgcttatctcccaagaaaattgaaaccatctgtaaaagaatcttggctgtgctgtgttttgattagattgaagcttggtgtaaagagaaaacacaaaagaccgcagaatatttacaacatttgaattcctgtttctccatcaaagcacattgtcatcaaagctactttgggtatagaaaaaaggtcaattccaattcccaggaatccttaaccacaactttacttggaaatttccggtaatacttaaaacaccattttgcagcaattctttatgataaactgtaaaatacagctacccgaaaatgactgacaaatcaatcgtcattctgagcctgatggtttttcacagctctttcataaatggaaaaacatgtagacggcaattggtggaagaatggcatccacaaccctcatcatatgtggtaaattggacactaacagaaaacatctgcttggacttctacagagattgctggtttttgggtgtaaacactaaaatagatacttcaggcaatcaagctgttccccagatttgccctttgcaaattcaattaggagatatccttgtaatttcttctgaaccatctcttcaatttccagaaataaatttgatgaatgtttctgaaacatctttcgttggctgtgtgcaaaataccacaacggaagatcagttactttttggctgcagactaaaaggaatgcacactgttaattctaagtggctgagtgttgggacacattattttatcacagttatggcaagtggtccatcaccttgtccactgggacttcgactaaatgtgacagtgaaacagcagttctgccaggaatctctgagttcagaattttgctctggtcatggtaaatgtcttagtgaagcttggagcaagacatatagctgccattgccagcctccattttctggaaaatactgccaggaacttgatgcatgttcttttaaaccatgtaaaaataatggcagttgcattaataaaagagaaaattgggatgagcaagcatatgaatgtgtctgtcacccaccatttacaggaaagaattgctcagaaataattggccagtgtcaaccacatgtctgtttccatggaaactgcagcaatattacttcaaatagtttcatttgtgaatgtgatgagcaattttcaggtccattctgtgaggtgtcagcaaaaccttgtgtttctctgcttttttggaaaagaggaatttgcccaaatagcagttctgcttatacttatgaatgcccaaaaggatcttccagccaaaatggtgaaactgatgtcagtgagttttcattagtaccatgtcagaatggtactgactgcatcaaaatatcaaatgatgttatgtgcatctgttcaccaatatttacagatttgctttgtaagagcattcaaacatcatgtgagtcatttcctttgaggaataatgctacatgtaagaaatgtgagaaagattatccttgcagctgtatatcaggatttactgaaaaaaactgtgagaaagcaattgaccactgtaaactgctcagcatcaactgtctgaatgaagaatggtgtttcaatataattggaagattcaaatatgtatgcattccagggtgcacaaaaaatccatgttggtttttgaagaatgtttacctaattcatcaacacctctgctactgtggagtcaccttccatggtatttgccaagataaaggtcctgctcaatttgaatatgtgtggcaattgggatttgcaggatctgaaggcgaaaagtgccaaggggttattgatgcctatttctttctggctgcaaactgcactgaagatgcaacctatgtgaacgatcctgaagataataattcttcatgttggttcccacatgaaggcacaaaagagatttgtgcaaatggatgcagttgtttgagtgaagaagacagtcaggaatatcggtatctatgttttctcagatgggctggcaacatgtatctggaaaatacaactgatgatcaagaaaatgagtgtcaacatgaagctgtttgtaaagatgaaattaatagacccagatgcagctgttctcttagttacattggcagattgtgtgttgtcaatgttgactattgcttagggaaccacagtatatcagtgcatggcctctgcctggccctttcgcacaattgtaactgtagcggtctgcaaagatatgaaaggaacatctgtgagatagatactgaagactgcaaatctgcgtcctgcaaaaatggaacaactagtacacatttaaggggatatttcttccgcaagtgtgtcccaggatttaaaggtacgcaatgtgaaattgatatagatgagtgtgcttcacatccctgcaaaaatggagccacctgcattgaccaacctggtaattacttctgccagtgtgtgcctccatttaaagtggttgatggcttttcctgcttatgcaatccaggctatgttgggataagatgtgaacaggacattgatgactgcatcctgaatgcctgtgagcacaattctacctgcaaagacctgcatctcagctaccagtgtgtgtgcctatctgattgggaaggaaatttttgtgaacaagaatccaatgagtgtaaaatgaatccttgcaagaacaattccacctgtactgacctttacaaaagctatcgatgtgagtgtacatctggatggactggacagaactgtagtgaagaaataaatgaatgcgactctgatccatgcatgaatggaggtctttgtcatgaatctaccatccctggacaatttgtatgtctgtgcccacccctttatactggacaattttgccaccaacgctataacctttgtgacctacttcataacccttgcagaaacaactcaacatgcttagctttggtagacgcaaatcagcattgtatttgtagagaagaatttgaaggtaaaaactgtgaaattgatgtgaaagactgcctcttcctttcctgccaggattatggtgactgtgaagatatggtcaacaatttcaggtgtatttgcagacctgggttttctggatctctgtgtgaaattgaaattaatgaatgttcctctgaaccttgcaaaaataatggaacatgtgtggatctgacaaacagatttttttgtaattgtgaacctgagtaccatgggcccttctgtgaacttgatgtaaataaatgtaaaatctcaccttgtctagatgaagaaaattgtgtctacaggactgatggatacaactgcctctgtgcccctggttatacaggcatcaactgtgaaataaatctagatgaatgcctatcagagccctgtctccatgatggagtttgtatcgatggcatcaatcattatacctgtgactgcaagagtgggttttttggaacacactgtgaaacaaacgccaatgattgcctttcaaatccttgtctacatggaaggtgcacagaacttattaatgaatatccatgttcatgtgatgcagatgggactagcacacaatgtaagatcaaaattaatgactgcacatcaatcccttgtatgaatgaaggcttctgtcagaagtcagcacatggatttacttgcatttgcccacgtggatacactggtgcatactgtgaaaaaagcattgataattgtgctgagcctgaacttaattcagtcatctgtcttaatggagggatctgtgttgatgggcctggacatacttttgactgcagatgtcttcctggattttctggtcaattttgtgaaattaatataaatgaatgctcttcatcaccatgtctacatggtgcagactgtgaagatcacatcaatggatatgtttgcaaatgccaaccaggatggtctggacaccactgtgagaatgagcttgagtgcattcccaactcatgtgttcatgaactctgcatggagaatgaacctggctcgacatgtttatgcacacctggatttatgacctgctccattgggcttctttgtggtgatgaaataaggagaattacctgtttaactcccatctttcaaagaacagatcccatttccacacagacatatacaattcccccttctgagactttggtcagcagctttccatctataaaggctactagaataccagccataatggacacttacccagttgatcaaggtccaaaacagacaggcattgtcaagcacgacattctcccaaccactggtttggcaacattaagaattagcacacccttggaaagctacttactccaagaactgattgtcactagagagctttcagcaaaacacagtcttctttcttccgcagatgtttcctcttctcgattcctgaattttggtattcgtgacccagcacaaattgtccaggacaaaacatcggtatcacatatgcctattcgaacttcagcagccacactaggtttcttttttcctgataggagagcaaggaccccatttatcatgtcttccttaatgtcagattttatttttcctacacaatctttattatttgagaactgtcagactgttgctttatctgctaccccaacgacttcagtaattagaagcattccaggggctgatattgagctaaacaggcagtcattactctcccgtggattcctgcttatagctgcctccataagtgcaactccagttgtctctaggggggctcaagaggatattgaagaatattcagctgattctttaatttcaagaagagagcactggagattgctcagcccctcgatgtctcccatttttcctgctaaggtaattatatctaaacaggtaaccatcttaaactcatcagctctgcaccggttcagtacaaaagccttcaatcccagtgaatatcaggctattactgaggcttcaagcaaccagagactcacaaacatcaaatcacaggctgctgattctttaagagaattaagccaaacatgtgcaacatgttctatgactgaaataaaatcctctcgtgaattctcagatcaagttttgcatagcaaacagtcccacttttatgagacattctggatgaactcagcgatattagccagctggtatgcactaatgggagctcaaactatcacttctgggcattcattttcttctgctactgaaataacaccatcagtggcattcacagaagtgccatctttatttccttctaaaaagagtgcaaaaagaacaattttatcctcatccttggaagaatccattaccctatcaagtaatttggatgttaatttatgtttggataagacttgtttatccattgtcccttcacaaactatctcttcagacttgatgaattctgatttgacttcaaaaatgactactgatgaactgtcagtatcagaaaacattttaaaactattgaaaataagacaatatggcataactatgggacccactgaggtactaaatcaagagagcttattggacatggaaaaaagtaaaggatctcatacactgttcaaacttcacccaagtgatagttctctggattttgagttaaacttacaaatttatccggatgttactttaaagacatattcagaaattacacatgcaaatgacttcaaaaataatctgccaccattgacaggctcagtgcctgatttttcagaagtcaccaccaatgttgcattttatacagtttcagcaactccagcactttcaatacagacgtcttcctccatgtctgtaattaggccagattggccatattttacagattatatgacctctcttaaaaaagaggtcaagacttcttcagaatggtccaaatgggaacttcagcctagtgtgcaatatcaggaatttcccactgcaagccggcatcttcccttcactagatctcttactttgtcttcactggaatccattctggcacctcaacggctgatgatttctgatttcagttgtgttcgttattatggagattcttatctagaatttcagaatgtggctttaaatccacaaaataacatctccctagaatttcagaccttcagctcctatggacttctgctgtatgtcaagcaagactcaaatttagtagatggattttttattcaattgtttattgaaaatggtactttaaagtaccacttttactgtcctggtgaagcaaaatttaaaagcattaatactactgttagagtggacaacgggcaaaagtatacactgcttatcaggcaagaattggatccatgtaacgctgagctgactattttagggaggaatacacaaatatgcgaatctatcaatcatgtactcggaaaacccctgccaaaatcaggatctgtcttcattggtggatttccagaccttcatgggaaaatccagatgcctgtaccagtcaagaattttactggctgcatagaagttatagaaataaataactggagatctttcattccatccaaggcagtgaaaaactatcacattaacaattgcagatcccagggatttatgctgtctccaacagcctcctttgttgatgcttctgatgtgacacaaggggttgataccatgtggacttctgtcagcccctctgttgcagcaccctctgtgtgccagcaggatgtatgccacaatggaggcacatgccatgccatcttcctctccagtggcatagtgtcattccaatgtgactgtccactacatttcactggccgcttctgtgaaaaagatgcaggtttattctttccatctttcaatgggaattcctatttagaactgccctttttgaagtttgtcctggagaaggaacataacagaactgttaccatctacttgactataaaaacaaacagtttaaatggaactattctttacagtaatgggaataattgtggaaagcagtttcttcatttatttcttgtggaaggaaggccatcagttaaatatgggtgtggaaattctcaaaatattttgactgtttctgctaattacagcattaacacaaatgcattcacccctatcacaatacgctacacaacgcctgttggcagccctggagttgtttgtatgattgaaatgactgcagatggaaaacctccagtacagaagaaagacacagagatttcccatgcctctcaggcatattttgaatcaatgttccttggccatattcctgcaaatgttcaaattcataagaaagcaggtcctgtttatgggttcaggggctgcattctagaccttcaagtaaacaacaaagaattcttcatcatcgatgaagcacgacatggaaagaatattgagaactgccacgtcccttggtgtgctcatcatctgtgccgcaacaatggcacctgcatcagtgataatgaaaatctgttttgtgagtgtccaaggctgtattcaggcaagctgtgccagtttgcaagttgtgaaaacaacccatgtggaaatggtgccacctgtgttccaaaatccggaacagatattgtctgcctctgcccatatgggaggtctggacccctctgcactgatgctattaatattactcagccaaggttcagtggcacagatgcctttggatacacctcattcctggcttattcacggatctcagacatcagcttccattatgaattccacctgaagtttcagctggcaaacaaccactcagcactgcaaaataacttgatattttttactggacagaaaggccatgggttgaatggcgatgacttcctggctgtgggcctgctcaatggcagtgtggtttatagttataacctggggtctggcatagcaagcatcaggagcgagcccctcaatctgagccttggagtccacactgttcatctgggcaagttcttccaagagggctggctgaaggtagatgatcataaaaataaatccattatcgccccaggaagactggttggtctcaatgtcttcagtcagttttatgtaggtggctacagtgaatacactccagatctcttaccaaatggagcagattttaaaaatggttttcaaggctgtattttcactcttcaagttcgcactgagaaggatggccatttcagaggactgggaaatcctgagggccacccaaatgctggacgcagtgttggccagtgtcatgcttctccctgcagtttaatgaaatgtggcaatggtgggacatgcatagagagtggaactagtgtttactgcaattgtaccactgggtggaaaggatcattctgcacagagacagtttctacctgtgatcctgaacatgaccctccacaccactgtagcagaggagcaacctgcatttcattacctcatggatacacctgtttctgtcctctaggaaccactggaatctactgtgaacaagcacttatcctcattgtgatcttggaaaagccaaaaccagcagaacggaaagtgaagaaggaggctttatccataagtgatccatctttcagaagcaatgagttatcctggatgtcttttgcttcctttcatgttcgaaaaaagacacatattcaattgcagtttcagcctctcgctgcagatggtatcctattttatgctgcacaacacttaaaagcccaatcaggtgattttttatgcatctctttagtaaatagttccgttcaacttcgctacaaccttggcgacagaactatcattctagaaactctccaaaaagtaactataaacggaagtacttggcatataataaaagcaggaagagttggtgcagaaggctacctggatctagatgggataaatgtaacagaaaaggcctccactaaaatgagttctctggacacaaatacagacttctatattggaggagtatcttctttaaatcttgtaaatcccatggcaatagaaaatgaacctgtaggttttcaaggctgtatccgacaagttatcataaataatcaagaattacaattaactgaatttggagcaaaaggtggctcaaatgtaggtgactgtgatgggacagcctgtgggtacaacacatgcagaaatggaggtgaatgtacagtaaatggcacaactttttcttgcagatgtttgccagattgggctggaaatacatgtaaccagtctgtgtcctgtttgaataatctttgcctccaccaatctttatgtatacctgaccaatcattttcttacagttgcctgtgtactttgggttgggtgggaaggtattgtgaaaacaaaacttcattttcaactgcaaaatttatgggtaattcttacattaaatacattgatccaaattatagaatgagaaacctccagttcactactatatccttaaatttcagtaccactaaaacagaaggtctaattgtatggatgggaatagctcaaaatgaagaaaatgattttctggcaattggtctccataatcagaccttgaaaatagcagttaacttgggagaaagaatctctgtgcctatgagctataacaatggcacattctgttgtaataaatggcaccatgtagttgtaattcaaaatcagactcttatcaaggcctacataaataacagtctaattctttccgaggatattgatccacataaaaactttgtggctctaaactatgatggcatttgttatctagggggctttgaatatggtagaaaggtaaatatcgttactcaagagatttttaaaaccaattttgttggcaaaattaaagatgttgtattttttcaggaaccaaaaaacattgaactaattaaattagaaggatacaatgtttatgatggagatgaacaaaatgaggttacataagttaacactagagattttagtacacactatacataaatgcagttattttgatagttatttctttgatacattgcttacggggaatcaactgtttactatattacctgaaatagtctaaatgctaacatatctttttgataagattgtaaaatgtcactgaaggttctgattgtttttcctacatctaatttatctgtatatattttgattcatgttttaactccattagttcagtgcttattcacagaatgtgcttattcactttgcttattcactttttacctatccctaatgcttacattttaaaatcaacgtgtaaacacaattttaaaaatcaatgtgtaagctgaactttaaaatgtttaaaattcagttgggaatgaattagggataggtacaaataagaaaaaaatcaagttattaatcaaaggaaaaataaaaattatacaaagcaatgtaa

SEQ ID NO: 111079 - DNA, 9498 bp, Artificial Sequence
  derived and/or modified sequence
atgactgataagtccatcgttattctttctcttatggtgtttcatagtagcttcatcaatggaaagacctgtaggcgccagctggtggaggaatggcacccacaaccgtctagttacgtggtgaattggacattgaccgaaaatatctgcctcgacttctatcgcgattgctggtttctgggggtcaatactaagatagatactagcggtaatcaggcagttccgcagatatgcccccttcaaattcagctgggagatatcctggttatctcctcggagccttccttacaatttcccgaaattaatctaatgaacgtgagcgagacgagttttgtcggatgtgtgcagaacacaaccacagaggaccaactcctgtttggctgtcggttgaaagggatgcacacagtcaattcaaagtggttatcagtgggcacccattatttcattaccgtgatggctagtgggccctctccctgtccactgggtttacgcctcaacgtaacggtgaaacagcagttctgccaagaatccttaagctccgaattctgcagcggccacgggaagtgcctgtcagaggcctggtccaaaacctattcctgtcactgtcagcctcctttcagtggtaagtactgtcaggagctggacgcctgttcctttaaaccatgtaaaaataacggatcgtgcattaataaacgggagaactgggatgagcaggcctatgagtgcgtatgtcaccccccattcactggcaagaattgtagcgagatcataggccagtgtcagccacacgtctgtttccatgggaactgcagcaatattacgagcaactctttcatttgcgaatgtgacgaacagttttccggccctttttgcgaagtatctgctaaaccctgcgtcagcctgcttttctggaagcgaggcatatgcccaaacagctcaagcgcttacacctatgaatgtccaaaaggttcatcgtcgcagaacggggagacagatgtatccgagttcagccttgtcccttgccaaaacggcaccgactgtattaaaatttcaaatgacgttatgtgcatctgttcgccgatattcactgacttgttgtgcaagtctatccaaacatcctgtgaaagttttcctctccgtaacaatgccacctgcaaaaagtgcgagaaggactatccctgctcttgcattagtggctttactgagaagaattgcgaaaaggccatcgatcactgcaagctgttgagcataaactgcctgaacgaagagtggtgctttaatattatcggccgtttcaaatatgtgtgtattcccgggtgcaccaaaaacccctgctggttcctcaaaaacgtctatctcattcatcagcacctgtgctactgcggagtcacctttcatggcatttgccaggacaaggggccagctcagtttgagtacgtttggcaactcgggttcgcaggtagcgagggcgaaaaatgccagggagtcatcgatgcctattttttcctcgcagcgaactgcaccgaggatgccacttatgttaacgacccggaagataacaacagctcctgctggttccctcacgagggtaccaaagagatctgtgccaacgggtgtagctgcctatccgaggaagatagccaggagtacagatacctatgttttctcaggtgggcaggtaacatgtatctggaaaacaccaccgatgaccaagagaatgaatgccagcacgaggctgtatgtaaggacgagatcaatcggcctaggtgttcttgcagcctgagctatataggcagattgtgtgtcgttaacgtcgattattgcctcgggaatcactccatatcggtgcatggactctgtctggccctgagtcacaattgtaactgttctggattgcagcgctacgagcgtaatatctgtgagattgacactgaagattgcaaaagtgcatcctgtaagaatggcacaacatccacccatttgcgtgggtacttctttcgtaagtgtgtccccggatttaagggcactcagtgcgaaatcgatattgatgagtgcgctagccatccatgtaagaatggtgcaacgtgcattgaccagccaggcaattacttctgtcaatgcgtgcccccattcaaggtcgtcgatggcttcagctgcttatgcaaccccggatatgtcggaatccgttgtgagcaggatatcgatgactgcattttgaatgcttgtgaacacaacagtacttgcaaggatctgcacctaagctaccagtgcgtgtgcctgtcagactgggagggaaatttctgcgagcaggagtctaatgagtgcaagatgaatccttgcaagaacaactctacatgcacagacctgtataagtcttaccgttgtgagtgtactagtggatggacaggtcagaactgttctgaggagatcaacgagtgcgactcagatccctgcatgaacgggggactctgccacgaatctaccataccaggccagtttgtgtgcctctgtcccccgctctacaccgggcagttctgtcaccagcgctataacctgtgtgacttgctccacaacccctgtagaaataacagtacctgtctcgcactggtggatgctaaccagcactgtatctgtagggaggagttcgaggggaagaattgtgaaatagatgttaaggactgcctgtttctgtcttgtcaagattacggggactgcgaggacatggtgaacaacttcaggtgcatctgtcgcccgggtttcagtgggagtctatgtgaaatagagatcaacgagtgcagtagcgagccctgcaagaataatgggacttgcgtggacctgaccaacagattcttctgcaactgtgagccagagtatcacggcccattctgcgaattggacgttaacaagtgtaaaatctccccatgcctggatgaggagaactgcgtttaccgtaccgacggttataattgtctgtgcgcacccggctacactggaattaattgcgaaataaatctggatgaatgtctctctgaaccgtgcctccacgatggtgtctgtatcgatgggatcaaccactacacatgtgactgtaagtcggggttttttggcacccattgcgagactaacgcaaacgattgccttagcaatccttgcctccatgggagatgtaccgaattaataaatgagtacccttgctcttgtgacgctgacggcacttctacccagtgcaagattaagatcaatgactgcaccagtataccctgcatgaatgagggattctgccagaagtcggcgcacggatttacgtgcatttgccctcgcgggtatactggcgcttattgcgagaagagcatagacaattgtgctgagccagaattgaattccgtcatatgtcttaatggtggtatttgtgtggacggtcccggacatactttcgattgtaggtgcctcccagggttttctgggcagttctgtgagatcaacataaacgagtgctcctcatcaccttgcttgcatggtgctgactgcgaagatcacattaatggttatgtctgtaaatgtcagcccgggtggagcggacaccactgcgagaatgagctcgaatgcatacctaactcatgtgtacacgagttatgcatggaaaacgagcctggaagtacttgtctgtgtaccccagggtttatgacctgtagcataggtctgctgtgcggggatgagatccgacgaataacatgcttaacacctatctttcagagaacagatcctattagtactcagacatacactattccaccgagcgagactctcgtctcgtcattcccttcaattaaagccaccaggattccagcaattatggatacatacccagtggatcaaggcccaaaacagaccgggatcgttaaacacgatattctgccaacgacaggactggcaacactccgcattagcaccccactggagagttacctactgcaagagctgattgtaacacgggaactttcagccaaacattcactcctatcttccgccgacgtgagcagttcccgcttccttaactttggcatcagggaccctgcccaaatcgtccaagacaaaacctcagtgtcacacatgccaattaggacttctgcggctaccctgggttttttctttcccgatcgacgggcccgcacgccatttataatgtctagcttaatgagcgactttattttccccacacagtccctgttgttcgaaaattgtcagaccgtcgctttatcggctacaccaacgacaagtgtgatccgtagcatcccaggcgcagatatcgagctgaacagacagagtctgctttccagagggttcttgctgatagccgcctccatttcagccactcctgttgtgtcgagaggcgctcaggaggatattgaggaatactcagccgacagcttaatctctcggagggagcattggagactgctcagtccatcaatgtccccaatttttccagcaaaggttattattagtaagcaagtgaccattctgaactcatcagccctgcaccgctttagcaccaaggcatttaacccatccgaatatcaggcaattacagaggcgtcatctaatcagagacttactaatatcaagtcccaagctgcagattctctgcgagagctgtcccagacatgcgccacttgctcgatgaccgagattaagagtagccgggagtttagtgatcaagtcctccatagcaagcagtctcacttttacgaaacattctggatgaactccgcaattctagcttcctggtatgctctgatgggagctcagactattacttccggtcatagcttcagtagcgccactgagatcactccttctgtcgcatttactgaagtgccctccctgttcccctccaagaaaagcgctaagcgcacaatacttagttctagccttgaagagtctataacactgtctagcaatcttgatgttaacctctgccttgataagacctgtttgtctatcgtgccaagtcagacaatctctagcgatctgatgaactcagatctgacatcaaaaatgaccactgacgagctgtcagtctccgaaaatattctcaagctgctgaaaattcgtcagtatggcattacaatgggtcctactgaggtcttgaaccaggagagtctgctggatatggaaaagtctaagggctcgcacactctgttcaagcttcacccttcagactcctcgcttgatttcgaactgaacttacagatttatccggatgtgaccctgaagacctacagtgaaatcacccacgccaacgacttcaaaaataacctcccccccctgacaggttcagttcccgactttagtgaagtgacaacgaacgtggccttttacacagtctccgccaccccggctttgtccatacagacaagcagcagtatgtctgtgatcaggccagactggccgtacttcactgactatatgactagccttaagaaggaggtgaagacctcgtccgaatggtctaaatgggagttacagccatctgtccagtaccaggaattccccacggcttctaggcatctgcctttcactcgaagcctcacattgtcaagcctcgaatctatcttggcacctcagcgactgatgatctccgactttagttgcgtgcggtattatggcgatagctatttagaatttcagaatgtggcactaaacccccagaacaacatctctttagaattccagacgtttagcagctacgggctcctcctgtatgttaagcaggacagcaacctggttgacggcttttttatccagctgttcatcgaaaatgggacactcaagtaccatttctattgccccggagaagctaagttcaagagcataaatacaactgtgagggtcgacaatggacagaagtacaccttgcttattaggcaggagctcgacccatgcaatgccgaactcacaatactcggacggaatacacaaatatgtgagtctattaaccacgtactggggaagccactgccaaagagcggttcagttttcattgggggatttcctgatttacatggcaagattcaaatgcccgttcccgtcaagaacttcaccgggtgtattgaggtaattgagattaacaactggcggtctttcatcccctcaaaagcagtgaaaaattatcacattaacaactgccgaagtcagggcttcatgctgtcacccaccgctagctttgttgacgcgtccgatgttacacagggtgtggataccatgtggacttctgtctcgcccagtgtcgccgccccctcggtgtgccagcaggatgtatgccacaatggaggcacctgtcacgccatctttcttagtagtggtatagtcagcttccaatgtgactgcccactgcatttcacagggcggttctgcgagaaggatgctgggctgttttttcctagcttcaacgggaattcatacctggagcttcccttcctgaagttcgtgctggaaaaggagcacaatcggaccgtgacgatatacctgacgatcaagaccaactctctcaatggcaccattctgtacagcaatggtaacaattgcggcaaacagttcctacacctgttcctggtggaaggcagaccgagtgtgaaatacgggtgcggaaactcacagaacatcctcactgtatcagctaactacagcattaatactaacgcctttacacctatcaccatccgttatactacacccgtgggaagtccaggggtagtgtgtatgatcgaaatgacagccgacggaaagcctcctgtccagaagaaggatacggagatttcgcacgcgagtcaggcatatttcgaatccatgttccttgggcatatcccagccaacgtgcagatccacaagaaagctgggccggtctacgggtttcggggctgcattttggaccttcaggtcaacaacaaagaattttttattatcgacgaggctcgacacggaaaaaacatagaaaattgtcatgttccttggtgcgcccatcatctctgtaggaacaatgggacctgtattagcgacaatgaaaatctcttttgcgaatgtcctcgactgtactctggaaagctctgccagtttgcgagctgcgagaacaatccttgtggtaatggcgccacctgtgtccccaagagcggaacagatatcgtgtgtctgtgtccctatggaaggtcagggcctctctgtacagacgccataaatatcacccaacccaggttcagcggtacggatgcctttggttacacgtcattccttgcctattctcggatctccgacattagttttcattacgagttccacctgaaattccagctcgcaaataaccactctgctctgcaaaacaatctaatatttttcactggtcagaagggtcacggcctgaatggcgatgatttcctggcagttgggttactgaacggctccgtggtctatagctacaacctaggatcaggtatcgcatcgattcgctctgagcccttgaatctgtcactgggagtccataccgtgcacctgggaaaatttttccaggagggatggttgaaggtggatgatcataagaataaatccattatcgcacccggaagacttgtgggcctgaacgtgttttcccagttttacgtgggaggctatagcgaatatacccccgacctgctgccaaatggggcagatttcaaaaacggctttcagggatgcattttcaccttgcaggtgaggaccgaaaaagacggacattttcggggactcggtaatcccgaggggcaccccaacgcaggaaggtccgtcggccagtgtcatgcctccccctgcagcttgatgaagtgcggtaacggtggcacctgtattgagtctggaacaagtgtttactgcaactgcacgacaggctggaagggatccttctgtaccgagacagtctctacatgcgaccctgaacacgatccaccacatcattgcagtagaggggcgacctgtatcagtctgccacacgggtacacctgcttttgcccactcggtacaactggcatttattgcgaacaagctctgattctcattgtgattttggagaaacctaaacctgctgagaggaaagtaaaaaaagaggccctgagtattagcgatccctctttccgatctaacgagctcagctggatgtcgtttgcatctttccacgtcagaaagaagactcatatacagctgcagttccagccgctagcagccgacggcattcttttttatgccgcccagcatctcaaggcacaatccggagactttttgtgcattagcctcgtcaattcttctgtgcagttacgatacaacctcggcgaccgcacgataatcctggaaacactacagaaggtgaccatcaacggcagtacctggcacattatcaaagccggccgcgtgggtgccgagggctatctcgatttggacggaatcaacgttaccgagaaagcttcaacgaagatgtctagtctggacaccaacacggacttctacattggtggcgtcagttctctgaatctggtgaaccccatggctatcgagaacgagccagtaggatttcagggctgcattagacaggtgatcatcaacaatcaggagctgcaactgactgaatttggcgccaagggcggcagtaatgtaggggattgtgacggcacggcctgtggttacaacacatgcaggaatggcggggagtgtaccgtgaatggaacgaccttctcgtgccgctgtctgccagattgggctggcaacacctgcaaccagagcgtcagttgtttgaacaacctctgcttgcatcagtcattgtgtatcccggatcaaagtttttcttactcttgcctgtgcacgttgggatgggtgggtcgatactgtgaaaacaaaacctctttctccactgctaaatttatgggcaactcttatattaagtatattgacccgaactatcgcatgcgcaacctccagttcaccacgatatcattgaacttctccactaccaagactgagggattgatcgtttggatgggaatcgctcagaacgaggagaacgacttccttgctattggtctccataaccagacactcaaaattgctgtgaaccttggggagcggatcagtgtgccgatgtcctataacaatggtactttctgttgcaacaagtggcaccacgttgtggtgatacaaaatcagactctgattaaagcctacattaataactcacttatcctaagcgaggatattgatccccataagaattttgtggctctgaactatgacgggatatgctacctaggtggcttcgaatacggacggaaggtgaacatagtcacacaggaaattttcaaaacaaattttgtgggcaaaattaaagatgtggtcttcttccaagagcccaaaaatatcgagctgataaagctggaggggtacaacgtctatgacggagatgaacagaatgaggtgacctag

SEQ ID NO: 111080 - DNA, 9498 bp, Artificial Sequence
  derived and/or modified sequence
atgacggacaagagtatcgtgatccttagcctaatggtttttcattcatcctttataaacggcaagacttgtagacgtcagctagtggaagaatggcaccctcagccttcgagctatgtggtcaactggaccctgacggagaacatctgcctggacttttatagagactgctggtttttgggagtgaatacaaagatcgatacttccgggaatcaggccgtgccacagatttgccccttgcagatccagctcggcgacattctggtgattagtagtgaaccaagcctgcagttccccgaaattaatctgatgaatgtctccgagacctccttcgttggatgtgtacagaatactaccaccgaagaccagctgttgtttggatgccggctgaaagggatgcacacagtcaattcaaagtggcttagtgtggggactcactacttcattaccgtgatggcaagtgggccgtccccctgccctcttgggctgaggctgaacgtaaccgtcaaacagcaattctgtcaagaaagtcttagctcagaattctgcagcggtcacggcaaatgcctctccgaggcatggtcaaagacgtactcctgccattgtcagcccccatttagtggaaagtattgccaggagctggatgcatgttcatttaaaccatgtaaaaacaatgggtcctgcattaataaacgggagaactgggacgagcaagcctacgagtgcgtgtgtcatccaccatttaccggcaagaactgtagcgagatcatcggacagtgccagcctcacgtgtgcttccacggcaattgctccaatatcacaagcaactccttcatttgtgagtgtgatgaacaattttccggacctttctgtgaagtaagcgctaagccctgcgtctctctccttttttggaagcgtggcatctgtcccaattccagcagtgcctacacctatgagtgccccaaaggcagctcgtctcaaaatggggagacggacgttagcgaattttctttagtgccttgccagaatggcacagactgcatcaagatttccaatgatgtcatgtgtatttgttctccgatctttactgatttgctctgcaaaagcatccaaacgtcttgcgaaagctttcctctgcgcaacaacgccacatgcaagaaatgcgagaaagattatccatgttcttgtatatcaggctttacggaaaagaattgcgaaaaggcaattgatcactgcaaactgctgtcaatcaattgccttaacgaggagtggtgttttaacatcatcgggcgcttcaagtacgtgtgcattcccggttgcacaaaaaatccttgctggtttctgaagaacgtctacctgatacatcagcacctttgctattgcggggtaacatttcacgggatatgccaggacaagggtcctgcccagtttgagtatgtgtggcagctgggattcgcaggatctgaaggcgagaagtgtcagggtgtgatagacgcatacttcttcctcgccgcaaattgtacagaggacgcgacgtatgtgaacgaccctgaagataataatagcagctgttggtttccacacgaaggaaccaaggaaatttgtgccaacggctgcagctgtttatcggaggaagatagtcaagaatatcgttacctttgtttcctccgctgggccggaaatatgtatctggaaaataccactgacgaccaggaaaacgaatgccagcatgaggctgtttgtaaggacgaaatcaataggcctcgatgctcctgctctctgtcatacatcggcaggctctgcgtggtcaatgtggactactgtctggggaatcatagcatcagcgtccatggcttgtgcctcgccctcagtcacaactgcaactgcagcgggcttcaacgctatgagagaaacatttgcgagattgacacagaggattgtaaatcagccagctgcaaaaatggaacaacatctacacatctgcgcggatatttctttcgcaaatgcgtgcctggatttaaaggcactcagtgtgagatcgatattgacgagtgcgcctctcacccctgtaaaaacggggctacctgtatagaccagcccggcaattacttttgccaatgtgttcctccttttaaggtagtcgacggttttagttgtctctgtaatccgggctatgtgggaatccggtgcgaacaggatatagacgactgtatcctaaacgcctgcgaacataattctacatgtaaggatttgcacctctcgtatcaatgcgtctgtttaagcgactgggagggcaacttttgtgaacaggagagtaatgagtgcaaaatgaacccatgcaagaataattccacctgtacagatttgtataagagttatcggtgtgagtgcactagtgggtggacaggacagaactgctctgaggagataaatgaatgtgactccgacccatgcatgaacggtgggctttgccatgagtccaccattcctggacagtttgtatgcctctgtccccccctttacaccgggcagttctgtcatcagaggtacaacctttgcgacctgctccacaacccttgtcggaataattctacatgcctcgctttagttgacgcaaatcaacattgcatttgcagagaagaatttgaaggcaagaactgcgagatcgacgtgaaagattgccttttcctgtcatgtcaagactatggggactgcgaagacatggtgaacaattttaggtgtatttgccgccctggcttctctgggtctctctgtgagatagaaataaatgaatgcagctctgagccctgtaagaacaatgggacctgtgtagacctgacaaaccggtttttttgtaattgcgagcctgagtatcacggccccttttgtgagctggatgttaataagtgcaaaatttcaccgtgcctcgatgaggaaaactgtgtctaccgcactgatggctataattgcctgtgcgctcctgggtatacggggatcaactgtgaaatcaacctagacgagtgtttatctgaaccctgtctgcacgacggtgtctgcatcgatggcattaaccattacacttgtgactgcaagtctggcttcttcggtacacactgcgaaaccaatgccaacgactgtctatccaatccctgcctgcatggtcggtgcaccgagttaatcaacgagtatccctgcagttgtgacgccgacggcacaagcactcagtgcaagatcaagatcaatgattgtacctccatcccatgcatgaacgagggcttctgccagaagtctgcacacggctttacatgcatttgcccaagaggatataccggagcctactgcgagaaaagcatcgataattgtgctgaacccgaactcaactcagtcatctgtcttaacggggggatctgcgtggacgggcctgggcatacatttgactgcagatgtctgcccggctttagcggccagttctgtgagattaacattaatgagtgcagctccagcccttgcctacatggtgccgactgtgaggaccacatcaatgggtacgtttgcaaatgccagcccggctggagcggccaccactgcgagaacgagcttgaatgcatacctaactcatgcgtacacgagctatgtatggaaaacgagccaggatccacttgcctctgcactcctgggtttatgacttgctccataggcttgctatgtggagatgagattagacgaatcacttgcctcaccccaattttccagaggactgatcccatcagtacacagacctatacaatacctccatccgagaccctggtgtcatcattcccaagcattaaagctacccggattcctgcaatcatggatacatatcccgtcgatcaggggcccaaacagaccggcatagtgaagcacgacattttaccaacaacgggacttgcgacactgcgaatctcaaccccgctggagtcctacctgctgcaggagctcatcgttacgcgcgagctctcagccaaacattcccttctctcctcagcagatgtgtctagttccaggtttttaaacttcggaatacgagaccccgcccaaattgttcaggataagacctctgtttcacatatgcccattagaacgtccgccgctacactgggctttttctttccagacagaagggcccggacccccttcattatgtcctccctcatgagcgactttatctttcccacccagagcctgctcttcgagaactgtcagacagtggcactgagtgccacgcccactacatccgtgatacgatctatccccggagccgacattgaactaaataggcaatcactgctttctagaggcttcctattgatcgccgcctcaattagcgccactcctgttgtctctcggggggcccaagaggacatcgaggaatattcggcagatagtctgatctcgcggcgagagcattggaggctgctaagtccgagtatgtctccaatatttccagccaaagtcataataagcaagcaagtcaccattcttaactcatccgccctacaccgttttagcaccaaggcgtttaaccctagcgagtaccaggcaattacggaagcctcaagcaatcagcggctgaccaatataaagtcacaggcagccgactcactcagagagctgtcgcagacttgcgctacgtgttccatgacagaaatcaagtcaagcagggagttcagcgaccaggtccttcatagtaagcaatctcatttttatgagaccttttggatgaactctgccattctcgcctcctggtacgccctgatgggggctcaaacaatcacaagcggtcactctttctcaagcgccacagagattactccgagcgttgcgttcactgaagttccaagtctttttccaagcaaaaagagcgcaaaacgcaccattctaagctcttcactagaggaatcaatcacactctccagcaaccttgacgtgaatctgtgcctggataaaacttgcttgtcaatcgtcccctcgcagacaatcagctcagacctgatgaactctgatcttacatccaagatgacgaccgatgaactctccgtgtctgagaatatactgaagcttctcaagataagacagtacgggatcacaatgggacccaccgaggtgctgaaccaggagtcactgctagacatggaaaagagtaaaggatcacacaccctttttaaacttcatcccagcgacagctccttagacttcgaattgaatctgcagatttatccagacgtgactttaaaaacatactcggaaatcactcacgctaatgacttcaaaaataacctgcctccactcactggctccgtacccgacttttcagaggtcactactaatgtagccttttacaccgtgtctgccacaccagccttgtcaatccaaacatcaagttccatgtccgtgatccgccccgactggccatacttcacggactacatgacgtccctgaagaaagaggtcaagacaagcagtgagtggagtaaatgggagcttcagccgagcgttcaatatcaagagttccctacggcctcgagacacctgccgttcacccggagcctgaccctgagtagcctggagtcaatcctggcacctcagaggctgatgatcagcgacttcagctgcgtgagatattatggagattcttacctggaatttcagaacgtagccctcaatcctcagaacaatatatccctggaattccagacatttagcagctacggacttctgctttatgttaagcaggatagcaatcttgttgatggcttctttattcaattatttatagagaacggtactttgaaataccatttctattgtcctggggaagccaaatttaagagcatcaatactaccgtcagggtggataatggtcagaaatacacccttttgattcgtcaggaattggacccttgcaatgccgagctgacaatactcggacgcaacacccagatttgtgaatcaataaatcacgttctggggaaacctttgccgaaaagcggaagtgtctttattggaggatttccggacttgcatggcaaaatccagatgcctgtgcctgtgaaaaattttaccggatgcatcgaagtaatagaaatcaacaattggaggtcttttataccctctaaggccgtcaagaactaccatattaacaattgccggagccaggggttcatgctgtcacccaccgctagcttcgtggatgcaagtgatgtgacccagggtgtggacacgatgtggacttccgtgtctccttccgttgccgcaccttcagtctgccaacaggatgtttgtcacaatggcggaacatgccacgctatctttctatcaagcgggatagtctcattccagtgtgactgccctttacacttcactggaagattctgcgagaaggatgctggcttgtttttcccatccttcaacggaaatagttatcttgagttgccattcttgaaattcgtgcttgaaaaggaacacaaccggacggtgactatttacctgaccataaaaacgaacagtttgaacggcactatactgtactcaaatggcaacaactgtggtaaacagtttctgcacctgttcctggtggagggccgcccctcagtgaaatacgggtgtgggaacagtcagaacattctgacagtctctgccaattactctatcaacactaatgcgttcacccccataaccatccgttacaccacgcccgtgggtagtccgggagtggtttgcatgatagaaatgaccgcagacggaaagcctcctgtgcagaagaaggacactgagatctctcacgcaagtcaggcgtattttgagtctatgtttctgggccacatcccagccaacgtccagattcacaagaaagcaggccccgtatacgggtttagggggtgcattctggatctgcaggtcaataacaaggaatttttcataattgatgaggctcgccatggaaagaatattgaaaactgccacgtgccttggtgtgcccatcacttgtgcagaaacaacggcacctgcattagtgacaacgaaaatctgttttgtgagtgtccccgactctactcggggaagctgtgccagtttgctagctgtgagaataacccatgtggcaacggagcaacgtgtgtgcctaagtccggtactgatatcgtctgtctttgcccatacgggcgctccggccccctgtgcacagatgcaattaacatcacccagcctcgattctctgggactgacgccttcggctatacgagtttccttgcatacagccgaatctccgacatatcttttcattatgagtttcacctcaaattccagctcgccaacaatcactcagccctccagaacaatctgatcttcttcacaggccagaaggggcacggtctgaatggagatgatttcctcgcagtggggctgttaaacggctctgtggtttactcctacaatcttggcagtggaattgcctctatccgtagcgagcctctgaacctgtcactgggggtccacaccgtgcacctggggaagttctttcaggaaggctggcttaaggtggacgaccataagaataaatctatcattgccccgggcaggctcgtcggtctcaacgtcttctcacagttctatgttggtggatactctgagtatacacctgacttattgccaaacggggcagacttcaagaacgggtttcaggggtgtatttttacattacaggttcggacagaaaaagacggccattttcgaggcctgggaaaccctgagggacatcctaatgccggacggtccgtaggtcagtgccacgcctccccatgttccctcatgaagtgtggtaacggaggaacatgcatcgagtccggtacctccgtctactgcaactgtactaccggatggaaagggtcattttgcaccgagacggtgtctacatgcgaccccgagcatgatcctccacaccactgctcacgaggggccacttgtatttctcttccccacggctatacttgcttttgcccactgggaaccactgggatctattgcgagcaggccctgatactgattgtcatactggagaaacctaaaccagcagagcggaaagtgaagaaagaggccctgtccatttctgatccgtcatttcgctctaatgagctcagctggatgtcttttgccagttttcatgtcagaaaaaagacacatatccagctacaatttcagccactggctgccgatggaatattattttatgctgcacagcacctgaaggcccagtccggggacttcctgtgtataagtctggtgaattcctcagtccagctgaggtacaaccttggggatagaaccattattctcgaaaccttacagaaggtgactattaacggaagcacgtggcatatcatcaaggcaggtagagtcggagccgaaggatatctggacttagacggcatcaacgtcactgaaaaggccagtacaaagatgagtagcttagatacaaatacagatttttacataggtggtgtaagcagcttgaatctagttaacccaatggctattgagaatgagcctgtgggtttccagggatgtattagacaggttatcatcaataatcaggagttgcagctcaccgaatttggagctaaaggaggctccaacgtgggggattgcgacggtacggcttgtgggtataacacgtgtcgtaatggcggagagtgtaccgtgaacggcactacgttctcctgccgctgcctgcccgattgggcggggaatacctgcaatcagtcagtctcttgtttgaataacttgtgtttacatcagagcctttgcattcccgaccaatctttcagctacagctgcctctgtactctaggatgggtgggacggtattgcgaaaacaagacgtcatttagtactgccaaattcatgggcaatagctacattaaatatatcgaccccaattacagaatgaggaacctccagtttacaaccatctccctgaacttctcgacaaccaagactgagggcttgattgtgtggatgggaatcgcccagaatgaggaaaatgattttctggcgataggcctgcacaaccagacccttaagattgccgtgaatttaggggagagaatcagcgtcccaatgagttacaacaatggcaccttttgttgcaacaagtggcaccacgtagtcgtgatccagaaccagactcttatcaaggcctacatcaacaattctcttatactcagcgaggacattgatcctcataaaaattttgtagctctcaattatgatggtatatgctatttggggggattcgagtacggacgcaaggtcaacattgtaacccaggaaatcttcaagaccaacttcgtgggtaaaatcaaagacgtcgttttctttcaggagccaaagaatatcgagctgatcaagttggaggggtataacgtgtacgacggcgacgaacagaacgaggtgacatag

SEQ ID NO: 111081 - DNA, 9498 bp, Artificial Sequence
  derived and/or modified sequence
atgacagacaagagcatcgtcatcctgagcctgatggtgttccacagcagcttcatcaacgggaagacctgccggcggcagctggtggaggagtggcacccccagcccagcagctatgtggtgaactggaccctgacagagaacatctgcctggacttctacagagactgctggttcctgggcgtgaacaccaagattgacaccagcggcaaccaggccgtgccccagatctgccccctgcagatccagctgggggacatcctggtgatcagcagcgagcccagcctgcagtttcctgagatcaacctgatgaatgtgtctgagaccagctttgtgggctgtgtgcagaacaccaccacagaggaccagctgctgtttggctgccgcctgaagggcatgcacacagtgaacagcaagtggctgtctgtgggcacccactacttcatcaccgtgatggccagcggccccagcccctgccccctgggcctgcggctgaatgtgacagtgaagcagcagttctgccaggagagcctgagcagcgagttctgcagcggccacggcaagtgcctgtctgaggcctggagcaagacctacagctgccactgccagccccccttcagcggcaagtactgccaggagctggatgcctgcagcttcaagccctgcaagaacaacggcagctgcatcaacaagcgggagaactgggatgagcaggcctatgaatgtgtgtgccacccccccttcaccgggaagaactgcagcgagatcatcggccagtgccagccccacgtgtgcttccacggcaactgcagcaacatcaccagcaacagcttcatctgtgaatgtgatgagcagttcagcggccccttctgtgaggtgtctgccaagccctgtgtgtccctgctcttctggaagaggggcatctgccccaacagcagcagcgcctacacctatgaatgtcccaagggcagcagcagccagaatggagaaacagatgtgtctgagttcagcctggtgccctgccagaatggaacagactgcatcaagatcagcaatgatgtgatgtgcatctgcagccccatcttcacagacctgctgtgcaagagcatccagaccagctgtgagagcttccccctgaggaacaatgccacctgcaagaagtgtgagaaggactacccctgcagctgcatcagcggcttcacagagaagaactgtgagaaggccatcgaccactgcaagctgctgagcatcaactgcctgaatgaggagtggtgcttcaacatcatcggccgcttcaagtatgtgtgcatccctggctgcaccaagaacccctgctggttcctgaagaatgtgtacctgatccaccagcacctgtgctactgtggggtgaccttccacggcatctgccaggacaagggccctgcccagtttgaatatgtgtggcagctgggctttgctggcagcgagggggagaagtgccagggcgtgattgatgcctacttcttcctggccgccaactgcacagaagatgccacctacgtgaatgaccctgaggacaacaacagcagctgctggttcccccatgagggcaccaaggagatctgtgccaacggctgcagctgcctgtctgaggaggacagccaggagtaccgctacctgtgcttcctgcgctgggccggcaacatgtacctggagaacaccacagatgaccaggagaatgaatgccagcatgaagctgtgtgcaaggatgagatcaaccggccccgctgcagctgcagcctgagctacatcggccgcctgtgtgtggtgaatgtggactactgcctgggcaaccacagcatctctgtgcacggcctgtgcctggccctgagccacaactgcaactgcagcggcctgcagagatatgaaagaaacatctgtgaaattgacacagaggactgcaagagcgccagctgcaagaatggcaccaccagcacccacctgcggggctacttcttcagaaaatgtgtgcccggcttcaagggcacccagtgtgaaattgatattgatgaatgtgccagccacccctgcaagaatggagccacctgcatcgaccagcccggcaactacttctgccagtgtgtgccccccttcaaggtggtggatggcttcagctgcctgtgcaaccctggctacgtgggcatccgctgtgagcaggacattgatgactgcatcctgaatgcctgtgagcacaacagcacctgcaaggacctgcacctgagctaccagtgtgtgtgcctgagtgactgggagggcaacttctgtgagcaggagagcaatgaatgcaagatgaacccctgcaagaacaacagcacctgcacagacctgtacaagagctaccgctgtgagtgcaccagcggctggacaggccagaactgcagcgaggagatcaatgaatgtgacagcgacccctgcatgaatggaggcctgtgccacgagagcaccatccctggccagtttgtgtgcctgtgcccccccctgtacacaggccagttctgccaccagcgctacaacctgtgtgacctgctgcacaacccctgcaggaacaacagcacctgcctggccctggtggatgccaaccagcactgcatctgccgggaggagtttgagggcaagaactgtgaaattgatgtgaaggactgcctcttcctgagctgccaggactatggagactgtgaggacatggtgaacaacttccgctgcatctgccggcccggcttcagcggcagcctgtgtgaaattgagatcaatgaatgtagcagcgagccctgcaagaacaacggcacctgtgtggacctgaccaaccgcttcttctgcaactgtgagcctgagtaccacggccccttctgtgagctggatgtgaacaagtgcaagatcagcccctgcctggatgaggagaactgtgtgtacagaacagatggctacaactgcctgtgtgcccctggctacacaggcatcaactgtgagatcaacctggatgaatgtctgtctgagccctgcctgcatgatggagtgtgcattgatggcatcaaccactacacctgtgactgcaagagcggcttcttcggcacccactgtgagaccaatgccaatgactgcctgagcaacccctgcctgcacggccgctgcacagagctgatcaatgagtacccctgcagctgtgatgctgatggcaccagcacccagtgcaagatcaagatcaatgactgcaccagcatcccctgcatgaatgaaggcttctgccagaagagcgcccacggcttcacctgcatctgcccccggggctacaccggggcctactgtgagaagagcattgacaactgtgccgagcctgagctgaacagcgtcatctgcctgaatggaggcatctgtgtggatggccctggccacacctttgactgccgctgcctgcccggcttcagcggccagttctgtgagatcaacatcaatgaatgtagcagcagcccctgcctgcacggggctgactgtgaggaccacatcaatggctacgtgtgcaagtgccagcccggctggagcggccaccactgtgaaaatgagctggagtgcatccccaacagctgtgtgcatgagctgtgcatggagaatgaacctggcagcacctgcctgtgcaccccaggcttcatgacctgcagcatcggcctgctgtgtggagatgagatccgccgcatcacctgcctgacccccatcttccagaggacagaccccatcagcacccagacctacaccatcccccccagcgagaccctggtgagcagcttccccagcatcaaggccacccgcatcccagccatcatggacacctaccctgtggaccagggccccaagcagacaggaattgtgaagcatgacatcctgcccaccaccggcctggccaccctgcgcatcagcacccccctggagagctacctgctgcaggagctgattgtgacccgggagctgagcgccaagcacagcctgctgagcagcgcagatgtgagcagcagccgcttcctgaactttggcatccgggaccctgcccagatcgtgcaggacaagacctctgtgagccacatgcccatccgcaccagcgctgccaccctgggcttcttcttcccagacagaagagcccggacccccttcatcatgagcagcctgatgtctgacttcatcttccccacccagagcctgctgtttgagaactgccagacagtggccctgagcgccacccccaccaccagcgtcatccgcagcatccctggagctgacatcgagctgaaccggcagagcctgctgagccggggcttcctgctgattgctgccagcatcagcgccacccctgtggtgtccagaggagcccaggaggacatcgaggagtacagcgctgacagcctcatcagccggcgggagcactggaggctgctgagccccagcatgagccccatcttccctgccaaggtgatcatcagcaagcaggtgaccatcctgaacagcagcgccctgcaccgcttcagcaccaaggccttcaaccccagcgagtaccaggccatcacagaggccagcagcaaccagaggctgaccaacatcaagagccaggccgctgacagcctgcgggagctgagccagacctgtgccacctgcagcatgacagagatcaagagcagccgggagttcagtgaccaggtgctgcacagcaagcagagccacttctatgagaccttctggatgaacagcgccatcctggcctcctggtacgccctgatgggcgcccagaccatcaccagcggccacagcttcagcagcgccacagagatcacccccagcgtggccttcacagaggtgcccagcctcttccccagcaagaagagcgccaagaggaccatcctgagcagcagcctggaggagagcatcaccctgagcagcaacctggatgtgaacctgtgcctggacaagacctgcctgagcatcgtgcccagccagaccatcagcagtgacctgatgaacagcgacctgaccagcaagatgaccacagatgagctgtctgtgtctgagaacatcctgaagctgctgaagatccggcagtatggcatcaccatgggccccacagaggtgctgaaccaggagagcctgctggacatggagaagagcaagggcagccacaccctcttcaagctgcaccccagcgacagcagcctggactttgagctgaacctgcagatctacccagatgtgaccctgaagacctacagcgagatcacccacgccaatgacttcaagaacaacctgccccccctgaccggctctgtgcctgacttcagcgaggtgaccaccaacgtggccttctacacagtgtctgccaccccagccctgagcatccagaccagcagctccatgtctgtcatccggccagactggccctacttcacagactacatgaccagcctgaagaaggaggtgaagaccagcagcgagtggagcaagtgggagctgcagcccagcgtgcagtaccaggagttccccacagccagccgccacctgcccttcaccaggagcctgaccctgagcagcctggagagcatcctggccccccagaggctgatgatcagtgacttcagctgtgtgcgctactatggagacagctacctggagttccagaatgtggccctgaacccccagaacaacatcagcctggagttccagaccttcagcagctatggcctgctgctgtatgtgaagcaggacagcaacctggtggatggcttcttcatccagctgttcattgaaaatggcaccctgaagtaccacttctactgccctggagaggccaagttcaagagcatcaacaccaccgtgcgggtggacaatggccagaagtacaccctgctgatccggcaggagctggacccctgcaatgctgagctgaccatcctgggcaggaacacccagatctgtgagagcatcaaccacgtgctgggcaagcccctgcccaagagcggcagcgtcttcatcggcggcttcccagacctgcacggcaagatccagatgcctgtgcctgtgaagaacttcaccggctgcatcgaggtgattgagatcaacaactggaggagcttcatccccagcaaggctgtgaagaactaccacatcaacaactgccgcagccagggcttcatgctgagccccacagccagctttgtggatgccagtgatgtgacccagggcgtggacaccatgtggacctctgtgagccccagcgtggccgcccccagcgtgtgccagcaggatgtgtgccacaacggcggcacctgccacgccatcttcctgagcagcggcatcgtgtccttccagtgtgactgccccctgcacttcaccggccgcttctgtgagaaggatgctggcctcttcttccccagcttcaatggaaacagctacctggagctgcccttcctgaagtttgtgctggagaaggagcacaacagaacagtgaccatctacctgaccatcaagaccaacagcctgaatggcaccatcctgtacagcaatggaaacaactgtgggaagcagttcctgcacctgttcctggtggagggccggcccagcgtgaagtatggctgcggcaacagccagaacatcctgactgtgtctgccaactacagcatcaacaccaatgccttcacccccatcaccatccgctacaccacccctgtgggcagccctggggtggtgtgcatgattgagatgacagcagatggcaagccccctgtgcagaagaaggacacagagatcagccacgccagccaggcctactttgagagcatgttcctgggccacatcccagccaacgtgcagatccacaagaaggccggccctgtgtatggcttccggggctgcatcctggacctgcaggtgaacaacaaggagttcttcatcattgatgaggcccggcacggcaagaacatcgagaactgccacgtgccctggtgtgcccaccacctgtgcagaaataatggcacctgcatcagtgacaatgaaaatctcttctgtgagtgcccccggctgtacagcggcaagctgtgccagtttgccagctgtgagaacaacccctgtggaaatggagccacctgtgtgcccaagagcggcacagacatcgtgtgcctgtgcccctacggccgcagcggccccctgtgcacagatgccatcaacatcacccagccccgcttctctggaacagatgccttcggctacaccagcttcctggcctacagccgcatcagtgacatctccttccactatgagttccacctgaagttccagctggccaacaaccacagcgccctgcagaacaacctgatcttcttcaccggccagaagggccacggcctgaatggagatgacttcctggccgtgggcctgctgaatggatctgtggtgtacagctacaacctgggcagcggcatcgccagcatccgctctgagcccctgaacctgagcctgggcgtgcacacagtgcacctgggcaagttcttccaggagggctggctgaaggtggatgaccacaagaacaagagcatcatcgcccctggccgcctggtgggcctgaatgtgttcagccagttctacgtgggcggctacagcgagtacaccccagacctgctgcccaatggagctgacttcaagaatggcttccagggctgcatcttcaccctgcaggtgaggacagagaaggatggccacttccggggcctgggcaaccctgagggccaccccaatgccggccgctctgtgggccagtgccacgccagcccctgcagcctgatgaagtgtggaaatggaggcacctgcatcgagagcggcacctctgtgtactgcaactgcaccaccggctggaagggcagcttctgcacagagaccgtgtccacctgtgaccctgagcatgaccccccccaccactgcagcagaggagccacctgcatcagcctgccccacggctacacctgcttctgccccctgggcaccaccggcatctactgtgagcaggccctgatcctgattgtcatcctggagaagcccaagccagctgagaggaaggtgaagaaggaggccctgagcatcagtgaccccagcttccgcagcaatgagctgtcctggatgagctttgccagcttccacgtgaggaagaagacccacatccagctgcagttccagcccctggccgcagatggcatcctcttctatgctgcccagcacctgaaggcccagagcggggacttcctgtgcatcagcctggtgaacagctctgtgcagctgcgctacaacctgggggacaggaccatcatcctggagaccctgcagaaggtgaccatcaatggcagcacctggcacatcatcaaggccggccgggtgggcgctgagggctacctggacctggatggcatcaacgtgacagagaaggccagcaccaagatgagcagcctggacaccaacacagacttctacatcggcggcgtgagcagcctgaacctggtgaaccccatggccattgaaaatgaacctgtgggcttccagggctgcatccggcaggtgatcatcaacaaccaggagctgcagctgacagaatttggagccaagggcggcagcaatgtgggggactgtgatggaacagcctgtggctacaacacctgcagaaatggaggagagtgcaccgtgaatggcaccaccttcagctgccgctgcctgcctgactgggccggcaacacctgcaaccagagcgtgtcctgcctgaacaacctgtgcctgcaccagagcctgtgcatcccagaccagagcttctcctacagctgcctgtgcaccctgggctgggtgggccgctactgtgagaacaagaccagcttcagcacagccaagttcatgggcaacagctacatcaagtacatcgaccccaactacaggatgaggaacctgcagttcaccaccatcagcctgaacttcagcaccaccaagacagagggcctcatcgtgtggatgggcatcgcccagaatgaggagaatgacttcctggccatcggcctgcacaaccagaccctgaagattgctgtgaacctgggggagcgcatctctgtgcccatgagctacaacaacggcaccttctgctgcaacaagtggcaccacgtggtggtgatccagaaccagaccctcatcaaggcctacatcaacaacagcctcatcctgtctgaagatattgacccccacaagaactttgtggccctgaactatgatggcatctgctacctgggcggctttgaatatggcaggaaggtgaacatcgtgacccaggagatcttcaagaccaactttgtgggcaagatcaaggatgtggtgttcttccaggagcccaagaacatcgagctgatcaagctggagggctacaacgtgtatgatggagatgagcagaatgaggtgacctag

SEQ ID NO: 111082 - DNA, 9498 bp, Artificial Sequence
  derived and/or modified sequence
atgaccgacaagagcatcgtgatcctgagcctgatggtgttccacagcagtttcatcaacggaaagacgtgccgtaggcagctggtagaagaatggcatcctcagccaagcagctatgtagtgaactggacactgacagaaaacatttgcctggacttctatcgggactgttggttccttggcgttaatacgaagatcgacacatcgggcaatcaagccgttccccagatatgcccccttcagatccagctgggcgacattctcgtgatttcctcagaaccctcactgcagttcccggaaattaacctgatgaacgtgtccgaaacaagctttgtgggatgtgtccagaataccaccaccgaggaccagctcctgttcggctgtcgattgaagggaatgcatacggttaactcaaagtggctatcagttgggacacattatttcataaccgtgatggcctccggacctagcccatgtcctctggggctccgactcaacgtgaccgttaaacagcagttttgtcaggaaagcttgagctcagagttttgttctggccatggcaagtgcttgagtgaggcctggtcaaagacctatagttgccactgccagcccccttttagtggcaagtactgccaggaactggacgcctgctcttttaaaccttgcaaaaataacggatcttgtatcaataaaagggaaaattgggacgaacaggcatacgaatgtgtgtgccaccccccatttactgggaagaattgttcagagataatcggccagtgtcagcctcatgtatgcttccacggcaactgctccaatataacatccaactcctttatttgcgagtgtgacgaacagttctctgggccattttgcgaagtaagtgcaaaaccttgtgtgagtttgttgttctggaaaaggggcatctgccctaacagcagcagcgcctatacgtacgagtgtcccaaaggatcctcttcacagaatggcgaaacagacgtgagtgagttctcactggtgccctgccagaacgggactgactgcattaagatttctaacgatgttatgtgcatttgctcccctatttttactgaccttctatgtaagtctatccagacgagctgcgagagtttccctctgagaaataatgctacttgtaaaaagtgtgagaaggactacccttgctcctgcatttcagggttcaccgaaaagaattgcgaaaaggccatcgaccactgcaaactcttgagtataaattgcctgaacgaggaatggtgctttaatattatcggccggttcaagtacgtctgtataccggggtgcaccaaaaacccttgttggtttctgaagaacgtctatctaatacatcagcatttgtgttactgcggagttacgtttcatggcatctgtcaggataaggggcctgcccagtttgaatatgtttggcagctggggtttgcagggtccgaaggcgaaaaatgtcagggtgtcatagacgcttatttctttttggctgccaattgtacggaggatgccacctatgttaatgacccagaggataacaacagctcgtgttggtttccccatgagggaactaaagagatctgcgccaacggatgctcctgcctctctgaggaagactctcaggagtatagatatctatgttttctccgttgggccggcaacatgtacctggaaaatactaccgatgaccaagagaacgaatgccaacacgaagcagtatgtaaggatgaaattaaccggcctaggtgttcttgtagtctctcttacatcgggaggctgtgcgttgttaatgtggactattgcctcggaaatcattctatctcagtacatggcctgtgtctggcgttgtcccacaactgtaactgctctggcctccagaggtacgagaggaacatctgcgagatcgacactgaagattgcaagtctgcctcgtgtaaaaacgggaccactagcacgcatctgcgcggttatttttttcggaagtgtgtgcccgggtttaaagggacccagtgcgagattgacatcgacgaatgcgcctcccatccttgcaagaacggtgctacttgcatcgaccagccgggtaactacttctgtcagtgtgtgcccccattcaaggtggtcgatggtttttcatgtctgtgcaaccctgggtacgtgggcatccgatgcgaacaggacatcgatgattgcatccttaatgcttgcgagcataactcgacttgtaaggatcttcacctgtcttaccagtgcgtgtgcctgtccgattgggagggcaacttttgtgaacaggaatcgaatgagtgtaagatgaacccatgcaaaaacaattcgacctgtactgacctgtacaagagttaccgttgcgaatgtaccagcgggtggacgggacagaactgcagcgaagaaatcaatgaatgcgactcagacccctgcatgaacggagggctctgccatgagtcaaccatcccaggccaatttgtgtgtctgtgccctcctctttacactggccagttctgccaccaaaggtacaatttatgtgacctgctgcacaatccctgccgcaacaacagcacctgcctggcccttgttgatgcaaatcaacactgcatctgtagggaggaattcgagggcaaaaactgtgaaattgatgtgaaagactgtctgtttctgtcttgccaggactacggggactgcgaggatatggtgaataatttccggtgcatatgtcgacccggattcagcggctccctctgtgagatcgagattaacgagtgctcctccgaaccgtgtaaaaataatggcacctgcgtggacctgaccaaccggtttttttgtaattgcgagcctgagtatcacggccctttttgtgagttagatgtgaacaaatgtaaaatttctccctgcctcgatgaggagaactgtgtttacaggactgatggatacaattgcctctgcgctcccggatacacaggcattaattgcgagataaatcttgacgaatgcctcagcgagccctgtctccacgatggggtgtgcatcgacggcataaaccattacacctgcgactgcaagtccggattttttggtacccactgtgaaaccaacgcaaacgactgtctgagtaacccgtgtttacatggccgctgcaccgagttaatcaacgagtacccctgctcctgcgatgcagatggcacttcaacacagtgcaagatcaagattaacgattgtacatctataccgtgcatgaatgagggattctgtcagaagagtgctcacgggttcacatgtatctgtccccggggatatactggggcgtactgcgagaagtccatcgacaactgcgcagaaccagaattgaattctgtcatctgtctaaatggagggatctgtgtagatggccccggccatacttttgactgccggtgcttgcctgggttttctggacagttctgcgagattaatataaacgaatgctcttcctcaccctgtctgcacggggctgactgcgaggaccacattaacgggtatgtgtgtaagtgccagcctgggtggtctgggcaccattgtgagaacgaactggagtgtatccccaacagctgcgttcatgagctctgtatggagaatgagcctggttcaacatgtttgtgtactccagggtttatgacttgtagcataggcctgctctgtggggatgaaatccggagaatcacttgcctgacccccattttccaacgcaccgaccccatatctactcaaacatatacaatcccaccaagcgagaccctagtgtcaagtttcccgtcaataaaagcgaccagaatacccgctatcatggatacctacccagtggaccaaggtcctaaacagacaggcattgtgaaacatgatatactccccaccactggcctcgcgacccttcggatctcaacaccattagagtcctaccttttgcaggagttaattgtcacccgcgaattgtcagccaagcactccctgctgtcatccgccgacgtctcaagtagccggttcttaaactttggaatccgggatcctgcgcagattgtgcaagacaaaaccagtgtgtcacatatgccaatccgcacaagcgccgctactttagggtttttctttccagaccgtagggcaagaacgccttttataatgtcctccttgatgtctgatttcatcttcccgacacagagtctcctatttgagaattgccaaacggtcgcgttgagcgcaacccccacaacttcggtcatacgctcgattcccggggcagacatagaattgaataggcagtctctcctttctcggggcttcctcctgatagcagccagcatctcagccacgcccgtagtctcgagaggcgcccaagaagatattgaagaatacagcgctgatagtttgatctctaggagggaacactggcgcctgttgtccccatcaatgtcacctatcttccctgcaaaagttatcattagcaaacaggtcaccatattgaactctagcgccctgcaccgtttcagcaccaaagcctttaaccccagcgagtatcaagccattactgaagccagttctaaccagagattaactaatatcaagagccaggctgcagactcccttagggagctatcacaaacatgcgcaacgtgttctatgaccgaaataaaatccagccgggagttctcagatcaggttctccatagcaagcagagccacttctacgagactttttggatgaattcggctatcctagcttcctggtacgcactaatgggggcccagacaattacatccggccattcgttttcgagtgccaccgagattacaccttctgtggcttttactgaagtgccttctttatttccgtctaagaagtctgcgaagcggaccatactgtcatcatcactcgaggagtccattactctttccagcaacctggacgttaatctgtgcttggacaaaacttgtctttccatagtaccttctcagactatttcctctgacttgatgaactccgatctcacgtccaagatgaccaccgatgagctgtccgtgagcgaaaatatccttaaactgttgaagatcaggcagtacggcattactatggggcccacagaagttctgaatcaagaatcccttcttgatatggagaagtctaaagggtcacacactctcttcaagctgcacccttccgactcatcgttggacttcgaactgaacctgcagatctaccctgacgtgactctcaagacttactcagagataactcacgcaaacgactttaagaataatctgcccccattgactggcagcgtcccagactttagcgaggtgacaaccaatgtcgcattctacaccgtcagcgcaacgccagcactgagtattcagactagctcctctatgtccgtcattagacctgactggccgtacttcactgattatatgactagtctcaagaaagaggtaaagacttcctccgagtggtctaagtgggagctgcaaccgtccgtgcagtatcaggaattccctacagcctcaaggcacctgccgtttacaaggtctctgaccctaagttctcttgaaagcattctggcacctcagaggctgatgatatctgactttagctgtgtacggtactatggcgattcttacttggagtttcagaatgtagctctcaaccctcaaaataatataagtctcgagtttcagacattttcatcctatggccttttactatacgtaaagcaggactctaatctcgtggatggtttcttcattcaactctttatcgaaaacgggacattgaagtaccacttctattgtccaggagaagctaagttcaagtctatcaataccaccgttagagtagacaatggccagaaatatacattgttgatcaggcaggaactggacccgtgtaacgcagagcttacaatcctgggtcgcaatactcagatctgcgagtcgatcaatcacgttctcggcaagcctctgcctaaaagtggatctgtgttcattggaggattcccggatctgcacggcaaaatccaaatgcccgtgcctgttaagaactttaccgggtgcatcgaggtgattgaaatcaataactggaggtcctttatcccgtccaaggcagtaaagaactaccatattaacaattgtcgaagtcaaggattcatgctctctcccacggcgtccttcgtcgatgcctccgatgtgacacagggcgttgacacaatgtggacgagcgtgagcccttccgtggctgctcctagtgtgtgccagcaggacgtgtgccacaacggaggcacttgccacgccattttccttagtagcggcattgtgagtttccaatgtgactgtcctctgcacttcaccggcagattctgcgaaaaggatgcaggtctgtttttcccatctttcaacgggaattcatatctcgaactccccttccttaaatttgtgctggagaaggagcacaaccggactgtgacaatctacctgactattaaaactaactctttgaacggaacgatattatactctaacggaaataactgcggaaaacaattcctgcacctttttctggtagaaggaaggcctagcgtgaagtacggctgcggtaactcgcaaaatatcctcactgtaagtgctaattacagcattaacactaacgcttttacccctataacaattagatacacaactcctgtgggaagtcccggggtggtgtgtatgatcgagatgaccgctgacggcaaacctcctgttcagaaaaaagatacagagatctcccacgcttcacaggcttatttcgaatctatgtttctaggtcacattcctgccaacgtgcaaatccataagaaggcagggcccgtgtatgggttcagggggtgtatcctggatctgcaggtcaataacaaagagtttttcattatcgatgaggcacgacatggcaaaaacattgaaaattgccacgtgccttggtgcgcccaccatctgtgtcgcaacaacggaacctgtatctcagacaatgagaaccttttttgtgagtgtcctcggttgtactctggcaagctttgtcaattcgcaagctgcgagaacaatccgtgcggaaatggggcaacatgtgtgcccaaatctggaacagatattgtctgtctctgcccttatggccggtcaggtcccttgtgcactgacgccatcaacattacacagccccgcttctccggcactgacgccttcggctatacatcctttcttgcatatagcagaattagcgacatctctttccactatgagttccacctaaagttccagttggcgaacaaccattctgctttgcagaacaatctgattttcttcaccggccaaaagggccacggcctcaacggtgatgatttcttggctgttggattactgaacggaagcgtggtttacagctacaaccttgggtctggcatcgcctctatcagatcggagcccctgaacctctccctgggggtccacaccgtgcacctcggcaaattcttccaagagggatggctcaaagtagatgaccataagaacaagtctataatcgccccaggccggctagtggggctgaatgtatttagtcagttctatgtcggcggctacagcgaatacactcccgacctgcttccgaatggcgccgacttcaaaaatggtttccagggatgtatctttactctgcaggtgcgtaccgaaaaagacggtcactttcgtggtctgggcaaccctgaaggccaccctaacgctggtcggtctgtaggccagtgccacgcctccccttgctcgctgatgaagtgcgggaatggagggacttgcatagagagcggcacctcagtctattgtaactgtactactgggtggaagggcagcttctgcacggagactgtgagcacttgcgatccagaacacgatcctcctcatcattgtagcagaggagccacatgtattagcttgccccacgggtacacatgcttttgcccgctcggaaccacaggcatctactgtgaacaggccttgatcctgatcgtgatcctggaaaaacctaaacccgctgagaggaaggtcaaaaaggaggctttgtcaatctcagacccctccttccgcagtaacgaactgagttggatgtcctttgcaagcttccacgtgagaaaaaagacccatattcagctgcaatttcagccgctggccgccgatgggattcttttttatgctgcccagcatctgaaggctcagagtggcgactttctgtgtattagcctcgtgaacagtagtgttcaactccgctacaatctgggagaccgcactattatccttgaaactctccagaaggtgactatcaatgggagtacatggcatattataaaagctgggcgtgtcggcgctgaaggatacctggaccttgatggcataaatgtgactgagaaggcctcaacaaagatgtcatcgcttgatactaatactgacttttatattggcggggtctcctccctgaacctcgtgaaccctatggctatagagaacgaaccagtgggatttcagggctgcattaggcaagtgatcatcaataatcaagagctacagctcacagaatttggagcgaaagggggcagcaatgttggcgactgcgatggtaccgcttgcggctacaatacttgcaggaatgggggtgaatgcaccgtgaacggcactacattcagctgcagatgcctgcccgattgggctgggaatacgtgtaaccagtcagtgagctgtctaaataacctctgcctacatcagtctttatgcattcctgaccagtcctttagctatagctgtctgtgtaccctcggctgggtgggccgctattgcgagaacaagacttcttttagcaccgcaaaatttatgggcaatagttatattaaatatatcgatcccaactatcgcatgcgaaacctgcaatttacaaccattagtcttaacttctctactactaagactgagggcttaattgtctggatggggatcgcccaaaatgaggagaacgatttcctggccatcgggctccacaaccagacccttaagatcgctgtgaacctcggtgaaaggatttctgttccgatgagctataataatgggaccttttgctgtaacaaatggcatcacgtggtcgtgatccagaatcaaacccttatcaaagcctacatcaataactccctgatacttagcgaggacatcgacccccataagaatttcgtggctctgaattacgatggtatctgctacctggggggctttgagtatggacggaaagttaatatcgtcactcaggaaatttttaagactaactttgttggcaagatcaaggatgtggttttttttcaggagcctaaaaacattgagttaatcaagttggagggatataatgtgtacgatggggatgagcagaacgaagtcacatag

SEQ ID NO: 111083 - DNA, 9498 bp, Artificial Sequence
  derived and/or modified sequence
atgaccgacaagagcatcgtgatcctgagcctgatggtgttccactcatcatttatcaacggcaaaacttgccggcgccaactcgtggaggaatggcacccccaacccagcagttatgtggtgaactggactctaactgagaatatatgcctggatttctaccgagattgttggtttctcggcgttaatacaaaaattgatacctccggaaaccaggccgtgcctcagatttgtccactgcaaatccaactcggggacatactagtcatttcaagcgaaccgtcactccaattccccgagatcaaccttatgaacgtgtcagaaacttcctttgttggatgcgtgcagaataccactaccgaggaccagctcctgttcggatgtagactcaaagggatgcatactgttaatagtaagtggctgagtgttgggacccactacttcattactgttatggcaagcgggccttctccgtgtccgctaggcctcaggctgaacgtcacagttaagcagcaattttgccaggaatcactgtccagtgagttttgcagtggtcatggtaagtgcctgtcagaagcctggagcaagacttacagctgccattgccaacctccattctctggcaagtattgccaggagctagacgcctgctcctttaaaccttgtaagaacaacggttcctgtattaacaaacgagagaattgggacgagcaggcatatgaatgcgtttgccatcccccttttacaggcaagaattgcagtgagattatcggccaatgccagccccacgtgtgcttccatggcaattgcagtaacatcactagtaacagcttcatctgtgaatgcgacgagcagtttagcggtcccttttgtgaggtgagcgcaaagccctgcgtcagcctccttttctggaaacgaggcatttgcccgaattcctcctctgcctacacatatgagtgcccgaagggaagctcatcgcagaatggggagactgacgtttcggagttctctctcgtcccatgtcagaacggtacggattgtattaagatctcaaacgacgtgatgtgtatctgttctccaatctttactgacctgctatgtaagtctatccaaacctcttgcgaaagttttccactgcgtaacaacgcaacttgtaaaaaatgtgagaaggattatccctgttcttgcatctctggtttcaccgaaaagaattgtgagaaggctatagaccactgtaaactgctgtctatcaactgcctgaatgaggagtggtgtttcaatattattggccgttttaaatacgtgtgcatacctggatgcaccaaaaatccctgttggttcctgaaaaacgtttatcttatacatcagcacctgtgctattgtggggtgacctttcatggcatttgccaggataagggcccggcccaatttgaatatgtctggcagctggggttcgccggatctgagggcgaaaagtgccagggggtcattgacgcatatttctttctcgccgccaactgtactgaggacgccacctacgtcaacgatcccgaagataataattcctcttgttggtttcctcatgaaggtaccaaggagatctgcgcgaacgggtgctcctgtttatccgaagaggatagccaggagtacagatacctgtgttttcttcggtgggccggaaacatgtacctggagaacacaacagacgaccaggagaacgagtgccagcacgaggcagtgtgcaaagacgagattaatcgaccgagatgctcctgttcactcagttatatcggcaggttgtgcgtcgtgaatgtggactattgcttaggtaatcactctatctcagtgcatgggctctgtctcgctctatctcacaactgcaattgttctgggttacaacgatatgagcgtaacatatgcgagattgacacagaggactgtaagtcagcatcatgcaaaaacggcacaacttcgacacacctgcgtggttattttttcaggaagtgcgtacctgggtttaagggaacccagtgcgagatagacattgatgagtgtgcctcacacccatgtaagaatggggccacctgcattgaccagcctgggaactacttttgtcaatgcgtccctcccttcaaggttgtcgatgggttctcctgcctgtgtaatcctggatacgttggaatccgctgtgagcaggatattgacgattgcatactgaatgcgtgtgagcacaatagcacgtgtaaggatctgcacctctcataccagtgcgtgtgtctgtcggattgggaaggcaacttttgtgagcaggagagcaatgagtgcaaaatgaacccttgtaaaaataattcaacctgtaccgatctctataagtcttaccgctgcgaatgcaccagtgggtggacagggcaaaattgcagcgaagagatcaatgagtgtgactctgacccgtgcatgaatggcggattgtgccacgaaagcaccatccccggacagttcgtgtgcctgtgcccaccactttatacaggccaattttgccatcagaggtataatctgtgtgatctcctgcacaacccttgtcgtaataactctacgtgtctcgccctggtggatgcaaaccagcactgcatctgtagggaagaatttgaaggaaagaactgtgagatcgatgtgaaagactgcctgttcttgtcttgccaagactatggagactgcgaagacatggtcaataactttaggtgcatatgtcggcctggtttttctggctcactatgcgaaatcgagataaacgagtgtagctcagaaccatgtaagaacaatggcacatgcgtcgatctcaccaaccgcttcttttgtaactgtgagcctgagtatcatgggcccttttgtgagctcgatgtgaacaagtgcaaaatttcaccctgcctcgacgaagagaattgcgtgtaccggaccgacggatacaactgtctctgtgctcctgggtataccggaattaattgcgagatcaatctggacgagtgcttaagcgaaccatgtttacacgacggggtttgcatcgatggcatcaatcactacacttgtgactgtaagagtggattctttggcactcactgcgagacaaacgccaacgattgcctatcgaatccctgtctgcatggtagatgcacagaactcatcaatgaatacccatgctcatgtgatgccgatggcacatctactcagtgtaagattaagattaacgactgcacttccataccttgtatgaatgagggcttctgtcagaagtctgctcatggctttacctgcatctgcccccggggctacacgggagcctattgtgaaaagtcgatagacaactgtgcagagcctgaactgaattccgtgatatgcttgaacggcggaatatgtgtcgacgggcctggacacacattcgattgccgttgccttcctggattcagcggtcagttttgtgaaataaacataaatgagtgttcaagcagcccatgtctgcatggcgcggactgcgaggaccacattaacggctatgtatgcaagtgtcaaccagggtggagcgggcaccattgcgagaatgagttagaatgtatcccaaactcatgcgtgcatgaattgtgcatggagaacgaacctggctctacttgcctgtgtactcccggtttcatgacttgctccataggcctgttgtgtggggacgaaataagaaggatcacttgccttacacctatctttcaacgaaccgatcctatctccacacaaacttataccattcccccctcggagaccttggtatcttcttttcctagcatcaaagctacaagaatcccagctatcatggacacatatcccgttgatcagggaccaaagcaaactggcatcgtaaagcatgacatcctccctacaactggcttagccacattgaggatatccacccctttggagagctatctgcttcaggaactcattgttactagggagctgagcgccaagcattccctcttatctagcgcagatgtatcttcatctcggtttctgaactttggcatcagagatcctgctcaaattgttcaggacaagacatcagtctctcacatgccaataaggacctcggcagcgacgctgggatttttcttcccggaccgacgagctcgaactccctttattatgagcagccttatgagtgattttatcttcccaacccaatcccttttgtttgaaaactgccagactgttgctttatcggccacaccaacaacatctgtgattcggtctattccaggcgctgacattgaactgaaccgacagagtctcctgagtagaggcttcctgctgattgccgcaagcataagtgccaccccagttgtcagtaggggcgctcaggaggacatagaagaatactctgccgattcgttgatctctaggcgggagcactggcgtctcctgtctcctagtatgtcaccaatctttccagccaaagtgatcatttccaagcaagtgactatattgaattcttcagctctgcacagattctccacgaaggcctttaatccctctgagtatcaggccattaccgaggcctcctcaaatcaaagattaactaacataaagtcccaggctgccgattccctaagagaactcagccagacatgtgctacctgttctatgaccgagatcaaaagcagcagagagttttcagatcaggtgcttcatagtaaacagagtcacttctacgagaccttttggatgaacagcgctattctcgcctcctggtatgcactgatgggcgcacagacgattaccagtgggcactccttttccagtgcgactgaaatcacaccatcagtggcctttactgaagtgcccagcctgttcccctcaaagaaaagcgcaaaacgtaccatactttccagttcgttagaggagtctatcacgctcagtagcaatctggatgttaacctgtgcctcgataagacctgtctgagtatcgtcccctctcaaaccataagctctgacctgatgaactctgacctcacttccaagatgacgacagatgagctgtcagtctccgagaacatactgaaacttcttaagatacgtcagtacggtatcacgatgggtcctacagaagtgctgaatcaggaatctctcctagacatggagaaaagcaaagggtcacatacactttttaaactacacccgagcgattcatcattggactttgagctgaacctgcaaatttatcctgacgtcacactcaagacatactctgaaattactcacgctaatgattttaagaataacctccctccactgaccggaagcgtgcccgacttttcagaagtcaccactaatgtggccttctacacagtgtccgcaactcctgcactcagcattcagacatcaagctccatgtccgttataagaccagactggccatattttaccgactacatgactagcttgaagaaggaagtaaagaccagctccgagtggtccaagtgggagctccaaccctcggtgcagtaccaggagtttcctacggcttccagacatcttcctttcacacggtccctcaccctttcatcactagagtccattctagccccacagaggctgatgatctcagacttctcatgtgttcgttattatggtgatagctacctggaatttcagaatgtggctcttaaccctcaaaacaacatcagcctggaattccagactttcagcagttacgggttgctgctgtatgtgaaacaagattcaaatttggtggatggcttttttatccagctcttcatagagaatggcacattgaagtatcatttttattgtccaggagaggcaaaattcaagagcattaacactaccgtgcgtgttgacaatggccagaaatacaccctgctgattagacaggagttagacccttgtaatgcagagctgaccatcctggggagaaacacacaaatttgcgaaagcatcaatcacgtgctcggcaaacctctccctaagtcagggtccgtgttcatcggaggcttccccgacctgcacggcaaaattcaaatgcccgttcctgtaaaaaactttaccggctgcattgaggtgatcgaaatcaacaactggcgcagcttcatcccgtccaaggcagttaaaaattaccatatcaacaattgcagatcgcagggattcatgttgtcccccacagcttcgtttgttgatgcatcggacgtgacccagggcgtggacacgatgtggacttcagtgtccccaagcgtggcggcaccttcagtctgccagcaggacgtatgtcacaacggtggaacatgtcacgctattttcttgagctcaggcattgtatctttccagtgtgattgtcccctgcactttacaggccgcttttgcgaaaaggatgctggccttttctttcctagtttcaatggcaacagctatttagaactgccgttcctgaagttcgtacttgagaaggaacacaacaggactgtaactatttacctgaccattaagaccaactccctgaacggcacgatcttgtattccaatggcaacaactgcgggaagcagttcctgcatctcttccttgtggagggtcggccgagcgtgaagtatgggtgcgggaatagtcagaacatcctcacagtgagtgcaaattactctatcaacacaaacgccttcacccctatcaccatccgttatacgacaccagtgggatcccccggggtggtctgcatgattgagatgactgcagacggtaagcccccagtgcaaaaaaaggacaccgagataagccatgcatcccaggcctattttgagagcatgttcctgggccacattccagctaatgtgcaaattcataagaaagccgggcccgtttatggattcagaggctgtatactggaccttcaggtgaacaataaagagttctttatcatcgacgaggctagacatggaaagaatattgaaaattgtcatgtcccatggtgcgctcatcatttatgtagaaacaatggcacgtgtatttcagacaacgagaacttattttgtgagtgccccaggctttactccggaaagctctgccagttcgccagttgcgaaaacaacccttgcggcaatggcgccacgtgtgtgcctaaaagtggaactgacattgtctgtctgtgtccttacggcaggagtggacccttgtgcacagacgctatcaacataactcagccgcgcttttcaggtacagatgcctttggatacacaagctttctggcgtattcgagaattagcgatatcagtttccattacgagttccaccttaaattccagttggctaacaatcactctgccttacagaacaacctcatcttttttaccggacaaaaagggcacggtcttaatggagacgacttcctggctgtgggtcttctcaatggaagcgtggtgtatagctataatcttggctctggcattgcttcgatccggtccgaacctctcaatttgagcctgggagtccatacagtacacttaggaaagttcttccaagagggatggctcaaggttgatgatcataaaaacaaaagtatcatagcaccagggaggctggtcgggctgaacgtgttctcccagttctatgtaggcggttattccgagtacactcccgatctgctccccaatggggccgatttcaaaaacggatttcaggggtgcattttcaccctacaggtacgtactgaaaaagacgggcacttcagaggcctggggaacccagagggccaccctaatgcaggacgaagcgtcggccagtgccatgcctctccctgctctttaatgaaatgcgggaatggagggacctgcatagagagcggcacttcagtttattgcaattgtacaaccgggtggaaaggctccttctgcaccgaaaccgtgagcacatgtgacccagagcacgatcctccccaccactgttcacgcggcgctacgtgcataagtttgccgcacggatatacctgtttttgtccgttaggtaccaccggaatttactgtgagcaagcgcttatactgatcgtcatactggaaaagcctaaacccgcagagcgtaaagtcaaaaaggaagcattaagtatctcagacccctctttccgctcaaatgaactgagctggatgagcttcgcgagcttccacgtcagaaagaaaacacacatacagctgcagtttcagccgttagccgccgatgggatcttattttacgccgcacagcacctgaaggctcagtctggagatttcctgtgcatctccctcgtgaattcttcagtacaactgcgatacaacctgggcgacagaaccattatcctcgaaacactgcagaaggttaccattaacggctctacttggcacatcatcaaagctggtcgtgtgggcgcagaggggtacttagacctagatgggatcaacgtcacggagaaagcctctaccaagatgtcttctctcgatactaacacagacttttacattggtggggtgtcctcacttaacttggtgaaccctatggcaatcgaaaacgaaccggtgggattccaggggtgcatcaggcaggtgatcatcaacaaccaagaactgcaactgaccgaattcggcgccaagggcgggtccaatgtgggcgattgcgacggcacagcttgcggctacaacacatgcaggaacgggggtgagtgtaccgtgaacggtactacattcagctgtcggtgcctgccagattgggccggaaatacatgcaatcagagcgtgtcctgtctcaacaatctgtgtcttcatcagtccttgtgtatccctgaccagtcatttagttattcttgtctttgtaccctggggtgggttggtagatactgtgaaaataagacctctttcagcactgcgaagttcatgggaaattcatacatcaagtatattgatccaaactacaggatgcggaacctgcaatttactaccatatcattgaactttagtacgaccaagaccgagggactgatagtttggatgggcatagcccaaaatgaagagaatgattttttagctatcgggctccacaaccagaccttgaagattgccgtaaaccttggtgagcggatcagcgtaccaatgagttataacaacgggaccttctgctgtaataagtggcatcacgtcgtggtgatccagaaccagaccttgattaaagcatatataaataatagtctgatcctgtctgaagacatcgatccacataaaaacttcgtagccctcaactacgacggaatttgttacctaggaggattcgaatacgggcgaaaggtgaatattgtgactcaagaaatttttaaaacaaacttcgtaggcaaaattaaggacgtggtgttcttccaggagcccaagaatatcgagcttattaagctggagggatacaatgtatatgacggagacgagcagaatgaggtcacatag

SEQ ID NO: 111084 - DNA, 9497 bp, Artificial Sequence
  derived and/or modified sequence
atgactgataagtccattgtgatactgtccctcatggtgttccacagtagctttatcaatggtaaaacctgcaggaggcaacttgttgaggagtggcaccctcagcccagttcttacgtcgtcaactggacacttactgagaatatctgtttggacttctatagggactgctggtttctgggagttaacacgaaaattgatacgtcagggaaccaggccgtgccgcagatctgccctctgcagatccagctgggtgacatcctcgttattagtagcgaaccgtctctccagttccccgaaattaacctgatgaacgtctccgaaacatcatttgtagggtgtgttcagaacaccacaactgaggaccaactgctatttggctgccgactaaaggggatgcacaccgtcaacagtaaatggctaagcgtggggacgcactacttcatcactgtaatggcctcaggcccaagtccgtgcccgctgggcctcagactgaatgtgactgtgaagcagcagttttgtcaggagagcctctcttccgaattctgcagcggtcacggaaagtgtttgtccgaggcatggagcaaaacttacagctgccactgtcagcctccattttctggcaagtattgccaggaattagatgcatgcagcttcaagccttgcaaaaacaatggctcgtgtattaacaagcgggagaactgggacgagcaggcctacgaatgcgtttgccatccgccattcaccgggaaaaactgcagcgaaatcattggtcaatgccaacctcacgtgtgcttccacgggaattgctccaacatcacgagcaatagttttatttgcgagtgtgacgaacagttctccggaccattctgtgaggtatcagcgaagccatgcgtaagcttgttattctggaaacgcggtatttgcccaaatagctctagcgcgtatacatatgagtgccccaaggggtcaagcagccagaatggagagacagacgtctcagaattcagtctggtcccatgtcaaaacggaaccgattgtatcaaaatctccaatgacgtaatgtgtatttgttcccctatctttaccgacctgctgtgcaaaagcatccagacgtcctgcgaatcctttccccttcggaataacgccacatgcaagaaatgtgagaaagactatccatgtagttgtatctcaggctttacggagaagaattgcgagaaggccatcgaccactgtaaacttctgagcattaattgtctcaacgaagaatggtgctttaatattattggtcgcttcaagtacgtttgcatccccggttgtaccaagaatccttgttggtttctgaagaatgtgtatttaatacaccagcacctctgctactgcggcgtgaccttccacggaatctgtcaggataaggggcctgctcagttcgagtatgtctggcagttggggttcgctgggagcgaaggagagaaatgtcaaggtgtgattgacgcctactttttcctggctgcaaattgtactgaagacgccacctatgttaatgatcccgaagacaataactcatcttgttggttccctcacgaggggaccaaggaaatctgtgctaatggctgttcttgcctgagtgaagaggactcccaggagtacaggtatctgtgcttcctgcgatgggcgggaaacatgtacttagaaaatacaaccgacgaccaggagaacgaatgccagcatgaggcagtatgtaaagatgagatcaacagacctcggtgctcatgttcactgagttatattggcagactttgtgtggttaacgtcgactactgcctgggcaaccactcaatctcagtccacggtctgtgtttagcactgtcccataattgcaattgtagtggcctccagagatacgaacgaaatatatgcgagattgacaccgaggattgcaagtcagcctcttgtaaaaatggcaccacatctacccacctgcggggttattttttccgaaagtgcgttccaggatttaaaggcacgcagtgtgagatagacattgatgagtgtgctagccacccatgcaaaaacggcgcaacatgcatcgaccagcccggtaactacttctgtcagtgcgttccacccttcaaggtggtcgacggattctcatgcctgtgcaacccaggatatgtcggaattcgctgcgagcaggacatcgatgactgcatcctgaatgcatgtgaacacaacagcacctgtaaggacctccatttaagctaccagtgtgtgtgtttgagtgactgggaaggaaacttttgtgagcaggagagcaacgaatgcaaaatgaatccatgtaagaataatagtacctgcaccgatctctacaagtcctacagatgtgaatgtacctcgggctggaccgggcagaactgctctgaagaaattaatgaatgtgatagcgacccctgcatgaacgggggattgtgtcacgagagcacgattccgggtcagtttgtctgcctttgtccacctttatacaccgggcagttctgtcatcagcgttataacttgtgcgatctactgcacaatccctgtcggaacaattcgacctgtctggcacttgtcgatgccaaccagcactgcatctgtcgggaagaatttgagggcaagaattgtgagatcgatgtgaaggactgtttgtttctttcctgccaggattatggggattgcgaggacatggtgaacaacttccgctgtatttgcaggcctggcttcagtggaagtctgtgcgaaattgagatcaacgaatgcagctcagagccatgcaagaacaatgggacatgtgtcgatctaacaaaccggtttttctgcaattgtgagccagagtaccatggccctttctgcgaactcgatgtaaacaaatgcaaaatcagtccctgccttgatgaggaaaactgcgtttacaggactgacgggtataattgtctctgcgcgccaggctacaccggtatcaactgtgagataaacctcgacgagtgtctgtccgagccctgccttcatgacggcgtatgtatcgacggcataaatcattacacatgcgactgcaagtccggattttttggcacccactgcgagacgaacgccaacgattgtctgagcaatccatgtctgcatggacgctgtactgagctgatcaacgaatacccctgttcctgcgatgccgatggtacgtccacgcagtgcaagatcaagataaacgactgcacatccatcccctgtatgaatgagggcttctgccagaagagtgcacacggattcacgtgcatctgtccacgaggttatacaggagcgtattgcgaaaagtcgatcgacaattgcgccgaaccagagctgaactccgtgatttgtctaaatggagggatctgcgttgacggccctgggcacacatttgattgccgctgtctgcccggattcagtgggcagttttgcgaaatcaatatcaatgagtgctctagcagcccttgtctccatggcgctgactgtgaggatcatatcaacggctacgtctgtaagtgtcagccaggttggtctggtcaccactgtgagaacgagctggagtgtatcccaaacagttgtgtgcatgagctttgcatggaaaacgagcctggatcaacatgtctgtgtacccccggattcatgacctgtagtatcggtctgttgtgtggggacgaaatccgcaggataacgtgcttgactccaattttccaacggacagatcctatttcaactcaaacgtacaccattcccccatcagagactctggtgtcctcctttccttccattaaggccacacggattccggcaatcatggatacttatcccgttgaccagggtcccaaacagactggaatagtgaaacacgatatattgccaacaactggccttgcgacgctgcggatctccacccccctggaatcttaccttctccaagaattgatcgtgaccagagaacttagcgcaaagcactctctactgagctctgcagatgtgtcctcatcccggttcctgaatttcggaatcagggatccggcacagatcgtgcaggacaaaacctccgtttctcatatgcctatcagaacttctgctgcaactcttggcttctttttccccgatagaagggcgaggacaccatttattatgagttccctcatgagcgactttatcttccccacccagtctctgctgtttgagaattgtcagacagtggccctgtccgcgacacctacgaccagtgtgatcaggtccatccccggagccgacatagagctaaatagacagagcctgctctctagggggtttttattgatcgctgcctcgatctctgcaacccccgttgtgagcaggggggctcaggaagatatcgaggaatattctgcggacagtttaatcagcagacgagagcactggagactgctctcgccttccatgagccctatatttcccgcaaaggtaattatttccaagcaagtgaccattcttaattcttccgccctgcacagattttcgaccaaggcctttaacccatccgaatatcaagccatcacagaggcgtcgtccaaccagagattaaccaatatcaaatcccaagcagccgacagcctccgagaactgtcacaaacctgcgccacctgcagcatgacggagatcaagtccagccgcgaattcagtgaccaggtactacattcaaagcagtctcatttttatgagactttttggatgaattcggctattctggcgagttggtatgctctcatgggtgctcagaccatcactagtggtcactcattcagttctgcaacagaaattaccccatccgtagcatttactgaggtcccgtccctgtttccctctaagaaatccgccaagcggacaatcctgagttcctctctcgaagagagtatcaccctctcaagcaatctagatgtgaacttgtgcctcgacaaaacatgcctgtcgattgtcccaagccagaccatctcaagtgacctcatgaacagtgacctcacgagcaaaatgacgacagacgaactcagcgtttctgagaatattttgaagctattgaagataagacagtatggtatcacaatgggtcccaccgaggtgctgaaccaggagagcttgctcgacatggaaaagagcaaaggttcgcacacactattcaagctgcacccctctgattctagcctcgatttcgaactgaatctgcagatctaccctgacgtcaccctcaaaacctatagcgagattacgcacgcgaacgactttaagaataacttgccacctttaactgggtctgtgcccgacttctccgaggtcacgaccaacgtggctttttacaccgtatctgccacccccgctctttcaatacaaacctcctcctcaatgtccgtgattcgacctgactggccctacttcaccgattacatgacctcgctgaagaaagaggttaaaactagttccgagtggtccaagtgggagcttcagccgagcgtccagtaccaggaattcccaacggcctcaagacacttgccattcacgcggtcattaaccttgagcagcttggagtcaattttggcccctcagagactgatgataagcgacttttcctgcgtccgctattatggcgactcttaccttgaatttcagaatgtggccttgaacccacagaacaatatctctctagagtttcaaaccttctcaagctatggtctgctgctttatgtgaagcaggacagcaatcttgtggatggattcttcatccagttgttcattgagaacggaaccctgaagtaccatttctattgtcctggtgaagccaagtttaagtctatcaatacaaccgtgagggtggacaacgggcaaaaatataccctgctgattagacaggaactggatccgtgtaacgccgaactgaccatactaggtagaaatacacagatttgtgagtccattaaccacgtgctgggcaagcccctgcccaagtcaggctccgtctttattggcggattccccgatctccatggaaagattcagatgcccgttcccgtgaagaattttactggctgcatcgaagtgattgaaataaacaactggcggtctttcatcccttcaaaggctgtgaaaaattatcacattaacaactgcaggtcccagggattcatgctctccccgaccgcatcatttgtggatgcctccgacgtcacacagggtgtggacactatgtggacgagcgtgtctccctctgtggctgctccttctgtttgtcagcaagatgtgtgccataacggaggaacgtgccacgccatctttctgtcttccgggatcgttagtttccagtgcgactgcccactgcacttcactggtagattctgtgaaaaggatgcagggctgttttttcccagctttaatgggaactcttatctcgagctccctttcttgaagtttgtgctggagaaggaacacaacaggactgtgaccatatatctcactataaaaacgaacagccttaacggaaccatcctgtactctaatggtaacaattgcggaaagcagttcttacatttgtttttggtcgaaggccgaccatctgtgaagtatggctgcgggaactcgcagaacatactgactgtgagcgcaaactacagcatcaatacaaacgcctttacaccaatcactatccgttacactaccccagtcggcagcccaggagttgtatgcatgatagagatgaccgccgatggcaagcctccagtgcaaaaaaaagatactgaaatctcccatgccagtcaagcgtacttcgagtctatgtttctcggtcatatccctgcgaacgtgcagatccacaaaaaggctgggcctgtgtacggtttccgcggatgcatcctcgacctgcaggtcaacaataaagagtttttcatcattgacgaagcacggcatggtaaaaacatcgaaaattgtcatgttccctggtgtgctcatcatctatgtagaaacaatgggacctgtatttccgacaacgagaatctcttctgcgagtgccctcggctgtattcaggaaaattatgccagttcgcgtcgtgcgaaaacaacccttgtgggaatggtgcgacatgcgtccccaagtccgggaccgatatcgtttgcctctgcccttatgggagatctggccctctgtgcactgacgcgattaatatcacccaaccgaggtttagtggcactgatgccttcgggtatacaagcttccttgcgtatagcaggataagcgacataagcttccattatgagttccatctaaagtttcaacttgccaataaccattcagccctccagaataacctcatcttctttactggacaaaagggtcacggacttaacggagacgactttctcgcagttggcctgttgaatggcagtgtggtgtacagctacaatttgggctccggtatcgcctccatccggtctgagcctcttaatctgagcctcggcgtgcatacagtgcacttgggcaaattcttccaagaaggttggctgaaagtcgatgatcacaagaataagagtatcattgctccgggtagacttgtcggactaaatgtctttagccagttctatgtggggggttatagcgagtatactcccgatctgttacccaatggcgcagattttaagaatgggttccaggggtgtattttcaccttacaagtgaggacagagaaagacggacacttccggggtctaggaaaccccgaaggccacccaaacgctgggaggagcgtaggccagtgccatgcctcaccttgctctctgatgaagtgtggtaacgggggaacctgcatcgaatcaggaacaagcgtttactgtaattgtaccactggctggaaaggatccttctgcacagagactgtgtccacatgcgaccccgagcacgatcccccacaccactgctcacggggtgccacatgcatctccctgccccatggctatacttgcttctgtccactgggaacaaccgggatctattgtgaacaagcactgattctgatcgtgatactcgagaaacctaaaccagcggaacgaaaggtgaagaaggaagcactgtcaatcagcgacccaagctttcgatctaatgaactttcctggatgtcgtttgcttccttccacgtacgcaaaaaaacacatattcagctccaatttcagcctctcgctgctgacgggatcttgttctatgctgcccaacacttgaaggcgcagtcgggtgattttttgtgcatctccctcgtgaacagttctgtgcaattgagatacaatttaggggatcgcacaatcatccttgagacccttcagaaagtgacgattaacgggtccacttggcatattatcaaggctggaagagtgggagccgaggggtatctggacctggacgggattaacgtgaccgagaaggcgagtactaagatgagctccctagacacaaacacagacttttacataggaggagtgtccagcctgaatttagtaaacccaatggcaattgaaaacgagcccgtaggcttccaagggtgcattagacaggtcatcatcaacaaccaggagctccagctgactgagttcggtgctaaggggggatctaatgtgggagactgcgatggcacagcttgcggttataacacatgccgcaatggcggagaatgtaccgtaaacggaacgactttcagttgcagatgtctgcccgactgggccggtaacacatgcaaccagtcagtaagctgcctgaacaacctttgcctgcaccaatctctgtgcatcccggatcagtcattttcgtatagttgcctatgtactctcgggtgggttggacgctactgtgaaaacaaaacatctttcagtaccgccaaattcatgggtaatagttacattaagtacatagatccaaactacaggatgcggaacctgcaattcacaactatttcactaaacttcagtactaccaagactgagggcctcatcgtatggatgggaatcgcgcaaaacgaggaaaacgattttctggcgatcggtctccacaaccagactcttaagatcgccgtgaacctgggggaaaggatcagtgtgcctatgagctacaataacggcacattttgctgcaacaaatggcaccatgtcgtagttattcaaaaccagactttaattaaggcttatatcaataactccctaattctatctgaggatattgacccacacaagaacttcgtggccctcaactacgacggaatctgctacctgggcggattcgaatacggaaggaaggtgaacatcgtaactcaggaaatttttaagactaacttcgtcgggaagattaaagatgttgtcttcttccaggaacctaagaatatcgagctgatcaagttggagggctataacgtctatgacggcgacgagcagaatgaagtgactta

SEQ ID NO: 111085 - DNA, 9497 bp, Artificial Sequence
  derived and/or modified sequence
atgacagacaagtctatagttatcttgtctttgatggtatttcatagtagctttatcaacgggaaaacttgccgcagacagcttgtggaggaatggcatcctcaaccttcatcttacgtggtgaactggacactcacagaaaatatctgccttgacttctatagggattgctggttcttgggtgttaacactaaaatcgacaccagtgggaaccaggcggtcccccaaatatgtcccctgcagatacaactgggggatattctggtgatttcctctgaacccagcctgcagttccctgagattaacctgatgaatgtgtccgaaacaagcttcgtgggctgcgtacagaacaccactactgaggatcagctgttgtttggatgtcgcctaaaaggtatgcatacagtgaattctaagtggctatctgtcggcactcattacttcatcactgtgatggcgtctggcccaagcccctgccctctggggctcagactgaacgttaccgtaaaacagcaattctgtcaggaaagtttaagctcagagttttgcagcgggcatggcaaatgcttaagtgaagcttggtccaaaacgtactcatgtcactgtcaaccacctttctccggtaaatactgccaggagctcgacgcgtgtagttttaaaccctgtaagaacaacggctcctgcattaataagcgagagaattgggacgaacaggcatacgaatgcgtgtgccacccaccgttcacaggaaaaaattgttccgaaatcatcgggcagtgtcagccgcacgtgtgtttccatggaaactgctcaaatattacaagcaacagctttatttgtgaatgcgatgagcaattctcagggcctttctgtgaggtgtcggccaagccgtgcgtgagtctcttattctggaagaggggcatttgtcccaactcgtcttccgcatacacttacgagtgtcctaaggggagctcttcccagaacggggagacggacgtaagcgaattttctttggtgccatgtcagaacggcacagactgcattaagatctctaatgatgtaatgtgcatctgcagccccatctttaccgatcttctttgtaaatccattcaaacctcctgcgaatcttttccactgcggaacaatgcgacctgcaagaagtgtgagaaagactacccctgctcatgtatatccggctttacagaaaaaaattgcgaaaaggcaatagaccattgtaaacttctctctataaactgcctaaacgaagaatggtgcttcaacataattgggaggtttaaatatgtgtgcattccaggatgtactaagaacccatgctggttcctgaaaaatgtgtacctgatccaccaacatctttgttattgcggcgtaaccttccatggcatttgtcaagacaaaggacccgctcagttcgagtacgtgtggcaactgggtttcgcaggctctgagggtgagaagtgtcagggcgtaatcgacgcatacttctttctggccgcaaactgcaccgaagatgctacatatgtgaacgaccccgaggataacaactcctcttgttggtttccccatgagggcaccaaggaaatctgtgccaatggctgttcttgtcttagtgaagaagactcccaagaataccggtacctgtgcttcctcaggtgggcagggaatatgtacttggaaaataccaccgacgaccaagaaaacgaatgtcagcatgaggcagtgtgcaaagatgaaataaatcggccaaggtgctcctgcagtttgagttatataggaaggctgtgcgtagtcaacgtcgattactgtttgggcaaccatagtatcagcgttcacgggctgtgtctggccttaagtcacaactgcaactgctcaggactccaacggtatgagaggaatatctgcgagatagacaccgaggactgtaaaagcgcaagctgtaagaacgggacgacctcaacccatctcagggggtatttctttcgaaaatgtgttccaggattcaagggaacgcagtgtgagatcgacattgacgaatgtgcttcccacccatgcaagaacggcgctacgtgcatcgatcagcccggaaactacttttgtcagtgtgtccctcctttcaaggttgtcgatggcttctcctgtctatgtaatccgggatacgtgggaatcaggtgcgaacaggatattgacgactgtatacttaatgcctgtgaacacaatagcacctgcaaggacctgcatttgtcttatcagtgcgtgtgtctgtccgattgggaggggaacttctgcgaacaagaatctaacgagtgcaagatgaacccctgcaagaataacagtacctgtaccgatctttataaaagttatcggtgtgagtgtacctccgggtggaccggacagaactgttcagaagaaattaacgagtgtgatagcgatccgtgtatgaatggcggactttgccacgagtccactattcctggacagtttgtctgcctgtgtcccccattatacaccgggcagttctgtcaccaacggtacaacctctgtgatctcttgcacaacccgtgtcgaaataactccacatgtctggctttagttgatgctaatcagcactgcatatgccgcgaagagtttgaaggtaagaattgcgagattgacgtgaaagactgtctgttcctgtcttgccaagattatggcgattgcgaggatatggtgaacaatttcaggtgcatttgcagacccggatttagtggctctctctgcgagatcgagattaacgagtgttcgagtgagccctgtaagaataacggcacgtgtgtcgacctcacaaacagatttttctgcaattgtgaacctgagtatcacggtccattttgcgagttggatgtgaataaatgcaaaatatccccctgtctagacgaggagaactgcgtttacagaactgatgggtacaactgcctgtgtgccccaggatacaccgggattaattgtgagataaaccttgacgagtgcttgtccgagccttgtctgcatgacggagtgtgcatcgatggaatcaaccactatacctgcgactgtaagtccggctttttcggtactcattgtgagacaaacgctaatgactgtctatctaatccctgtttgcatggccgatgcaccgaactcatcaacgagtatccttgtagctgcgacgccgacggcacctccacacaatgtaagattaagatcaatgactgtaccagtataccctgcatgaatgaaggattctgtcagaaatccgctcacggctttacgtgtatttgtcccaggggttatacaggggcttactgcgagaaatctatcgacaactgcgccgagcccgaacttaactccgtcatttgtctgaacggtgggatctgtgttgatgggcctggtcacacatttgattgtcggtgcttgcccggtttctctggacagttctgcgaaattaatattaatgagtgctcctcaagcccatgtttgcacggcgctgattgcgaggatcatatcaacgggtatgtgtgcaagtgtcaaccaggatggagcgggcatcactgcgagaacgaactcgagtgcatcccaaactcttgcgttcatgaactgtgtatggaaaatgagccaggatctacatgtctttgcacacccggatttatgacttgtagcataggattgttatgtggcgacgagatccgaaggataacatgtttgacacctatcttccagagaacagatcctatctctacccagacctacaccattccgcctagtgagactcttgtatccagctttccatcaatcaaagctacacgaatacctgctatcatggacacttacccggttgaccaaggaccaaagcagacaggaatcgtgaagcacgacattctgccaacaacaggcctggctacattgagaatttccactcccctggaatcttacctgctacaggaactgattgtcactagagagctctcagcaaaacactcattgctgagctcagcggacgtctcctcaagtagatttctcaactttggtataagagatccagcccaaatagttcaggataagacttcggtaagccacatgcccatccgtaccagcgccgcaactttgggattcttcttccctgaccgtagagctagaacccctttcatcatgtcctccctgatgtctgacttcatattccctacccagtctctgctgttcgagaactgccagacagtagcactgtcagctacccctaccacatccgttatcagatctatcccaggggcagatatagagctgaatcggcagtcactcttgtcccgcggttttctcctgatagcagcctccatcagcgccaccccagtagtctctcgcggagcccaggaggatatcgaggagtactctgctgattctttgataagcaggagggaacattggcgcctgttgtctcctagtatgtctccgatcttccccgcaaaagttatcattagcaaacaggtaactatcctgaacagttccgccttgcacagattcagcacaaaggcctttaacccctctgagtaccaggcaataaccgaggcctcgagcaaccagagactcaccaatattaagagtcaagccgcagactccctgagggaattgagccagacctgcgcaacgtgctcgatgaccgagatcaagtccagccgcgagttttcggaccaggttctacactcaaaacaaagtcatttttatgagacattctggatgaactcagctatcctggcaagctggtatgcccttatgggggctcaaactataacttccggccacagcttctcctctgccacagaaatcacgccatcagtggccttcaccgaggtcccaagtttgtttccaagcaagaaaagcgctaagcgcaccatcctgagttcaagcttggaggagtccatcacactatcttccaatctcgacgtcaacctgtgcctcgacaagacttgcctgagcatagttccttcccagacaataagctctgacctaatgaatagtgatcttaccagtaagatgactaccgatgaactatccgtctcggaaaacatcctgaagctgctgaagattagacagtacggaataacgatgggaccgaccgaggtgctgaatcaggaaagtctcctggatatggaaaaatcaaaagggagccacaccctctttaagctacaccctagcgattcatcattggactttgagcttaatctccagatatatcctgatgtaactctcaaaacttattccgagataacccatgcgaatgattttaaaaacaatctgcccccactcacaggatcagtgcccgacttctcggaagtaactactaatgtggcattttacaccgtgtcggcaactccagcactctcaatccaaacttcgagctctatgagcgtgatacggccagactggccctattttaccgactacatgacatctctgaagaaggaggtcaaaacatcctctgagtggtcaaaatgggagttacagccttcagtgcagtaccaggagtttcctacagcatctcgccatctaccattcacccggtccctgacgttgagttcacttgagagcattctcgcaccccaacgtcttatgattagtgactttagttgcgtaaggtactatggggattcctatttagaattccaaaatgtggccttgaaccctcagaacaacatctctctggagtttcagaccttcagctcgtacgggttattgctgtatgtaaaacaggattccaatctggttgacggattctttattcagctgttcattgagaatggaacccttaaataccacttctactgtcccggagaggcgaagttcaagagcattaacacaaccgtccgagtggacaatggacagaaatatacactcttaatcagacaggagctagatccgtgcaacgctgagcttacaatcttgggcaggaatacacagatttgtgagagtattaaccacgtcctggggaagccgctgccgaagagtgggagtgtatttataggaggattcccagatcttcacgggaagattcagatgcccgttcctgtcaagaattttacaggctgcatagaggtgattgaaattaacaactggcgatctttcatcccctctaaagccgtgaagaactatcacatcaacaactgcagatctcagggctttatgctcagccccaccgcttcgtttgtcgatgcaagcgatgtaacacagggcgtggacacaatgtggacttctgtctctccatccgtggcagcccctagtgtctgccagcaggacgtgtgtcacaacggcggtacctgtcatgcaatatttcttagctctggcatagtgtcctttcagtgcgattgcccgcttcactttactggcaggttctgtgaaaaagacgccggtctgttctttccttcctttaacggcaactcttacctcgagctccccttcctgaagttcgtcctggagaaagaacacaatagaactgtgacaatctatcttacgatcaagacgaacagcttaaatggaactatcctgtattccaatggcaacaactgcggaaaacagttcctccatctttttctagttgaaggccgaccctccgttaagtacggatgcggaaacagtcagaatattcttacagtatcagcaaattatagcatcaacactaacgccttcactcccattacaatcagatatactacgcctgtcggcagcccaggagttgtttgtatgatcgaaatgacggccgacggaaagccacctgttcagaaaaaagacactgagatatcacatgcctctcaggcctattttgagtcaatgttcctagggcacattcccgctaatgtccagattcataagaaagccggtcctgtgtacggttttcgtgggtgtatattagacctccaggtcaataacaaagaatttttcatcatcgatgaggccaggcatgggaagaacatcgaaaattgccatgtcccctggtgcgcacaccacctgtgtagaaataatggcacatgcatcagcgataacgaaaacctgttctgcgaatgccccaggttatacagcggcaagctctgccagttcgcctcttgcgagaataacccttgcgggaacggcgctacatgtgtgcctaaatccggaaccgatatcgtgtgtctctgtccgtacggcaggtcagggcctctctgtacggacgcaataaatattactcaacctcggttttccggaaccgatgcatttggctacacctcattcctggcttattcacggattagcgatatttcttttcactatgaattccacttgaaattccagctggcaaataaccactctgctctgcagaacaatttgattttttttaccggccagaaaggacatggcctgaacggcgacgattttctggctgtgggcctactgaacgggagtgtagtgtattcttacaatcttgggtccggcattgcatccattcggtcagaacccctgaacctctccttgggcgtgcacacagtccacctcggaaaatttttccaggagggctggctgaaggtcgatgaccataagaacaaatccatcattgcccctggcaggctagttggtcttaatgttttttctcagttctatgtcggcggatatagcgagtacactccagacctgctgccgaatggcgctgattttaagaatggctttcaggggtgtattttcactctgcaggtaagaactgaaaaggacggtcactttaggggactcggaaacccggaagggcacccaaacgctggcagatcagttggccaatgccatgcgagtccctgcagccttatgaaatgcgggaatgggggaacctgcattgagagcggcacttcagtgtactgcaactgtaccacagggtggaaaggctccttctgcacagagaccgtgtcaacctgcgatccagagcacgaccctccacatcactgctcgcgcggtgccacctgtatttctctgccacatggttatacatgtttttgccctctgggtaccaccggaatctattgtgaacaggccttaattctgattgttatcctggaaaaaccgaagccggcagaaagaaaagttaaaaaggaggccctgagtatcagtgacccttcctttagaagtaatgagctgtcttggatgtcctttgccagcttccatgtgcggaagaagacgcatatccagctgcagttccagccgcttgctgcggatgggatcctcttttatgcagcccagcacctcaaggcccagtccggggactttctgtgtatctccctggtgaattcctccgtgcagctgcggtataatcttggggacaggacaataattctcgaaactctacaaaaagtaacaatcaacggatccacctggcatatcatcaaggccggacgggtcggagccgaaggatacctggatcttgatggcattaatgtaaccgagaaggctagtaccaagatgagtagtctggatactaatacagatttttatatcggcggtgtgagtagtctgaatctggtcaacccaatggctatcgagaatgaaccagtgggttttcagggctgtatcagacaggtcatcatcaataaccaggaacttcaactgaccgaattcggcgcaaagggcggttccaacgttggcgattgcgatggaacagcgtgtgggtataatacttgccgtaatggcggagagtgcaccgtgaacggcacaacgttttcctgcaggtgtttgccagattgggccggtaatacctgtaaccagagtgtgtcctgcctgaacaacctgtgcctccaccaaagtctttgtataccagatcagagtttcagctactcctgtctgtgcactcttggatgggttggcagatactgtgagaacaaaacctcttttagtactgctaagttcatgggcaacagctacataaaatacatcgatccgaactaccgtatgaggaatctgcaattcaccactattagtttaaacttcagcactactaaaaccgaaggattaattgtgtggatgggtatagctcaaaatgaagaaaacgatttcctggctatcggactccacaatcagaccttaaaaattgccgtgaatctcggtgaaaggatatctgttcctatgagctacaacaacgggacattttgctgtaacaaatggcaccatgtggttgttatccaaaaccagactcttattaaagcttacattaataacagtcttattctgagcgaggacatcgatccccacaagaatttcgtggctctaaactacgacgggatctgctacctcggcggtttcgagtacggtcgaaaggtgaacatagtaacacaggaaatcttcaaaacaaatttcgtgggaaagatcaaagacgtcgtgttctttcaggaaccaaagaatatagagctgataaagctcgaggggtataatgtttatgacggcgatgaacagaacgaggtcaccta

SEQ ID NO: 111086 - DNA, 9498 bp, Artificial Sequence
  derived and/or modified sequence
atgaccgacaagagcatcgtgatcctgagcctgatggtgttccacagcagcttcatcaacggcaagacctgcagaagacagctggtggaggagtggcacccccagcccagcagctacgtggtgaactggaccctgaccgagaacatctgcctggacttctacagagactgctggttcctgggcgtgaacaccaagatcgacaccagcggcaaccaggccgtgccccagatctgccccctgcagatccagctgggcgacatcctggtgatcagcagcgagcccagcctgcagttccccgagatcaacctgatgaacgtgagcgagaccagcttcgtgggctgcgtgcagaacaccaccaccgaggaccagctgctgttcggctgcagactgaagggcatgcacaccgtgaacagcaagtggctgagcgtgggcacccactacttcatcaccgtgatggccagcggccccagcccctgccccctgggcctgagactgaacgtgaccgtgaagcagcagttctgccaggagagcctgagcagcgagttctgcagcggccacggcaagtgcctgagcgaggcctggagcaagacctacagctgccactgccagccccccttcagcggcaagtactgccaggagctggacgcctgcagcttcaagccctgcaagaacaacggcagctgcatcaacaagagagagaactgggacgagcaggcctacgagtgcgtgtgccacccccccttcaccggcaagaactgcagcgagatcatcggccagtgccagccccacgtgtgcttccacggcaactgcagcaacatcaccagcaacagcttcatctgcgagtgcgacgagcagttcagcggccccttctgcgaggtgagcgccaagccctgcgtgagcctgctgttctggaagagaggcatctgccccaacagcagcagcgcctacacctacgagtgccccaagggcagcagcagccagaacggcgagaccgacgtgagcgagttcagcctggtgccctgccagaacggcaccgactgcatcaagatcagcaacgacgtgatgtgcatctgcagccccatcttcaccgacctgctgtgcaagagcatccagaccagctgcgagagcttccccctgagaaacaacgccacctgcaagaagtgcgagaaggactacccctgcagctgcatcagcggcttcaccgagaagaactgcgagaaggccatcgaccactgcaagctgctgagcatcaactgcctgaacgaggagtggtgcttcaacatcatcggcagattcaagtacgtgtgcatccccggctgcaccaagaacccctgctggttcctgaagaacgtgtacctgatccaccagcacctgtgctactgcggcgtgaccttccacggcatctgccaggacaagggccccgcccagttcgagtacgtgtggcagctgggcttcgccggcagcgagggcgagaagtgccagggcgtgatcgacgcctacttcttcctggccgccaactgcaccgaggacgccacctacgtgaacgaccccgaggacaacaacagcagctgctggttcccccacgagggcaccaaggagatctgcgccaacggctgcagctgcctgagcgaggaggacagccaggagtacagatacctgtgcttcctgagatgggccggcaacatgtacctggagaacaccaccgacgaccaggagaacgagtgccagcacgaggccgtgtgcaaggacgagatcaacagacccagatgcagctgcagcctgagctacatcggcagactgtgcgtggtgaacgtggactactgcctgggcaaccacagcatcagcgtgcacggcctgtgcctggccctgagccacaactgcaactgcagcggcctgcagagatacgagagaaacatctgcgagatcgacaccgaggactgcaagagcgccagctgcaagaacggcaccaccagcacccacctgagaggctacttcttcagaaagtgcgtgcccggcttcaagggcacccagtgcgagatcgacatcgacgagtgcgccagccacccctgcaagaacggcgccacctgcatcgaccagcccggcaactacttctgccagtgcgtgccccccttcaaggtggtggacggcttcagctgcctgtgcaaccccggctacgtgggcatcagatgcgagcaggacatcgacgactgcatcctgaacgcctgcgagcacaacagcacctgcaaggacctgcacctgagctaccagtgcgtgtgcctgagcgactgggagggcaacttctgcgagcaggagagcaacgagtgcaagatgaacccctgcaagaacaacagcacctgcaccgacctgtacaagagctacagatgcgagtgcaccagcggctggaccggccagaactgcagcgaggagatcaacgagtgcgacagcgacccctgcatgaacggcggcctgtgccacgagagcaccatccccggccagttcgtgtgcctgtgcccccccctgtacaccggccagttctgccaccagagatacaacctgtgcgacctgctgcacaacccctgcagaaacaacagcacctgcctggccctggtggacgccaaccagcactgcatctgcagagaggagttcgagggcaagaactgcgagatcgacgtgaaggactgcctgttcctgagctgccaggactacggcgactgcgaggacatggtgaacaacttcagatgcatctgcagacccggcttcagcggcagcctgtgcgagatcgagatcaacgagtgcagcagcgagccctgcaagaacaacggcacctgcgtggacctgaccaacagattcttctgcaactgcgagcccgagtaccacggccccttctgcgagctggacgtgaacaagtgcaagatcagcccctgcctggacgaggagaactgcgtgtacagaaccgacggctacaactgcctgtgcgcccccggctacaccggcatcaactgcgagatcaacctggacgagtgcctgagcgagccctgcctgcacgacggcgtgtgcatcgacggcatcaaccactacacctgcgactgcaagagcggcttcttcggcacccactgcgagaccaacgccaacgactgcctgagcaacccctgcctgcacggcagatgcaccgagctgatcaacgagtacccctgcagctgcgacgccgacggcaccagcacccagtgcaagatcaagatcaacgactgcaccagcatcccctgcatgaacgagggcttctgccagaagagcgcccacggcttcacctgcatctgccccagaggctacaccggcgcctactgcgagaagagcatcgacaactgcgccgagcccgagctgaacagcgtgatctgcctgaacggcggcatctgcgtggacggccccggccacaccttcgactgcagatgcctgcccggcttcagcggccagttctgcgagatcaacatcaacgagtgcagcagcagcccctgcctgcacggcgccgactgcgaggaccacatcaacggctacgtgtgcaagtgccagcccggctggagcggccaccactgcgagaacgagctggagtgcatccccaacagctgcgtgcacgagctgtgcatggagaacgagcccggcagcacctgcctgtgcacccccggcttcatgacctgcagcatcggcctgctgtgcggcgacgagatcagaagaatcacctgcctgacccccatcttccagagaaccgaccccatcagcacccagacctacaccatcccccccagcgagaccctggtgagcagcttccccagcatcaaggccaccagaatccccgccatcatggacacctaccccgtggaccagggccccaagcagaccggcatcgtgaagcacgacatcctgcccaccaccggcctggccaccctgagaatcagcacccccctggagagctacctgctgcaggagctgatcgtgaccagagagctgagcgccaagcacagcctgctgagcagcgccgacgtgagcagcagcagattcctgaacttcggcatcagagaccccgcccagatcgtgcaggacaagaccagcgtgagccacatgcccatcagaaccagcgccgccaccctgggcttcttcttccccgacagaagagccagaacccccttcatcatgagcagcctgatgagcgacttcatcttccccacccagagcctgctgttcgagaactgccagaccgtggccctgagcgccacccccaccaccagcgtgatcagaagcatccccggcgccgacatcgagctgaacagacagagcctgctgagcagaggcttcctgctgatcgccgccagcatcagcgccacccccgtggtgagcagaggcgcccaggaggacatcgaggagtacagcgccgacagcctgatcagcagaagagagcactggagactgctgagccccagcatgagccccatcttccccgccaaggtgatcatcagcaagcaggtgaccatcctgaacagcagcgccctgcacagattcagcaccaaggccttcaaccccagcgagtaccaggccatcaccgaggccagcagcaaccagagactgaccaacatcaagagccaggccgccgacagcctgagagagctgagccagacctgcgccacctgcagcatgaccgagatcaagagcagcagagagttcagcgaccaggtgctgcacagcaagcagagccacttctacgagaccttctggatgaacagcgccatcctggccagctggtacgccctgatgggcgcccagaccatcaccagcggccacagcttcagcagcgccaccgagatcacccccagcgtggccttcaccgaggtgcccagcctgttccccagcaagaagagcgccaagagaaccatcctgagcagcagcctggaggagagcatcaccctgagcagcaacctggacgtgaacctgtgcctggacaagacctgcctgagcatcgtgcccagccagaccatcagcagcgacctgatgaacagcgacctgaccagcaagatgaccaccgacgagctgagcgtgagcgagaacatcctgaagctgctgaagatcagacagtacggcatcaccatgggccccaccgaggtgctgaaccaggagagcctgctggacatggagaagagcaagggcagccacaccctgttcaagctgcaccccagcgacagcagcctggacttcgagctgaacctgcagatctaccccgacgtgaccctgaagacctacagcgagatcacccacgccaacgacttcaagaacaacctgccccccctgaccggcagcgtgcccgacttcagcgaggtgaccaccaacgtggccttctacaccgtgagcgccacccccgccctgagcatccagaccagcagcagcatgagcgtgatcagacccgactggccctacttcaccgactacatgaccagcctgaagaaggaggtgaagaccagcagcgagtggagcaagtgggagctgcagcccagcgtgcagtaccaggagttccccaccgccagcagacacctgcccttcaccagaagcctgaccctgagcagcctggagagcatcctggccccccagagactgatgatcagcgacttcagctgcgtgagatactacggcgacagctacctggagttccagaacgtggccctgaacccccagaacaacatcagcctggagttccagaccttcagcagctacggcctgctgctgtacgtgaagcaggacagcaacctggtggacggcttcttcatccagctgttcatcgagaacggcaccctgaagtaccacttctactgccccggcgaggccaagttcaagagcatcaacaccaccgtgagagtggacaacggccagaagtacaccctgctgatcagacaggagctggacccctgcaacgccgagctgaccatcctgggcagaaacacccagatctgcgagagcatcaaccacgtgctgggcaagcccctgcccaagagcggcagcgtgttcatcggcggcttccccgacctgcacggcaagatccagatgcccgtgcccgtgaagaacttcaccggctgcatcgaggtgatcgagatcaacaactggagaagcttcatccccagcaaggccgtgaagaactaccacatcaacaactgcagaagccagggcttcatgctgagccccaccgccagcttcgtggacgccagcgacgtgacccagggcgtggacaccatgtggaccagcgtgagccccagcgtggccgcccccagcgtgtgccagcaggacgtgtgccacaacggcggcacctgccacgccatcttcctgagcagcggcatcgtgagcttccagtgcgactgccccctgcacttcaccggcagattctgcgagaaggacgccggcctgttcttccccagcttcaacggcaacagctacctggagctgcccttcctgaagttcgtgctggagaaggagcacaacagaaccgtgaccatctacctgaccatcaagaccaacagcctgaacggcaccatcctgtacagcaacggcaacaactgcggcaagcagttcctgcacctgttcctggtggagggcagacccagcgtgaagtacggctgcggcaacagccagaacatcctgaccgtgagcgccaactacagcatcaacaccaacgccttcacccccatcaccatcagatacaccacccccgtgggcagccccggcgtggtgtgcatgatcgagatgaccgccgacggcaagccccccgtgcagaagaaggacaccgagatcagccacgccagccaggcctacttcgagagcatgttcctgggccacatccccgccaacgtgcagatccacaagaaggccggccccgtgtacggcttcagaggctgcatcctggacctgcaggtgaacaacaaggagttcttcatcatcgacgaggccagacacggcaagaacatcgagaactgccacgtgccctggtgcgcccaccacctgtgcagaaacaacggcacctgcatcagcgacaacgagaacctgttctgcgagtgccccagactgtacagcggcaagctgtgccagttcgccagctgcgagaacaacccctgcggcaacggcgccacctgcgtgcccaagagcggcaccgacatcgtgtgcctgtgcccctacggcagaagcggccccctgtgcaccgacgccatcaacatcacccagcccagattcagcggcaccgacgccttcggctacaccagcttcctggcctacagcagaatcagcgacatcagcttccactacgagttccacctgaagttccagctggccaacaaccacagcgccctgcagaacaacctgatcttcttcaccggccagaagggccacggcctgaacggcgacgacttcctggccgtgggcctgctgaacggcagcgtggtgtacagctacaacctgggcagcggcatcgccagcatcagaagcgagcccctgaacctgagcctgggcgtgcacaccgtgcacctgggcaagttcttccaggagggctggctgaaggtggacgaccacaagaacaagagcatcatcgcccccggcagactggtgggcctgaacgtgttcagccagttctacgtgggcggctacagcgagtacacccccgacctgctgcccaacggcgccgacttcaagaacggcttccagggctgcatcttcaccctgcaggtgagaaccgagaaggacggccacttcagaggcctgggcaaccccgagggccaccccaacgccggcagaagcgtgggccagtgccacgccagcccctgcagcctgatgaagtgcggcaacggcggcacctgcatcgagagcggcaccagcgtgtactgcaactgcaccaccggctggaagggcagcttctgcaccgagaccgtgagcacctgcgaccccgagcacgaccccccccaccactgcagcagaggcgccacctgcatcagcctgccccacggctacacctgcttctgccccctgggcaccaccggcatctactgcgagcaggccctgatcctgatcgtgatcctggagaagcccaagcccgccgagagaaaggtgaagaaggaggccctgagcatcagcgaccccagcttcagaagcaacgagctgagctggatgagcttcgccagcttccacgtgagaaagaagacccacatccagctgcagttccagcccctggccgccgacggcatcctgttctacgccgcccagcacctgaaggcccagagcggcgacttcctgtgcatcagcctggtgaacagcagcgtgcagctgagatacaacctgggcgacagaaccatcatcctggagaccctgcagaaggtgaccatcaacggcagcacctggcacatcatcaaggccggcagagtgggcgccgagggctacctggacctggacggcatcaacgtgaccgagaaggccagcaccaagatgagcagcctggacaccaacaccgacttctacatcggcggcgtgagcagcctgaacctggtgaaccccatggccatcgagaacgagcccgtgggcttccagggctgcatcagacaggtgatcatcaacaaccaggagctgcagctgaccgagttcggcgccaagggcggcagcaacgtgggcgactgcgacggcaccgcctgcggctacaacacctgcagaaacggcggcgagtgcaccgtgaacggcaccaccttcagctgcagatgcctgcccgactgggccggcaacacctgcaaccagagcgtgagctgcctgaacaacctgtgcctgcaccagagcctgtgcatccccgaccagagcttcagctacagctgcctgtgcaccctgggctgggtgggcagatactgcgagaacaagaccagcttcagcaccgccaagttcatgggcaacagctacatcaagtacatcgaccccaactacagaatgagaaacctgcagttcaccaccatcagcctgaacttcagcaccaccaagaccgagggcctgatcgtgtggatgggcatcgcccagaacgaggagaacgacttcctggccatcggcctgcacaaccagaccctgaagatcgccgtgaacctgggcgagagaatcagcgtgcccatgagctacaacaacggcaccttctgctgcaacaagtggcaccacgtggtggtgatccagaaccagaccctgatcaaggcctacatcaacaacagcctgatcctgagcgaggacatcgacccccacaagaacttcgtggccctgaactacgacggcatctgctacctgggcggcttcgagtacggcagaaaggtgaacatcgtgacccaggagatcttcaagaccaacttcgtgggcaagatcaaggacgtggtgttcttccaggagcccaagaacatcgagctgatcaagctggagggctacaacgtgtacgacggcgacgagcagaacgaggtgacctag

SEQ ID NO: 111087 - protein, 547 aa, Artificial Sequence
  derived and/or modified sequence
MAIPFFTGRLTDWILQDGSADTFTRNLTLMSILTIASAVLEFVGDGIYNNTMGHVHSHLQGEVFGAVLRQETEFFQQNQTGNIMSRVTEDTSTLSDSLSENLSLFLWYLVRGLCLLGIMLWGSVSLTMVTLITLPLLFLLPKKVGKWYQLLEVQVRESLAKSSQVAIEALSAMPTVRSFANEEGEAQKFREKLQEIKTLNQKEAVAYAVNSWTTSISGMLLKVGILYIGGQLVTSGAVSSGNLVTFVLYQMQFTQAVEVLLSIYPRVQKAVGSSEKIFEYLDRTPRCPPSGLLTPLHLEGLVQFQDVSFAYPNRPDVLVLQGLTFTLRPGEVTALVGPNGSGKSTVAALLQNLYQPTGGQLLLDGKPLPQYEHRYLHRQVAAVGQEPQVFGRSLQENIAYGLTQKPTMEEITAAAVKSGAHSFISGLPQGYDTEVDEAGSQLSGGQRQAVALARALIRKPCVLILDDATSALDANSQLQVEQLLYESPERYSRSVLLITQHLSLVEQADHILFLEGGAIREGGTHQQLMEKKGCYWAMVQAPADAPE

SEQ ID NO: 111088 - protein, 386 aa, Artificial Sequence
  derived and/or modified sequence
MTSLFRRSSSGSGGGGTAGARGGGGGTAAPQELNNSRPARQVRRLEFNQAMDDFKTMFPNMDYDIIECVLRANSGAVDATIDQLLQMNLEGGGSSGGVYEDSSDSEDSIPPEILERTLEPDSSDEEPPPVYSPPAYHMHVFDRPYPLAPPTPPPRIDALGSGAPTSQRRYRNWNPPLLGNLPDDFLRILPQQLDSIQGNAGGPKPGSGEGCPPAMAGPGPGDQESRWKQYLEDERIALFLQNEEFMKELQRNRDFLLALERDRLKYESQKSKSSSVAVGNDFGFSSPVPGTGDANPAVSEDALFRDKLKHMGKSTRRKLFELARAFSEKTKMRKSKRKHLLKHQSLGAAASTANLLDDVEGHACDEDFRGRRQEAPKVEEGLREGQ

SEQ ID NO: 111089 - DNA, 1161 bp, Artificial Sequence
  derived and/or modified sequence
atgaccagcctgttcagaagaagcagcagcggcagcggcggcggcggcaccgccggcgccagaggcggcggcggcggcaccgccgccccccaggagctgaacaacagcagacccgccagacaggtgagaagactggagttcaaccaggccatggacgacttcaagaccatgttccccaacatggactacgacatcatcgagtgcgtgctgagagccaacagcggcgccgtggacgccaccatcgaccagctgctgcagatgaacctggagggcggcggcagcagcggcggcgtgtacgaggacagcagcgacagcgaggacagcatcccccccgagatcctggagagaaccctggagcccgacagcagcgacgaggagcccccccccgtgtacagcccccccgcctaccacatgcacgtgttcgacagaccctaccccctggccccccccacccccccccccagaatcgacgccctgggcagcggcgcccccaccagccagagaagatacagaaactggaacccccccctgctgggcaacctgcccgacgacttcctgagaatcctgccccagcagctggacagcatccagggcaacgccggcggccccaagcccggcagcggcgagggctgcccccccgccatggccggccccggccccggcgaccaggagagcagatggaagcagtacctggaggacgagagaatcgccctgttcctgcagaacgaggagttcatgaaggagctgcagagaaacagagacttcctgctggccctggagagagacagactgaagtacgagagccagaagagcaagagcagcagcgtggccgtgggcaacgacttcggcttcagcagccccgtgcccggcaccggcgacgccaaccccgccgtgagcgaggacgccctgttcagagacaagctgaagcacatgggcaagagcaccagaagaaagctgttcgagctggccagagccttcagcgagaagaccaagatgagaaagagcaagagaaagcacctgctgaagcaccagagcctgggcgccgccgccagcaccgccaacctgctggacgacgtggagggccacgcctgcgacgaggacttcagaggcagaagacaggaggcccccaaggtggaggagggcctgagagagggccagtag

SEQ ID NO: 111090 - DNA, 2193 bp, Artificial Sequence
  derived and/or modified sequence
aagtgtggccacttcctcttgcctggcctgactcaccctggctgctgcccattgtggctgccatggaaatacaactcgaggagaacccagaccaggacagggaggccatgttctgggtggcagtggagcctggcaaggtgccctcctggcctgggactgctgtggcagaggaagcatgaggtggggcctggcctgcccagctcagagctgaggtgcccccttggttttttacctccctgttccctggctggcccactgcacccacgcactcaacgcagtggcttcgctcctcctccaggatggctggaggtgggaccattgccaggatggcctcaagtgcccagccctcctggaagactcagtttccctctttgtcccatgcagaggtgcagagattcattattgtgggaccatccgtgaaaccggtgccaggatgcaccgggggtgtggatgaccggccgcccagccccagcacggcccggtcccgcatgccaccgccccgcgaggaccgctctccaagggctgcctggggccccgcgcccgtactctcctaacccggagctcttggcagcccattgctgcctggctacccggggaggaggaggcgcaggagtgagctgcccgagaccgcagggcaagtaagcggctgacggcggaaagaccctggggaaggggctttgcggccggctagaaacattttccccaagcggctccgcaaaatgaccagcctgttccgccggagcagcagcggcagcggcgggggtggcaccgccggggcacgcgggggcgggggaggcacggccgccccccaggagctcaacaacagccggcctgcccgccaggtgcgccgcctggagttcaaccaggccatggacgacttcaagaccatgttccccaacatggattacgacatcatcgaatgcgtgctgcgcgccaacagcggcgctgtggacgccaccatcgaccagctgctgcagatgaacctggagggcggtggcagcagcggcggcgtctatgaggacagctccgactcggaggacagcatccccccggagatcttggaaaggactttggaacctgatagctcggatgaagagcccccacctgtgtactccccgccagcctaccacatgcacgtgttcgaccggccctaccctctggctcccccgactccgcctccccgtatcgacgcgctgggctctggagcccctacaagccagagacgctatcggaactggaacccaccactgctgggcaaccttccggatgactttctccgcatcctgccccagcagctggacagcatacagggtaacgctgggggccccaagcctgggagtggagagggatgtccacctgccatggctgggccagggcccggagaccaggagagccgctggaagcagtacctggaggacgagaggatcgcgcttttcctgcagaacgaggagttcatgaaggagctgcaacggaaccgcgacttcctcctcgctctggagagagatcgattgaaatacgaatcccagaaatctaaatccagcagcgtggctgtcggaaacgactttggcttttcctctcctgtcccaggaactggcgacgccaaccccgctgtgtctgaagatgccttattcagggacaagctgaaacacatgggaaagtccacccggaggaaactgtttgaacttgcccgagccttctcagagaagaccaaaatgaggaagtcaaagaggaaacacttgttgaagcatcagtcgctgggggctgccgcgtcaacagccaacctcctggatgatgtggagggccacgcgtgtgatgaagacttccggggcaggcgtcaggaggcacccaaggtggaggaaggcctgcgagaaggacagtaagagatgccagcagctcttccttgccagagatgatctgacccggtgggggcagctggaaagcaacactggcccccagctgaagggcccagctgcagccagacagatggtgcttgagaaccgaggcccggtgatcctccagccacagtccagcccaaccactgccactttccatgggacttagaacttcggagttgctgccttgcaattggaggaaggacctggggcccctataggcagcagccaattacagccccttttgtagccaggcgttcctatggtcaaagagtggaaatgcaggaaccaacctcccttt

SEQ ID NO: 111091 - DNA, 1888 bp, Artificial Sequence
  derived and/or modified sequence
ggccccgccgccaccgctgcggattgcagcccctcccccgcccggcccgcggcccggcccctgcggcccgcgcggagcggacgcgcgtggcgctgcccggtgggaccatccgtgaaaccggtgccaggatgcaccgggggtgtggatgaccggccgcccagccccagcacggcccggtcccgcatgccaccgccccgcgaggaccgctctccaagggctgcctggggccccgcgcccgtactctcctaacccggagctcttggcagcccattgctgcctggctacccggggaggaggaggcgcaggagtgagctgcccgagaccgcagggcaagtaagcggctgacggcggaaagaccctggggaaggggctttgcggccggctagaaacattttccccaagcggctccgcaaaatgaccagcctgttccgccggagcagcagcggcagcggcgggggtggcaccgccggggcacgcgggggcgggggaggcacggccgccccccaggagctcaacaacagccggcctgcccgccaggtgcgccgcctggagttcaaccaggccatggacgacttcaagaccatgttccccaacatggattacgacatcatcgaatgcgtgctgcgcgccaacagcggcgctgtggacgccaccatcgaccagctgctgcagatgaacctggagggcggtggcagcagcggcggcgtctatgaggacagctccgactcggaggacagcatccccccggagatcttggaaaggactttggaacctgatagctcggatgaagagcccccacctgtgtactccccgccagcctaccacatgcacgtgttcgaccggccctaccctctggctcccccgactccgcctccccgtatcgacgcgctgggctctggagcccctacaagccagagacgctatcggaactggaacccaccactgctgggcaaccttccggatgactttctccgcatcctgccccagcagctggacagcatacagggtaacgctgggggccccaagcctgggagtggagagggatgtccacctgccatggctgggccagggcccggagaccaggagagccgctggaagcagtacctggaggacgagaggatcgcgcttttcctgcagaacgaggagttcatgaaggagctgcaacggaaccgcgacttcctcctcgctctggagagagatcgattgaaatacgaatcccagaaatctaaatccagcagcgtggctgtcggaaacgactttggcttttcctctcctgtcccaggaactggcgacgccaaccccgctgtgtctgaagatgccttattcagggacaagctgaaacacatgggaaagtccacccggaggaaactgtttgaacttgcccgagccttctcagagaagaccaaaatgaggaagtcaaagaggaaacacttgttgaagcatcagtcgctgggggctgccgcgtcaacagccaacctcctggatgatgtggagggccacgcgtgtgatgaagacttccggggcaggcgtcaggaggcacccaaggtggaggaaggcctgcgagaaggacagtaagagatgccagcagctcttccttgccagagatgatctgacccggtgggggcagctggaaagcaacactggcccccagctgaagggcccagctgcagccagacagatggtgcttgagaaccgaggcccggtgatcctccagccacagtccagcccaaccactgccactttccatgggacttagaacttcggagttgctgccttgcaattggaggaaggacctggggcccctataggcagcagccaattacagccccttttgtagccaggcgttcctatggtcaaagagtggaaatgcaggaaccaacctcccttt

SEQ ID NO: 111092 - DNA, 1161 bp, Artificial Sequence
  derived and/or modified sequence
atgacgagcctgttccgccgcagtagctcaggctccggcggtggtggaacagccggggctcgcggaggaggagggggaactgcagcgccccaggagcttaacaactccaggcctgcccgccaggttcgaaggttagagtttaatcaagctatggatgatttcaagaccatgttccccaacatggactacgacattattgagtgcgtcctgcgtgccaacagcggtgcagttgatgccactatagatcagttactgcagatgaacctcgagggaggagggagttcagggggagtgtatgaagattcttccgattccgaagattccataccacctgaaatcctggagagaacactcgaacctgattcatctgatgaagagcctcctcccgtgtactcaccacccgcttaccatatgcacgtgtttgatcgtccctaccccctggcaccgcccaccccccccccacgaatcgatgcgctggggtctggcgcacctaccagtcagagaaggtatagaaactggaacccccctcttctcggcaacctccctgatgatttcctccgtatcctcccccagcagctagactctatccagggtaacgccggcggccccaaaccagggtcaggggagggctgtcctcccgccatggcaggaccaggccctggagatcaagagagcaggtggaagcaatatctcgaggatgagcggattgcactattcctgcagaacgaagagttcatgaaggagttacagcggaaccgtgatttcctcctggcccttgagagagaccgattgaagtacgaaagccagaagtccaaatccagctctgtagccgtgggaaatgatttcgggttctctagtccggtcccaggaacgggggatgctaaccccgcggtgtctgaggatgccctgtttcgggataagttgaagcacatgggaaaatccactcggaggaagctatttgagcttgcgcgggctttttccgagaagaccaaaatgcgtaagtcaaagagaaagcacctgctgaaacaccaatctcttggcgcggcagcaagtacagccaatctgctggatgatgtcgagggtcacgcctgtgacgaggactttcgaggccgcagacaggaggccccgaaagttgaggaggggctgcgggagggccaatag

SEQ ID NO: 111093 - DNA, 1161 bp, Artificial Sequence
  derived and/or modified sequence
atgacctccctttttcgtcgcagcagttctgggagcggaggcgggggcacagccggagctcgagggggcggcggtggcaccgccgcccctcaggaattaaataattcccggccagcccgtcaagtcaggcgcctggagttcaaccaggccatggacgatttcaaaactatgttcccaaatatggattacgatataattgagtgcgtgctccgggccaattccggagcggtggacgcaaccattgaccagctactacagatgaatctggaaggtggtggctcaagcggtggggtatacgaggattccagcgactccgaggactccataccccccgaaatccttgaaagaacgctggagcccgattccagcgatgaagagcccccaccagtgtattcccctcctgcctatcacatgcacgtattcgatcgcccctaccctctggccccccccaccccccctcctcggattgatgccctcgggtccggcgccccaacctctcagaggcggtaccgaaattggaatcccccgctcctcggtaacttaccagacgattttttgcggattttgccccagcaactggatagtattcagggcaacgccggggggcccaagcctggttccggcgagggctgcccccccgctatggcaggccccggaccaggtgatcaggaaagtcggtggaagcagtacctcgaagacgaacgtattgctctctttctccagaatgaagagttcatgaaggaactgcaaaggaatagagacttcctgttggcgttggagagggatcgactaaagtacgagtcacaaaagagcaaatccagtagcgtggccgtagggaatgatttcggattctccagtcccgtacctgggaccggcgacgccaatccagctgttagcgaggatgccctgtttcgagacaagctcaagcacatgggtaaatcaacaaggaggaagctctttgagctcgccagggcatttagcgaaaaaactaaaatgcgcaaatccaaacgcaagcacttactgaaacaccagtccctgggcgccgcggcttctactgccaatctcttggatgatgtagagggacatgcatgcgatgaggatttccgagggcgaaggcaagaggcacctaaagttgaggaggggttgcgggagggacaatag

SEQ ID NO: 111094 - DNA, 1161 bp, Artificial Sequence
  derived and/or modified sequence
atgaccagcctcttccgccgcagcagcagcggcagcggcggcggcggcacagctggggcccggggcggcggcggcggcacagctgccccccaggagctgaacaacagcaggcctgcccggcaggtgcggcggctggagttcaaccaggccatggatgacttcaagaccatgttccccaacatggactatgacatcattgaatgtgtgctgcgggccaacagcggggctgtggatgccaccatcgaccagctgctgcagatgaacctggagggcggcggcagcagtggaggagtgtatgaggacagcagtgacagcgaggacagcatccccccagagatcctggagaggaccctggagccagacagcagtgatgaggagcccccacctgtgtacagccccccagcctaccacatgcacgtgtttgaccggccctaccccctggccccacccaccccacctccaagaattgatgccctgggcagcggggcccccaccagccagaggcgctacagaaactggaacccccccctgctgggcaacctgcctgatgacttcctgcgcatcctgccccagcagctggacagcatccagggcaatgctgggggccccaagccaggcagcggggagggctgccccccagccatggccggccctggccctggggaccaggagagccgctggaagcagtacctggaggatgagcgcatcgccctcttcctgcagaatgaggagttcatgaaggagctgcagaggaacagagacttcctgctggccctggagcgggaccggctgaagtatgagagccagaagagcaagagcagctctgtggccgtgggcaatgactttggcttcagcagccctgtgcccggcactggagatgccaacccagctgtgtctgaagatgccctcttccgggacaagctgaagcacatgggcaagagcaccaggaggaagctgtttgagctggcccgggccttcagcgagaagaccaagatgaggaagagcaagaggaagcacctgctgaagcaccagagcctgggcgctgctgccagcacagccaacctgctggatgatgtggagggccacgcctgtgatgaggacttccggggccggcggcaggaggcccccaaggtggaggagggcctgcgggagggccagtag

SEQ ID NO: 111095 - DNA, 1161 bp, Artificial Sequence
  derived and/or modified sequence
atgaccagcctgttccggcggagcagcagcggcagcggcggcggcggaacggctggggccaggggcggtggcggtggcaccgccgcacctcaggagttaaacaattcccggcctgcgaggcaggttaggcgactcgaatttaaccaggccatggacgatttcaaaactatgttccccaacatggactatgatatcatcgagtgtgtgttacgcgctaactccggggctgtggacgctaccatcgatcagctcttacaaatgaaccttgagggcggggggtccagtggaggcgtgtatgaagattcctcagatagcgaagactcaatccccccagagatcttagagaggacactcgagcccgattcctcggatgaagaacccccacccgtttactcccctcccgcctatcacatgcacgtctttgatcggccataccctctagcacctcctactccccccccccgaatcgacgccctgggaagtggcgcaccaacctcccagaggcgttataggaactggaaccctcccctattgggcaacctgcccgatgacttcctgcgcatcctgccccagcagttggatagtattcaagggaacgctgggggccccaagcccgggtccggggaaggatgcccccccgctatggctggacctggccctggggatcaagaaagcagatggaagcagtaccttgaagacgagagaatcgccctgttcctgcagaacgaagaatttatgaaggaactgcagaggaatcgggactttctcttggcactcgagagagaccgattgaagtacgaatcccaaaagtccaaatctagttcggttgccgtgggaaatgacttcgggttcagtagtcctgtgcctgggacaggcgatgctaaccctgcagtgagcgaggacgccctgtttcgagacaaactcaaacatatggggaagagtacaagaaggaaacttttcgaactggcaagagccttttctgaaaagacgaagatgcggaaatccaagaggaagcacctgctgaagcatcagtctctaggagccgccgcctctactgccaacctgttggatgatgtggaaggacacgcttgcgatgaggatttccggggaagaaggcaggaagcaccaaaagttgaagaggggttgagggagggacagtag

SEQ ID NO: 111096 - DNA, 1161 bp, Artificial Sequence
  derived and/or modified sequence
atgaccagcctgttccggcggagcagcagcggcagcggcggcggcggtacggctggcgcccgcgggggtgggggcggaacagccgcacctcaggaactgaataacagccgacctgcccggcaggtccggcgtctggagttcaaccaggccatggatgactttaagacaatgttcccgaatatggattatgacatcattgagtgtgtgctgcgcgccaatagtggtgccgtggacgctacaatcgatcagctgctccagatgaatctggagggcggtggctcgagcggcggggtgtacgaagactcctcagatagcgaagacagcattccccctgaaattctggagaggaccctcgaaccagactcgtcagacgaagagcccccaccagtttactcaccaccggcatatcacatgcatgtttttgacagaccttatcctttggctccaccaacaccacccccgcggatcgacgcactgggctcaggagctcctacaagtcaacggcgctatcgcaactggaatccaccacttctaggcaaccttcctgacgattttctccggatcctgcctcagcagctggattctatccaaggtaatgccgggggtcctaagcctggctccggtgaagggtgtccccccgcaatggcagggccaggacccggagaccaggaaagcagatggaagcagtacctggaggacgaacggattgcactttttctccagaatgaggagttcatgaaggagctgcagcgaaaccgggacttccttttagcgctcgaaagagatcgcctgaagtacgaaagccagaagagtaagtcgagcagtgtcgccgtcggaaatgatttcggcttctcgtctcccgtgcctggtacaggggacgcgaaccccgccgtgtctgaggacgcactgttccgtgacaagctaaagcacatgggaaaatccacgcgaagaaagctgttcgaacttgcccgcgctttttccgaaaagaccaagatgcgcaaaagcaagagaaaacacctgctgaaacaccagtccctgggtgcagccgctagtacagcaaacctgctcgatgacgtagagggccatgcctgtgatgaagacttccgtggacgaaggcaggaagctcccaaggtggaggaaggtctgcgtgaaggccaatag

SEQ ID NO: 111097 - DNA, 1161 bp, Artificial Sequence
  derived and/or modified sequence
atgacgtccctgttcaggcgatccagcagcggctccgggggaggtggcactgctggcgcacgtgggggtggcggtggtacagcggcaccccaggaactgaacaattctcgtccggcacggcaggtcaggcgcctcgaattcaaccaggccatggatgacttcaagacgatgttcccaaatatggattatgacataattgagtgcgtgttacgggctaattcaggggctgtggatgctacgatcgatcagctgctccagatgaatctggagggaggcggaagtagcggcggagtgtacgaagatagttccgatagtgaagatagcattcccccagaaattttggagaggactctcgagccagattcatcagatgaggagcctcccccagtctacagtcctccagcttatcatatgcacgttttcgaccgtccataccctctggcccctcccactcccccaccacgtatcgacgctctgggctcaggtgctccgacttcgcagagacgctaccgtaattggaatcccccattgctggggaacttgcccgatgacttcttgcgaatccttccccaacagctcgattccatccaggggaatgcgggaggaccaaaacctggttcaggcgaggggtgccctcctgctatggccggtcccggaccaggtgatcaagagtccaggtggaagcagtatcttgaggatgaacgtattgcattattcttgcagaacgaagagtttatgaaggagctgcagaggaacagagattttcttctggccttggaaagggaccgactcaagtatgagagccagaagagtaaaagtagctcggtcgcggttgggaatgatttcggattctcctctccagtgcctggaacaggcgacgccaacccagccgtgtccgaagacgcgcttttccgtgacaagctgaaacacatgggaaagtctacccgaaggaagctgtttgaattggcgcgagccttctcggagaaaaccaaaatgaggaagtctaagaggaaacatcttttaaaacatcagagcctgggggctgctgcgtccactgctaatctgctggatgatgtggagggccacgcatgtgacgaagactttcgaggacgtcggcaggaagcccctaaggtcgaggagggacttagggagggtcagtag

SEQ ID NO: 111098 - DNA, 1161 bp, Artificial Sequence
  derived and/or modified sequence
atgaccagcctctttagacgctcttcatctgggtcaggaggtgggggaacggcaggggctcgcggaggcggagggggaactgccgcaccacaggagctaaataactcccggcctgcccgacaggttaggagactggagtttaaccaggccatggatgatttcaagaccatgttccctaatatggactatgatattattgagtgtgtgcttcgtgcaaattccggcgctgtcgatgcaacgatcgaccaactgctccagatgaaccttgaaggaggcggaagcagtggcggtgtgtacgaagattcttcagatagtgaggatagcattccgccagagatcctggaacgcacgctggagcctgattctagtgacgaggaacccccaccggtgtattccccgcctgcctaccacatgcacgtctttgacaggccataccctctagccccacccacgccacctccacggattgatgctctggggtcgggtgcaccgaccagccaaagaaggtatcggaattggaatccaccgctgcttggcaatcttccagatgatttccttcggattctgcctcagcagcttgactctatacagggaaacgctggaggcccaaagcccggatctggggaggggtgtcccccagctatggccggacccggtcctggtgatcaggagagtcggtggaagcaatatctggaagatgaacgaatcgcactcttcctgcaaaatgaggagtttatgaaagagctccagcgtaaccgagactttctcctggccctcgagagggatcgtctgaagtacgagtcacagaagtccaagagtagcagtgtggccgtgggaaatgacttcggctttagctctccagttccaggcaccggcgatgccaaccccgctgtatccgaagacgctctgttcagagacaagctgaagcacatgggaaaaagcactaggcggaagctttttgaactggccagagctttctcggagaaaacaaagatgcgcaaatctaaaagaaaacatctgctgaaacaccagagcctaggggctgccgctagcaccgcaaacctactagacgacgtagaggggcatgcatgtgacgaggactttcgcggtcgtaggcaggaggcccctaaggttgaggagggactgagggaaggccagtag

SEQ ID NO: 111099 - protein, 712 aa, Artificial Sequence
  derived and/or modified sequence
MEKIISQCRFFVSMNDLGGDFKGVGKGSLAADKVVEEIRRRGGKAVANYDSVEEGEKVVKTALDAFGRIDVVVNNAGILRDRSFARISDEDWDIIHRVHLRGSFQVTRAAWEHMKKQKYGRIIMTSSASGIYGNFGQANYSAAKLGLLGLANSLAIEGRKSNIHCNTIAPNAGSRMTQTVMPEDLVEALKPEYVAPLVLWLCHESCEENGGLFEVGAGWIGKLRWERTLGAIVRQKNHPMTPEAVKANWKKICDFENASKPQSIQESTGSIIEVLSKIDSEGGVSANHTSRATSTATSGFAGAIGQKLPPFSYAYTELEAIMYALGVGASIKDPKDLKFIYEGSSDFSCLPTFGVIIGQKSMMGGGLAEIPGLSINFAKVLHGEQYLELYKPLPRAGKLKCEAVVADVLDKGSGVVIIMDVYSYSEKELICHNQFSLFLVGSGGFGGKRTSDKVKVAVAIPNRPPDAVLTDTTSLNQAALYRLSGDWNPLHIDPNFASLAGFDKPILHGLCTFGFSARRVLQQFADNDVSRFKAIKARFAKPVYPGQTLQTEMWKEGNRIHFQTKVQETGDIVISNAYVDLAPTSGTSAKTPSEGGKLQSTFVFEEIGRRLKDIGPEVVKKVNAVFEWHITKGGNIGAKWTIDLKSGSGKVYQGPAKGAADTTIILSDEDFMEVVLGKLDPQKAFFSGRLKARGNIMLSQKLQMILKDYAKL

SEQ ID NO: 111100 - protein, 599 aa, Artificial Sequence
  derived and/or modified sequence
MKKQKYGRIIMTSSASGIYGNFGQANYSAAKLGLLGLANSLAIEGRKSNIHCNTIAPNAGSRMTQTVMPEDLVEALKPEYVAPLVLWLCHESCEENGGLFEVGAGWIGKLRWERTLGAIVRQKNHPMTPEAVKANWKKICDFENASKPQSIQESTGSIIEVLSKIDSEGGVSANHTSRATSTATSGFAGAIGQKLPPFSYAYTELEAIMYALGVGASIKDPKDLKFIYEGSSDFSCLPTFGVIIGQKSMMGGGLAEIPGLSINFAKVLHGEQYLELYKPLPRAGKLKCEAVVADVLDKGSGVVIIMDVYSYSEKELICHNQFSLFLVGSGGFGGKRTSDKVKVAVAIPNRPPDAVLTDTTSLNQAALYRLSGDWNPLHIDPNFASLAGFDKPILHGLCTFGFSARRVLQQFADNDVSRFKAIKARFAKPVYPGQTLQTEMWKEGNRIHFQTKVQETGDIVISNAYVDLAPTSGTSAKTPSEGGKLQSTFVFEEIGRRLKDIGPEVVKKVNAVFEWHITKGGNIGAKWTIDLKSGSGKVYQGPAKGAADTTIILSDEDFMEVVLGKLDPQKAFFSGRLKARGNIMLSQKLQMILKDYAKL

SEQ ID NO: 111101 - DNA, 2139 bp, Artificial Sequence
  derived and/or modified sequence
atggaaaagattattagccagtgcaggttttttgttagcatgaatgacctgggtggtgatttcaaaggcgtcgggaaagggagcctggcagctgacaaggtcgttgaagaaatcaggagaaggggcggcaaagcagtagctaattatgactccgttgaggagggcgagaaggtcgtgaaaaccgctctggatgctttcggcaggatcgacgtggtagtgaataatgccggcatactgagagatagaagcttcgcacgcatcagtgacgaggactgggacattatacatcgtgtgcatttacgagggtcttttcaggtcaccagggcggcatgggagcacatgaagaagcagaagtatggaagaatcatcatgacctcgagcgcatcaggtatttacggcaacttcgggcaggcgaactactcagcggctaagctgggcttattaggattagcaaactcccttgcaatcgaggggagaaaatccaatattcactgcaacacaatcgcccctaatgcgggctcacgcatgactcagactgtgatgcctgaagacttagtggaagcgctgaaacctgaatacgttgctcccttggttttgtggctctgccatgagtcctgcgaagagaatgggggcctgttcgaagtgggagccgggtggattggaaaactgaggtgggagaggaccttgggggcaatagtgcggcagaagaatcatccgatgaccccggaggccgtgaaggctaattggaagaaaatatgtgattttgagaatgcttccaagccccagtcgatccaagagtctaccggctcgattattgaggtcctgagcaagatcgattcagagggaggagtgtcagccaaccacacaagcagagcgacctccactgctacctccgggtttgcgggtgctatcgggcagaagcttcctcccttctcctatgcctacacagagctcgaggctatcatgtacgctttgggagtgggtgcctcgattaaggatcctaaggatctcaaatttatctacgaggggtcttcggatttctcttgcctgcccaccttcggtgtgattattggacagaaaagcatgatggggggcgggctggccgaaatccctgggctaagtatcaactttgcaaaggttcttcacggcgagcagtaccttgaattatataagcctttgcctcgcgccgggaagttaaagtgtgaggccgtggtcgccgacgtactggacaaaggatccggggtcgtgatcataatggatgtgtatagctacagcgaaaaggagcttatctgccacaatcagttcagcctgttccttgtagggtccggaggttttggggggaagcgcacgagcgacaaagttaaagttgctgtggctatccctaaccgcccacctgatgccgttctcactgacacgacctcgcttaaccaggccgcgttatatcggctctccggcgactggaacccattgcacattgaccccaactttgctagcctggcaggattcgataagcccatcctccatggtctatgcacttttggttttagcgcacgccgggtcttacagcagtttgccgacaacgacgtgtcccgctttaaggccatcaaggctagattcgccaaaccggtgtacccaggtcagacactgcagactgagatgtggaaagaagggaaccggatccacttccagacgaaggtacaggaaacaggggacatagttatatctaacgcatacgtagacctggcccctaccagtggcaccagcgccaagactccatccgagggcggtaagctgcagagcacattcgtatttgaagagattgggcggagactcaaggacatcggcccagaggtggtgaagaaggtgaacgctgtgttcgagtggcatatcactaagggggggaacatcggggccaaatggactattgatctgaagtcgggtagtggtaaggtctaccagggacccgcaaaaggggctgcggacacaactataattctaagtgacgaagacttcatggaggtcgttctcggtaaattggatccccaaaaggcattcttttctggtcgactgaaggcccgggggaacattatgcttagtcaaaagctgcagatgattcttaaagattatgcaaaattgtag

SEQ ID NO: 111102 - DNA, 1800 bp, Artificial Sequence
  derived and/or modified sequence
atgaagaagcagaagtatgggcggatcataatgacttcctccgccagcggcatctatggcaatttcggtcaggctaattactctgctgcaaagcttggcctcctgggattagctaacagcctagcaatcgaggggaggaaatcgaatatacactgtaataccatagcccccaatgcaggatcacgaatgactcagacagtcatgccagaggacctggtggaagcgctgaagcctgagtatgttgctccattggtgctgtggctctgccatgagtcttgcgaagagaatggaggcctgttcgaggtgggtgccggatggatcggcaagctaaggtgggagaggacgctgggtgctattgtccgccagaagaaccaccccatgaccccggaggcggtgaaggccaactggaagaagatttgtgatttcgagaatgcctctaagccacaatccattcaggaatctacgggcagtatcatagaggtcctctccaagatcgattcagaaggaggagtgagtgctaatcatacgagccgggctacaagcacagctaccagcggatttgctggcgcgattggtcagaagctcccaccatttagctacgcctacacagagcttgaagccatcatgtacgccttgggtgtcggcgcatccattaaggacccaaaggacttgaagtttatctacgagggatcatccgatttttcatgcttacccacctttggagtgattatcggccagaagtcgatgatgggtggcggcttagccgaaatccctggcctgagcataaacttcgcaaaagtgctgcacggcgagcagtaccttgagctctataagcccctgccacgcgcggggaaattgaagtgcgaggcagtggtagcagacgttcttgataagggatctggcgtggtgatcatcatggatgtgtactcttattcggagaaggagctgatttgtcataatcagttctctctgtttctggtggggagtggggggtttggcggcaagcgaacgtccgacaaggtcaaggttgcagtggctattccgaataggcccccggatgccgtgctgaccgataccaccagtctgaatcaagcagcactgtatcggctgtctggagactggaacccgttgcacatcgacccaaacttcgcgagtttggccgggttcgacaagcccattttgcacgggttatgtacctttgggttttcagcaaggcgggtgttacagcaattcgccgataacgatgtgagccgatttaaagctattaaggccaggtttgccaagccagtctacccagggcagaccctccagaccgaaatgtggaaggagggtaaccggattcacttccaaaccaaagtccaggaaacaggcgacatcgtcatctccaacgcatacgtggacctggctcccactagtggcacctccgccaaaacacctagtgagggtgggaagttacaatcgacattcgtatttgaagagattggccggcgcctgaaggacatcggtcctgaggtcgttaagaaagtgaatgctgtattcgaatggcacatcactaagggcggcaacatcggcgcaaagtggactattgaccttaagtccggctccggtaaggtgtaccaggggccagccaagggggccgccgatacaaccattattctcagtgatgaggacttcatggaagtagtattaggaaaactcgacccccagaaagctttttttagcggccggcttaaggcccgcggaaatattatgctgtcccaaaaactccagatgatcctgaaggattacgccaagttgtag

SEQ ID NO: 111103 - DNA, 2225 bp, Artificial Sequence
  derived and/or modified sequence
aatagtgcctgactgtcttttggaagaagagttagtgtctttgatttagaattaagctaagaagagcttttagtttctgcttcccttgtaacaactggggtaaaaaagaagctgagaaagataggatttgctggcaaagggggcctatgttggtgcttttcttggtgctgcaacgggactgagatataatccacagagttcatttgcggggttcattccaagtgacacgggcagcatgggaacacatgaagaaacagaagtatggaaggattattatgacttcatcagcttcaggaatatatggcaactttggccaggccaattatagtgctgcaaagttgggtcttctgggccttgcaaattctcttgcaattgaaggcaggaaaagcaacattcattgtaacaccattgctcctaatgcgggatcacggatgactcagacagttatgcctgaagatcttgtggaagccctgaagccagagtatgtggcacctcttgtcctttggctttgtcacgagagttgtgaggagaatggtggcttgtttgaggttggagcaggatggattggaaaattacgctgggagcggactcttggagctattgtaagacaaaagaatcacccaatgactcctgaggcagtcaaggctaactggaagaagatctgtgactttgagaatgccagcaagcctcagagtatccaagaatcaactggcagtataattgaagttctgagtaaaatagattcagaaggaggagtttcagcaaatcatactagtcgtgcaacgtctacagcaacatcaggatttgctggagctattggccagaaactccctccattttcttatgcttatacggaactggaagctattatgtatgcccttggagtgggagcgtcaatcaaggatccaaaagatttgaaatttatttatgaaggaagttctgatttctcctgtttgcccaccttcggagttatcataggtcagaaatctatgatgggtggaggattagcagaaattcctggactttcaatcaactttgcaaaggttcttcatggagagcagtacttagagttatataaaccacttcccagagcaggaaaattaaaatgtgaagcagttgttgctgatgtcctagataaaggatccggtgtagtgattattatggatgtctattcttattctgagaaggaacttatatgccacaatcagttctctctctttcttgttggctctggaggctttggtggaaaacggacatcagacaaagtcaaggtagctgtagccatacctaatagacctcctgatgctgtacttacagataccacctctcttaatcaggctgctttgtaccgcctcagtggagactggaatcccttacacattgatcctaactttgctagtctagcaggttttgacaagcccatattacatggattatgtacatttggattttctgccaggcgtgtgttacagcagtttgcagataatgatgtgtcaagattcaaggcaattaaggctcgttttgcaaaaccagtatatccaggacaaactctacaaactgagatgtggaaggaaggaaacagaattcattttcaaaccaaggtccaagaaactggagacattgtcatttcaaatgcatatgtggatcttgcaccaacatctggtacttcagctaagacaccctctgagggcgggaagcttcagagtacctttgtatttgaggaaataggacgccgcctaaaggatattgggcctgaggtggtgaagaaagtaaatgctgtatttgagtggcatataaccaaaggcggaaatattggggctaagtggactattgacctgaaaagtggttctggaaaagtgtaccaaggccctgcaaaaggtgctgctgatacaacaatcatactttcagatgaagatttcatggaggtggtcctgggcaagcttgaccctcagaaggcattctttagtggcaggctgaaggccagagggaacatcatgctgagccagaaacttcagatgattcttaaagactacgccaagctctgaagggcacactacactattaataaaaatggaatcattaaatactctcttcacccaaatatgcttgattattctgcaaaagtgattagaactaagatgcaggggaaattgcttaacattttcagatatcagataactgcagattttcattttctactaatttttcatgtatcattattttta

SEQ ID NO: 111104 - DNA, 2139 bp, Artificial Sequence
  derived and/or modified sequence
atggagaagatcatcagccagtgccgcttctttgtgtccatgaatgacctgggcggggacttcaagggcgtgggcaagggcagcctggccgctgacaaggtggtggaggagatcagaagaagaggaggcaaggctgtggccaactatgattctgtggaggagggggagaaggtggtgaagacagccctggatgccttcggcagaattgatgtggtggtgaacaatgccggcatcctgcgggacaggagctttgcccgcatcagtgatgaggactgggacatcatccaccgggtgcacctgcggggcagcttccaggtgaccagggctgcctgggagcacatgaagaagcagaagtatggccgcatcatcatgaccagcagcgccagcggcatctacggcaactttggccaggccaactacagcgctgccaagctgggcctgctgggcctggccaacagcctggccatcgagggcaggaagagcaacatccactgcaacaccatcgccccaaatgccggcagcaggatgacccagacagtgatgcctgaggacctggtggaggccctgaagccagaatatgtggcccccctggtgctgtggctgtgccacgagagctgtgaggagaatggaggcctgtttgaggtgggcgccggctggattggcaagctgcgctgggagaggaccctgggcgccatcgtgcggcagaagaaccaccccatgaccccagaggccgtgaaggccaactggaagaagatctgtgactttgaaaatgccagcaagccccagagcatccaggagagcacaggcagcatcatcgaggtgctgagcaagattgacagcgagggcggcgtgtctgccaaccacaccagccgggccaccagcacagccaccagcggctttgctggggccatcggccagaagctgccccccttctcctatgcctacacagagctggaggccatcatgtatgccctgggcgtgggcgccagcatcaaggaccccaaggacctgaagttcatctatgagggcagcagtgacttcagctgcctgcccacctttggagtcatcatcggccagaagtccatgatgggcggcggcctggccgagatccctggcctgagcatcaactttgccaaggtgctgcacggggagcagtacctggagctgtacaagcccctgccccgggccggcaagctgaagtgtgaggccgtggtggctgatgtgctggacaagggcagcggcgtggtgatcatcatggatgtgtacagctacagcgagaaggagctgatctgccacaaccagttcagcctcttcctggtgggcagcggcggctttggaggcaagaggaccagtgacaaggtgaaggtggccgtggccatccccaaccggcccccagatgctgtgctgacagacaccaccagcctgaaccaggccgccctgtaccgcctgagcggggactggaaccccctgcacatcgaccccaactttgccagcctggccggctttgacaagcccatcctgcacggcctgtgcaccttcggcttcagcgcccggcgggtgctgcagcagtttgctgacaatgatgtgagccgcttcaaggccatcaaggccaggtttgccaagcctgtgtacccaggccagaccctgcagacagagatgtggaaggagggcaaccgcatccacttccagaccaaggtgcaggagactggagacatcgtcatcagcaatgcctacgtggacctggcccccaccagcggcaccagcgccaagaccccatctgagggcggcaagctgcagagcacctttgtgtttgaggagattggaagaaggctgaaggacatcggccctgaggtggtgaagaaggtgaatgctgtgtttgagtggcacatcaccaagggcggcaacatcggggccaagtggaccatcgacctgaagagcggcagcggcaaggtgtaccagggccctgccaagggagctgctgacaccaccatcatcctgagtgatgaggacttcatggaggtggtgctgggcaagctggacccccagaaggccttcttcagcggccgcctgaaggcccggggcaacatcatgctgagccagaagctgcagatgatcctgaaggactatgccaagctgtag

SEQ ID NO: 111105 - DNA, 1800 bp, Artificial Sequence
  derived and/or modified sequence
atgaagaagcagaagtatggccgcatcatcatgaccagcagcgccagcggcatctacggcaactttggccaggccaactacagcgctgccaagctgggcctgctgggcctggccaacagcctggccatcgagggcaggaagagcaacatccactgcaacaccatcgccccaaatgccggcagcaggatgacccagacagtgatgcctgaggacctggtggaggccctgaagccagaatatgtggcccccctggtgctgtggctgtgccacgagagctgtgaagaaaatggaggcctgtttgaggtgggcgccggctggattggcaagctgcgctgggagaggaccctgggcgccatcgtgcggcagaagaaccaccccatgaccccagaggccgtgaaggccaactggaagaagatctgtgactttgaaaatgccagcaagccccagagcatccaggagagcacaggcagcatcatcgaggtgctgagcaagattgattctgagggcggcgtgtctgccaaccacaccagccgggccaccagcacagccaccagcggctttgctggggccatcggccagaagctgccccccttctcctatgcctacacagagctggaggccatcatgtatgccctgggcgtgggcgccagcatcaaggaccccaaggacctgaagttcatctatgagggcagcagtgacttcagctgcctgcccaccttcggggtcatcatcggccagaagtccatgatgggcggcggcctggccgagatccctggcctgagcatcaactttgccaaggtgctgcatggagagcagtacctggagctgtacaagcccctgcccagggctgggaagctgaagtgtgaggccgtggtggctgatgtgctggacaagggcagcggcgtggtgatcatcatggatgtgtacagctacagcgagaaggagctgatctgccacaaccagttcagcctcttcctggtgggcagcggcggctttggaggcaagaggaccagtgacaaggtgaaggtggccgtggccatccccaacagacctccagatgctgtgctgacagacaccaccagcctgaaccaggccgccctgtaccgcctgagcggggactggaaccccctgcacatcgaccccaactttgccagcctggccggctttgacaagcccatcctgcacggcctgtgcaccttcggcttcagcgccaggagagtgctgcagcagtttgctgacaatgatgtgagccgcttcaaggccatcaaggccaggtttgccaagcctgtgtacccaggccagaccctgcagacagagatgtggaaggagggcaaccgcatccacttccagaccaaggtgcaggagaccggggacatcgtcatcagcaatgcctacgtggacctggcccccaccagcggcaccagcgccaagacccccagcgagggcggcaagctgcagagcacctttgtgtttgaggagatcggccggcggctgaaggacatcggccctgaggtggtgaagaaggtgaatgctgtgtttgagtggcacatcaccaagggcggcaacattggagccaagtggaccatcgacctgaagagcggcagcggcaaggtgtaccagggccctgccaagggagctgctgacaccaccatcatcctgagtgatgaggacttcatggaggtggtgctgggcaagctggacccccagaaggccttcttcagcggccgcctgaaggcccggggcaacatcatgctgagccagaagctgcagatgatcctgaaggactatgccaagctgtag

SEQ ID NO: 111106 - DNA, 2139 bp, Artificial Sequence
  derived and/or modified sequence
atggagaagatcatcagccagtgccggttcttcgtgagcatgaacgacctggggggagattttaagggagttggcaaaggtagtctcgccgcggataaagtagtagaagagattcggcgcagaggtgggaaagccgtggccaactacgactcggttgaggaaggtgagaaagtggttaagactgcgctggacgctttcggcaggatcgatgtggtggttaataacgctggtatattgcgcgatagatccttcgcccgtatcagcgacgaagattgggacataattcacagggtgcacctgagggggagcttccaggttaccagggcagcctgggaacacatgaaaaagcagaagtatggacggattatcatgacatccagcgcatctggcatttatggcaactttggacaggcaaattacagcgccgctaaactggggctgctgggtttggccaattctctcgccatcgaaggccggaaatccaatatacattgcaacaccatcgctccaaacgccggatctaggatgactcagactgttatgcctgaagacctcgtggaggcactgaagccagaatacgtggctcctctggtattatggctctgccatgaatcgtgcgaagaaaatgggggtctgttcgaggttggcgccggttggatcggcaagctaagatgggagagaaccctgggcgccatagtgcgccagaagaatcacccaatgacccccgaagccgttaaggcgaattggaaaaaaatttgtgacttcgagaacgcatctaaaccacagtctatccaggaatcaaccgggtcaattattgaagtgttgtccaaaattgattccgagggaggcgtctccgccaatcatacttcacgggcaacgtcaactgctacaagcggctttgctggggcgattggacagaagctgcctcctttctcttatgcctataccgagctcgaagcgatcatgtatgccctcggagtgggagcgagcatcaaagatcccaaggacctgaaatttatttatgaaggaagctctgacttctcatgcctccccacattcggcgttatcatcggccagaaatcaatgatgggtggcggccttgccgaaatccccggcctctcaatcaacttcgcaaaggtgctgcatggcgagcaataccttgaattatataaaccccttcccagagcaggaaagctgaaatgtgaagccgtggtggcagacgtgctggacaaaggctctggcgttgtgatcataatggatgtgtactcctacagcgagaaggaattgatctgtcataaccagtttagcttgttcctagttggttctgggggcttcggcggcaagagaacctccgacaaagtgaaagtcgccgtggcaatccccaatcgcccacctgatgcagtgttaaccgacactacatcgctgaaccaggccgctttgtatagactgtccggcgactggaatcctctgcacattgatcccaactttgcgtctttggctggcttcgacaagcccatcctccacgggctgtgcaccttcgggttctctgccaggagagtgttacagcagttcgccgataatgacgtgtcgaggttcaaagccataaaggcccggttcgcaaagcctgtatatcctggtcagaccctacagacagagatgtggaaggagggcaatcggatccattttcagactaaagttcaggagaccggcgacatcgttataagcaatgcctacgttgatctggcaccaaccagcggaacctccgccaagacaccatctgagggtggaaaactccagtctacttttgtgtttgaggagataggcagacgcctgaaagatatcggcccagaggtagtgaaaaaggtgaacgccgtctttgaatggcacatcaccaaagggggaaacatcggagctaagtggactatcgatctgaagagtggcagcgggaaggtatatcaagggcctgccaagggtgccgcagataccactatcatcctctctgacgaagatttcatggaggtggtactcggcaagctggacccccagaaggcctttttcagcgggcgtctcaaggcacgaggtaacattatgctcagccagaagttgcagatgattctgaaggactacgccaagctgtag

SEQ ID NO: 111107 - DNA, 1800 bp, Artificial Sequence
  derived and/or modified sequence
atgaagaagcagaagtacggccggatcatcatgaccagcagcgccagcggaatctacggcaattttggccaggcaaattacagcgccgcgaaactcggtttattggggctggctaattctttagctatagaaggcagaaaaagcaatatccactgcaatactatcgcccccaacgccgggagccggatgactcagacagttatgccagaagacctggtggaggccttaaagcctgaatacgtcgcgccgcttgttctctggctctgtcacgagtcatgtgaggaaaacggaggtctctttgaggtcggagctggatggatcggaaaacttaggtgggaacgaacacttggagccatcgtacgccagaaaaaccatcctatgactccagaagccgtgaaggccaattggaaaaagatctgcgacttcgagaacgctagtaaaccacagtctatccaagagagcaccggttccatcatcgaagttctgagtaagatcgactctgagggtggagtttccgctaatcacacctcaagagctacttctactgcaacgagcggctttgccggagctattggtcagaaactgcctcccttttcatatgcttacaccgagttggaggccataatgtatgcactgggagtgggggcaagtattaaagatcctaaggaccttaaatttatttacgagggttcctcagactttagctgcttgcctacatttggggtgattattggacaaaaaagcatgatgggaggggggctggctgaaattccggggctgagcatcaatttcgctaaggtgttacatggagagcagtatctcgagctgtacaaaccgctcccaagggcaggtaaactgaagtgtgaggccgtggtggcagacgtgctcgacaaggggtctggcgttgttatcattatggacgtgtactcttacagcgagaaagagctgatctgccataaccaattttccctgttccttgtggggagtgggggctttggtggtaagcgcacttcagacaaggttaaggtcgctgtagccattcccaacaggcctcctgacgcagtgctcactgatacgaccagcctcaatcaggctgcactctatcggttgtctggtgattggaaccctctccacattgacccaaactttgcttcactcgccgggttcgacaagcccattctgcacggactgtgtacattcggcttctctgcccgaagggtgcttcagcagttcgccgataatgacgtctcccgttttaaggctataaaggcccggttcgcaaagccagtgtacccagggcaaacactccagactgaaatgtggaaagaggggaacagaattcacttccagactaaggtacaagagacaggcgacattgtcatcagcaacgcatacgtggatctggcacctacatccgggacaagcgcaaagacaccatctgagggcgggaagctccagtctaccttcgtcttcgaggagatcggacgacgtctgaaagacatcggccctgaggtggtcaagaaggtcaatgcggtgttcgagtggcacatcaccaagggcgggaatatcggagcaaagtggaccatcgacttgaagtcagggtccgggaaagtctaccaggggcctgctaagggtgccgctgacaccactattatcctgtcagatgaagattttatggaagtcgtgctgggtaaacttgatccccaaaaggcctttttctcaggaaggctgaaagctaggggtaacataatgctctcacaaaagctgcagatgatcctgaaagattatgcaaagctgtag

SEQ ID NO: 111108 - DNA, 2139 bp, Artificial Sequence
  derived and/or modified sequence
atggaaaagatcatttcccaatgcagattctttgtctcaatgaacgacttggggggtgactttaagggcgtgggtaagggaagccttgctgctgataaagtggtggaggagattcgcaggaggggaggaaaggctgttgcaaactacgacagtgtcgaggagggcgaaaaggtcgtcaagaccgcccttgacgcattcggacgcattgacgttgtggtcaataatgccggtatcctgcgtgatcggagctttgcacgtatcagcgacgaggactgggatatcatccatcgcgtccacctccgtgggtccttccaggtcacaagagcggcttgggagcacatgaagaagcaaaagtacggccgaattataatgacttcttcagcctctggcatctatggaaactttgggcaggctaattacagtgctgctaaactgggcctccttggcctagctaacagcctggcaattgaaggcaggaaaagcaacatccactgcaacaccatcgctcccaacgctggtagccgcatgacgcagacagtgatgcccgaagacttagttgaggccttaaaacccgagtatgtcgcccctctggtcctgtggctttgtcacgagtcatgcgaggaaaatggcggactgttcgaggtcggagcaggctggattgggaagctccggtgggagcgaacactcggggctattgtgagacagaagaatcatcctatgactcctgaggccgttaaggcgaattggaaaaagatctgtgacttcgaaaacgcatcaaagccccagagcattcaggagtcaactgggtcaatcatagaagtgttgtctaagatcgacagtgaaggaggcgtgtctgctaatcacacgtctcgcgctacctccacagccacgtcaggcttcgccggagccattgggcagaaactacccccttttagctatgcttacacagagttagaggcgattatgtatgcacttggggtgggtgcttcaattaaggatcctaaggacctcaagttcatttatgagggttctagcgactttagctgcttgccaacttttggcgtcattatcggacagaagtctatgatggggggtggcttagcggaaatcccaggcctgtctatcaatttcgctaaggtgctccacggcgagcagtatcttgagctctacaaaccacttcccagagccggaaaactgaaatgtgaggccgtagtggcagatgtacttgataagggatctggagtcgtgatcatcatggatgtttactcctattcagagaaggagctgatttgccacaaccagttctccctattcctggtgggctccggaggattcggtggcaagagaaccagcgataaagtgaaggtggctgtcgccatacctaatcgcccacctgatgccgtcctgacagacacgacctcactcaatcaagcggctctgtataggctgagtggcgattggaaccccctgcatattgacccaaattttgcctcactcgcgggatttgataaaccgattctccacggcctgtgcacctttggatttagcgcacgccgagtcttgcaacagtttgctgacaatgacgtttctcgatttaaggctatcaaagctcggttcgccaaacccgtgtatcccggacaaactctgcagactgaaatgtggaaggagggaaatcgcatccactttcaaactaaggttcaggagactggcgatatagtcataagcaacgcttatgtggatcttgctcccacatccgggacctcggcgaagactcccagcgagggaggaaaattgcagtccaccttcgtctttgaagaaataggccgaagactgaaggacatcgggccagaggtcgtgaagaaggtcaatgccgtattcgagtggcacatcaccaagggcggtaacatcggtgctaagtggacgatcgacctcaaatcggggtccggaaaggtataccagggcccagctaagggggctgctgataccactatcatcttatcagatgaggacttcatggaagtggtgctaggaaagctcgaccctcagaaagcctttttttccggcagactaaaggcaagaggtaatatcatgctcagccagaaactgcagatgatcttaaaggattacgccaagctgtag

SEQ ID NO: 111109 - DNA, 1800 bp, Artificial Sequence
  derived and/or modified sequence
atgaaaaaacagaagtatggcaggatcatcatgacgtctagcgcctccggcatctacggtaattttggacaagctaactatagcgccgcaaaactgggcctgcttggtttagcgaactctctcgcaatagaaggacgcaagagcaatatccattgtaacacaattgccccaaacgcgggatcacgcatgacccaaaccgtaatgccggaagatctggtggaagcattgaaacccgagtacgttgctcccctggtgttgtggctgtgtcatgagagttgcgaagagaacggcggattgtttgaagttggggcaggatggataggcaaattacgttgggaaaggacgctaggcgcaatcgtaaggcagaaaaatcatcctatgacacctgaggccgtgaaggccaactggaaaaaaatttgtgacttcgagaatgcttcaaaacctcagagcatccaggagtcaacagggagcatcatcgaggtgttgtctaaaatagattcagagggaggggtgagtgccaatcatacgagtagagcaacttccactgctacttctggttttgcaggggcaatcgggcagaagctcccaccttttagttatgcctatacagaattggaggcaattatgtacgcactgggtgtcggcgcttccattaaagacccgaaagacttgaagttcatctatgagggcagctctgatttctcttgtcttcccacatttggtgtgattatcggccaaaaatctatgatgggcggtgggctggccgagatccctggccttagtatcaattttgcgaaggtgctgcacggggaacaataccttgagctttacaaaccactccctcgcgctggaaaattgaagtgcgaagccgtggttgcagacgtgttggacaaaggctcgggagtggtcatcataatggatgtgtactcatactctgaaaaagagctcatttgccacaaccagtttagcttatttctagttggtagtgggggatttgggggaaagagaacctctgataaggtaaaagttgctgtcgctattcccaaccggccacccgacgccgtgttgaccgacactaccagtttgaatcaagctgcactataccggctaagcggagactggaatcctttgcacatcgaccctaattttgccagcctggcaggttttgacaaacctatactgcatggcctttgcacctttgggttttcagcacggagagtcctgcagcagttcgccgataatgatgtgagtagattcaaggctatcaaagcacgtttcgccaagcctgtctatcctggtcaaaccctccagaccgagatgtggaaggaaggaaatcggatccacttccaaacgaaagtccaggagactggcgacatcgttatttccaatgcttacgtggatctagccccaactagcggcacgtctgccaaaacaccttctgaaggaggtaagttgcagtctacattcgtatttgaggaaatcgggaggcgccttaaggacatcggacccgaggtcgtaaagaaagtcaacgctgtgttcgaatggcacattacaaagggcggtaatatcggagcaaaatggaccattgacctgaagagtggctccggcaaagtgtaccaaggcccagccaaaggagcagccgataccacaataatcctgagcgacgaagactttatggaggttgttctgggcaagcttgatccacagaaggcttttttttctgggaggctcaaagcccgaggcaacatcatgctctcacaaaaactgcaaatgatccttaaagattacgctaaactctag

SEQ ID NO: 111110 - DNA, 2139 bp, Artificial Sequence
  derived and/or modified sequence
atggagaagatcatcagccagtgcagattcttcgtgagcatgaacgacctgggcggcgacttcaagggcgtgggcaagggcagcctggccgccgacaaggtggtggaggagatcagaagaagaggcggcaaggccgtggccaactacgacagcgtggaggagggcgagaaggtggtgaagaccgccctggacgccttcggcagaatcgacgtggtggtgaacaacgccggcatcctgagagacagaagcttcgccagaatcagcgacgaggactgggacatcatccacagagtgcacctgagaggcagcttccaggtgaccagagccgcctgggagcacatgaagaagcagaagtacggcagaatcatcatgaccagcagcgccagcggcatctacggcaacttcggccaggccaactacagcgccgccaagctgggcctgctgggcctggccaacagcctggccatcgagggcagaaagagcaacatccactgcaacaccatcgcccccaacgccggcagcagaatgacccagaccgtgatgcccgaggacctggtggaggccctgaagcccgagtacgtggcccccctggtgctgtggctgtgccacgagagctgcgaggagaacggcggcctgttcgaggtgggcgccggctggatcggcaagctgagatgggagagaaccctgggcgccatcgtgagacagaagaaccaccccatgacccccgaggccgtgaaggccaactggaagaagatctgcgacttcgagaacgccagcaagccccagagcatccaggagagcaccggcagcatcatcgaggtgctgagcaagatcgacagcgagggcggcgtgagcgccaaccacaccagcagagccaccagcaccgccaccagcggcttcgccggcgccatcggccagaagctgccccccttcagctacgcctacaccgagctggaggccatcatgtacgccctgggcgtgggcgccagcatcaaggaccccaaggacctgaagttcatctacgagggcagcagcgacttcagctgcctgcccaccttcggcgtgatcatcggccagaagagcatgatgggcggcggcctggccgagatccccggcctgagcatcaacttcgccaaggtgctgcacggcgagcagtacctggagctgtacaagcccctgcccagagccggcaagctgaagtgcgaggccgtggtggccgacgtgctggacaagggcagcggcgtggtgatcatcatggacgtgtacagctacagcgagaaggagctgatctgccacaaccagttcagcctgttcctggtgggcagcggcggcttcggcggcaagagaaccagcgacaaggtgaaggtggccgtggccatccccaacagaccccccgacgccgtgctgaccgacaccaccagcctgaaccaggccgccctgtacagactgagcggcgactggaaccccctgcacatcgaccccaacttcgccagcctggccggcttcgacaagcccatcctgcacggcctgtgcaccttcggcttcagcgccagaagagtgctgcagcagttcgccgacaacgacgtgagcagattcaaggccatcaaggccagattcgccaagcccgtgtaccccggccagaccctgcagaccgagatgtggaaggagggcaacagaatccacttccagaccaaggtgcaggagaccggcgacatcgtgatcagcaacgcctacgtggacctggcccccaccagcggcaccagcgccaagacccccagcgagggcggcaagctgcagagcaccttcgtgttcgaggagatcggcagaagactgaaggacatcggccccgaggtggtgaagaaggtgaacgccgtgttcgagtggcacatcaccaagggcggcaacatcggcgccaagtggaccatcgacctgaagagcggcagcggcaaggtgtaccagggccccgccaagggcgccgccgacaccaccatcatcctgagcgacgaggacttcatggaggtggtgctgggcaagctggacccccagaaggccttcttcagcggcagactgaaggccagaggcaacatcatgctgagccagaagctgcagatgatcctgaaggactacgccaagctgtag

SEQ ID NO: 111111 - DNA, 1800 bp, Artificial Sequence
  derived and/or modified sequence
atgaagaagcagaagtacggcagaatcatcatgaccagcagcgccagcggcatctacggcaacttcggccaggccaactacagcgccgccaagctgggcctgctgggcctggccaacagcctggccatcgagggcagaaagagcaacatccactgcaacaccatcgcccccaacgccggcagcagaatgacccagaccgtgatgcccgaggacctggtggaggccctgaagcccgagtacgtggcccccctggtgctgtggctgtgccacgagagctgcgaggagaacggcggcctgttcgaggtgggcgccggctggatcggcaagctgagatgggagagaaccctgggcgccatcgtgagacagaagaaccaccccatgacccccgaggccgtgaaggccaactggaagaagatctgcgacttcgagaacgccagcaagccccagagcatccaggagagcaccggcagcatcatcgaggtgctgagcaagatcgacagcgagggcggcgtgagcgccaaccacaccagcagagccaccagcaccgccaccagcggcttcgccggcgccatcggccagaagctgccccccttcagctacgcctacaccgagctggaggccatcatgtacgccctgggcgtgggcgccagcatcaaggaccccaaggacctgaagttcatctacgagggcagcagcgacttcagctgcctgcccaccttcggcgtgatcatcggccagaagagcatgatgggcggcggcctggccgagatccccggcctgagcatcaacttcgccaaggtgctgcacggcgagcagtacctggagctgtacaagcccctgcccagagccggcaagctgaagtgcgaggccgtggtggccgacgtgctggacaagggcagcggcgtggtgatcatcatggacgtgtacagctacagcgagaaggagctgatctgccacaaccagttcagcctgttcctggtgggcagcggcggcttcggcggcaagagaaccagcgacaaggtgaaggtggccgtggccatccccaacagaccccccgacgccgtgctgaccgacaccaccagcctgaaccaggccgccctgtacagactgagcggcgactggaaccccctgcacatcgaccccaacttcgccagcctggccggcttcgacaagcccatcctgcacggcctgtgcaccttcggcttcagcgccagaagagtgctgcagcagttcgccgacaacgacgtgagcagattcaaggccatcaaggccagattcgccaagcccgtgtaccccggccagaccctgcagaccgagatgtggaaggagggcaacagaatccacttccagaccaaggtgcaggagaccggcgacatcgtgatcagcaacgcctacgtggacctggcccccaccagcggcaccagcgccaagacccccagcgagggcggcaagctgcagagcaccttcgtgttcgaggagatcggcagaagactgaaggacatcggccccgaggtggtgaagaaggtgaacgccgtgttcgagtggcacatcaccaagggcggcaacatcggcgccaagtggaccatcgacctgaagagcggcagcggcaaggtgtaccagggccccgccaagggcgccgccgacaccaccatcatcctgagcgacgaggacttcatggaggtggtgctgggcaagctggacccccagaaggccttcttcagcggcagactgaaggccagaggcaacatcatgctgagccagaagctgcagatgatcctgaaggactacgccaagctgtag

SEQ ID NO: 111112 - DNA, 507 bp, Artificial Sequence
  derived and/or modified sequence
atgttccccctgatcagcagccaccacctgtggtggggcggcctgagaagaaccgtgtgcctgaacctgcccgtgctgaccctgcagcacttccagcacatgcacatcaaggtgggcgacagagccgagctgagaagagccttcacccagaccgacgtggccaccttcagcgagctgaccggcgacgtgaaccccctgcacctgaacgaggacttcgccaagcacaccaagttcggcaacaccatcgtgcacggcgtgctgatcaacggcctgatcagcgccctgctgggcaccaagatgcccggccccggctgcgtgttcctgagccaggagatcagcttccccgcccccctgtacatcggcgaggtggtgctggccagcgccgaggtgaagaagctgaagagattcatcgccatcatcgccgtgagctgcagcgtgatcgagagcaagaagaccgtgatggagggctgggtgaaggtgatggtgcccgaggccagcaagagctag

SEQ ID NO: 111113 - DNA, 507 bp, Artificial Sequence
  derived and/or modified sequence
atgtttcccttaatttcaagccaccacttatggtggggtggattgcgcagaaccgtgtgtctgaatcttccagttctcacattacaacacttccagcacatgcacatcaaagtcggagacagggccgagctgcggagagcatttactcaaaccgacgtcgccaccttttctgaactgactggcgatgttaatcctctgcatttgaatgaggacttcgcaaaacacactaagtttggaaacactattgttcatggagtgcttatcaatgggctgattagtgccttactgggaaccaaaatgcccggcccaggttgcgtcttcctgtctcaggagatttcatttccagcaccgctgtatattggtgaggtggtgctcgccagtgccgaggtaaaaaagttaaagcgttttatagccataatcgctgtctcatgcagcgtaatcgagagtaaaaaaacggtcatggagggatgggtaaaagttatggtgcccgaggcctcaaagagctag

SEQ ID NO: 111114 - DNA, 507 bp, Artificial Sequence
  derived and/or modified sequence
atgttccccctcatcagcagccaccacctgtggtggggcggcctgcggaggacagtgtgcctgaacctgcctgtgctgaccctgcagcacttccagcacatgcacatcaaggtgggggacagagctgagctgcggcgggccttcacccagacagatgtggccaccttcagcgagctgactggagatgtgaaccccctgcacctgaatgaagattttgccaagcacaccaagtttggaaacaccatcgtgcacggcgtgctgatcaatggcctcatcagcgccctgctgggcaccaagatgcctggccctggctgtgtgttcctgagccaggagatctccttccctgcccccctgtacatcggggaggtggtgctggccagcgctgaggtgaagaagctgaagcgcttcatcgccatcatcgctgtgtcctgcagcgtgattgagagcaagaagacagtgatggagggctgggtgaaggtgatggtgcctgaggccagcaagagctag

SEQ ID NO: 111115 - DNA, 507 bp, Artificial Sequence
  derived and/or modified sequence
atgttccccctgatcagcagccaccacctgtggtggggcggcctgagacgaacagtttgccttaacttgcccgtcctcaccctccaacattttcagcacatgcacatcaaagtcggcgatagggccgagctgagaagagcattcacgcagactgacgtggccaccttttcggaactcaccggagacgtgaatccgctgcatctcaacgaagacttcgccaagcatacaaaattcgggaatacgatagtccatggggtgctcattaatggtctcatctctgctctcctgggcactaagatgccaggccctggctgcgtatttttgtcacaggaaatctcctttccagcgccactgtacatcggggaggtggtcctagccagtgctgaggtgaagaagctcaaacgatttatcgctatcatcgcggtgtcttgcagcgtgatagagagcaagaagaccgttatggaaggttgggtgaaggtgatggtgcccgaagcttccaagtcctag

SEQ ID NO: 111116 - DNA, 507 bp, Artificial Sequence
  derived and/or modified sequence
atgttcccactgataagcagccatcacttatggtggggaggcctccgcagaactgtctgcctgaacctgccggtgctgacactgcagcattttcaacatatgcatatcaaggtcggcgacagagcggagctgcgccgagcattcactcagaccgacgtagccacattctcggagctcactggggatgtcaaccctctgcatttgaatgaagacttcgctaagcatacaaagttcgggaacaccattgttcatggagtgctgatcaacggattaatcagtgcactgcttggtacaaaaatgcctggacctggttgcgtgtttctttctcaggagattagttttcccgctccactctatatcggagaggtggttcttgctagcgcagaggtgaaaaaacttaagcgtttcatcgcaataattgccgtgagttgcagtgttatcgagagcaaaaagaccgttatggaaggctgggtgaaggtgatggtcccagaagcttcaaagtcatag

SEQ ID NO: 111117 - protein, 515 aa, Artificial Sequence
  derived and/or modified sequence
MESLGLHTVTLSDGTTAYVQQAVKGEKLLEGQVIQLEDGTTAYIHQVTVQKEALSFEDGQPVQLEDGSMAYIHRTPREGYDPSTLEAVQLEDGSTAYIHHPVAVPSESTILAVQTEVGLEDLAAEDDEGFSADAVVALEQYASKVLHDSQIPRNGKGQQVGDRAFRCGYKGCGRLYTTAHHLKVHERAHTGDRPYRCDFPSCGKAFATGYGLKSHVRTHTGEKPYKCPEELCSKAFKTSGDLQKHVRTHTGERPFQCPFEGCGRSFTTSNIRKVHVRTHTGERPYTCPEPHCGRGFTSATNYKNHVRIHTGEKPYVCTVPGCGKRFTEYSSLYKHHVVHTHCKPYTCSTCGKTYRQTSTLAMHKRSAHGELEATEESEQALYEQQQLEAASAAEESPPPKRPRIAYLSEVKEERDDIPAQVAMVTEEDGAPQVALITQDGAQQVTIITSGAVVAEDSSVASLRHQQVALLATANGTHIAVQLEEQQTLEEAINVATAAMQQGAVTLETTVSESGC

SEQ ID NO: 111118 - DNA, 1548 bp, Artificial Sequence
  derived and/or modified sequence
atggagagcctgggcctgcacaccgtgaccctgagcgacggcaccaccgcctacgtgcagcaggccgtgaagggcgagaagctgctggagggccaggtgatccagctggaggacggcaccaccgcctacatccaccaggtgaccgtgcagaaggaggccctgagcttcgaggacggccagcccgtgcagctggaggacggcagcatggcctacatccacagaacccccagagagggctacgaccccagcaccctggaggccgtgcagctggaggacggcagcaccgcctacatccaccaccccgtggccgtgcccagcgagagcaccatcctggccgtgcagaccgaggtgggcctggaggacctggccgccgaggacgacgagggcttcagcgccgacgccgtggtggccctggagcagtacgccagcaaggtgctgcacgacagccagatccccagaaacggcaagggccagcaggtgggcgacagagccttcagatgcggctacaagggctgcggcagactgtacaccaccgcccaccacctgaaggtgcacgagagagcccacaccggcgacagaccctacagatgcgacttccccagctgcggcaaggccttcgccaccggctacggcctgaagagccacgtgagaacccacaccggcgagaagccctacaagtgccccgaggagctgtgcagcaaggccttcaagaccagcggcgacctgcagaagcacgtgagaacccacaccggcgagagacccttccagtgccccttcgagggctgcggcagaagcttcaccaccagcaacatcagaaaggtgcacgtgagaacccacaccggcgagagaccctacacctgccccgagccccactgcggcagaggcttcaccagcgccaccaactacaagaaccacgtgagaatccacaccggcgagaagccctacgtgtgcaccgtgcccggctgcggcaagagattcaccgagtacagcagcctgtacaagcaccacgtggtgcacacccactgcaagccctacacctgcagcacctgcggcaagacctacagacagaccagcaccctggccatgcacaagagaagcgcccacggcgagctggaggccaccgaggagagcgagcaggccctgtacgagcagcagcagctggaggccgccagcgccgccgaggagagccccccccccaagagacccagaatcgcctacctgagcgaggtgaaggaggagagagacgacatccccgcccaggtggccatggtgaccgaggaggacggcgccccccaggtggccctgatcacccaggacggcgcccagcaggtgaccatcatcaccagcggcgccgtggtggccgaggacagcagcgtggccagcctgagacaccagcaggtggccctgctggccaccgccaacggcacccacatcgccgtgcagctggaggagcagcagaccctggaggaggccatcaacgtggccaccgccgccatgcagcagggcgccgtgaccctggagaccaccgtgagcgagagcggctgctag

SEQ ID NO: 111119 - DNA, 1287 bp, Artificial Sequence
  derived and/or modified sequence
atggagagcctgggcctgcacaccgtgaccctgagcgacggcaccaccgcctacgtgcagcaggccgtgaagggcgagaagctgctggagggccaggtgatccagctggaggacggcaccaccgcctacatccaccaggtgaccgtgcagaaggaggccctgagcttcgaggacggccagcccgtgcagctggaggacggcagcatggcctacatccacagaacccccagagagggctacgaccccagcaccctggaggccgtgcagctggaggacggcagcaccgcctacatccaccaccccgtggccgtgcccagcgagagcaccatcctggccgtgcagaccgaggtgggcctggaggacctggccgccgaggacgacgagggcttcagcgccgacgccgtggtggccctggagcagtacgccagcaaggtgctgcacgacagccagatccccagaaacggcaagggccagcaggtgggcgacagagccttcagatgcggctacaagggctgcggcagactgtacaccaccgcccaccacctgaaggtgcacgagagagcccacaccggcgacagaccctacagatgcgacttccccagctgcggcaaggccttcgccaccggctacggcctgaagagccacgtgagaacccacaccggcgagaagccctacaagtgccccgaggagctgtgcagcaaggccttcaagaccagcggcgacctgcagaagcacgtgagaacccacaccggcgagagacccttccagtgccccttcgagggctgcggcagaagcttcaccaccagcaacatcagaaaggtgcacgtgagaacccacaccggcgagagaccctacacctgccccgagccccactgcggcagaggcttcaccagcgccaccaactacaagaaccacgtgagaatccacaccggcgagaagccctacgtgtgcaccgtgcccggctgcggcaagagattcaccgagtacagcagcctgtacaagcaccacgtggtgcacacccactgcaagccctacacctgcagcacctgcggcaagacctacagacagaccagcaccctggccatgcacaagagaagcggccactgcggccacgccgccagaggctgcgaccccggcgacaacagcgtgggcgagtggctgctgagccccagaggcctgggccccaccccctgctggagaaagtgccacctgcacggccacagctgcccccagggccccagactgtggctgacccacagaagatggccccacagaagcctgggctag

SEQ ID NO: 111120 - DNA, 1209 bp, Artificial Sequence
  derived and/or modified sequence
atggagagcctgggcctgcacaccgtgaccctgagcgacggcaccaccgcctacgtgcagcaggccgtgaagggcgagaagctgctggagggccaggtgatccagctggaggacggcaccaccgcctacatccaccaggtgaccgtgcagaaggaggccctgagcttcgaggacggccagcccgtgcagctggaggacggcagcatggcctacatccacagaacccccagagagggctacgaccccagcaccctggaggccgtgcagctggaggacggcagcaccgcctacatccaccaccccgtggccgtgcccagcgagagcaccatcctggccgtgcagaccgaggtgggcctggaggacctggccgccgaggacgacgagggcttcagcgccgacgccgtggtggccctggagcagtacgccagcaaggtgctgcacgacagccagatccccagaaacggcaagggccagcaggtgggcgacagagccttcagatgcggctacaagggctgcggcagactgtacaccaccgcccaccacctgaaggtgcacgagagagcccacaccggcgacagaccctacagatgcgacttccccagctgcggcaaggccttcgccaccggctacggcctgaagagccacgtgagaacccacaccggcgagaagccctacaagtgccccgaggagctgtgcagcaaggccttcaagaccagcggcgacctgcagaagcacgtgagaacccacaccggcgagagacccttccagtgccccttcgagggctgcggcagaagcttcaccaccagcaacatcagaaaggtgcacgtgagaacccacaccggcgagagaccctacacctgccccgagccccactgcggcagaggcttcaccagcgccaccaactacaagaaccacgtgagaatccacaccggcgagaagccctacgtgtgcaccgtgcccggctgcggcaagagattcaccgagtacagcagcctgtacaagcaccacgtggtgcacacccaccactgcggccacgccgccagaggctgcgaccccggcgacaacagcgtgggcgagtggctgctgagccccagaggcctgggccccaccccctgctggagaaagtgccacctgcacggccacagctgcccccagggccccagactgtggctgacccacagaagatggccccacagaagcctgggctag

SEQ ID NO: 111121 - DNA, 1023 bp, Artificial Sequence
  derived and/or modified sequence
atggagagcctgggcctgcacaccgtgaccctgagcgacggcaccaccgcctacgtgcagcaggccgtgaagggcgagaagctgctggagggccaggtgatccagctggaggacggcaccaccgcctacatccaccaggtgaccgtgcagaaggaggccctgagcttcgaggacggccagcccgtgcagctggaggacggcagcatggcctacatccacagaacccccagagagggctacgaccccagcaccctggaggccgtgcagctggaggacggcagcaccgcctacatccaccaccccgtggccgtgcccagcgagagcaccatcctggccgtgcagaccgaggtgggcctggaggacctggccgccgaggacgacgagggcttcagcgccgacgccgtggtggccctggagcagtacgccagcaaggtgctgcacgacagccagatccccagaaacggcaagggccagcaggtgggcgacagagccttcagatgcggctacaagggctgcggcagactgtacaccaccgcccaccacctgaaggtgcacgagagagcccacaccggcgacagaccctacagatgcgacttccccagctgcggcaaggccttcgccaccggctacggcctgaagagccacgtgagaacccacaccggcgagaagccctacaagtgccccgaggagctgtgcagcaaggccttcaagaccagcggcgacctgcagaagcacgtgagaacccacaccggcgagagacccttccagtgccccttcgagggctgcggcagaagcttcaccaccagcaacatcagaaaggtgcacgtgagaacccacaccggcgagagaccctacacctgccccgagccccactgcggcagaggcttcaccagcgccaccaactacaagaaccacgtgagaatccacaccggcgagaagccctacgtgtgcaccgtgcccggctgcggcaagagattcaccgagtacagcagcctgtacaagcaccacgtggtgcacacctag

SEQ ID NO: 111122 - DNA, 1548 bp, Artificial Sequence
  derived and/or modified sequence
atggaaagcctgggcctgcatactgttacattgtctgacggaacaaccgcatacgttcagcaggccgttaagggcgagaaactgctggaaggccaagttatccagctagaagatgggaccacagcttatattcatcaagtaacagtgcagaaggaggccctttccttcgaggacgggcaacccgtccaattggaggacggttccatggcctacatccatcggaccccgagggagggttatgatccaagtacacttgaggccgtccagctcgaggacggaagcacggcctatatccatcatcccgtggccgtgcctagcgagagcacaattctcgccgtccaaactgaagtgggactggaagaccttgctgccgaagatgatgaagggttcagcgccgacgccgtggtggctcttgagcagtatgcttccaaggtgctgcacgattctcagattcctagaaatggtaaaggtcagcaggtgggagaccgagcctttcgatgtggctacaaagggtgtggccgattgtacaccacggcgcatcatttaaaggtccatgagagagcacacaccggagaccgaccgtaccggtgtgatttcccgagttgcggtaaggcattcgcgacagggtacggcctgaaaagtcatgtccgtacgcacaccggagagaagccttacaaatgcccagaagaattgtgttctaaggccttcaagacatcaggggacttgcaaaagcatgtgagaactcataccggcgagcgccctttccagtgcccgtttgagggctgtgggcggtccttcaccacctcgaacattcgcaaggttcacgtcagaactcacacgggagagaggccatacacctgtccagagcctcattgcgggcgagggttcacttctgctaccaactataaaaatcacgtgcggatccacacgggtgagaagccatatgtgtgcacagtgcctggctgcgggaagcggttcacagagtacagctccctttataaacaccatgtggtacacacacactgcaaaccatacacttgttccacttgcgggaagacataccggcaaacctctacactggccatgcataagcggtccgcccacggcgaactagaggccactgaagaaagcgagcaagcgctatatgaacagcagcagcttgaggctgcaagcgctgctgaggagagtccaccgccaaagagaccacggattgcttatttgtccgaggtgaaggaggagagggacgatatccccgcccaggttgccatggtgaccgaggaggacggcgcaccacaggtggctctgatcactcaagacggagcccagcaggtgacgatcataacctccggggctgtagttgcggaggacagctcggtggccagcctgagacatcagcaggttgcccttttggcgaccgcgaacggaactcacattgccgtgcagctggaggaacagcaaacactcgaagaggccattaatgtagcgacggctgccatgcagcaaggtgctgttaccctggaaacaacggtgtctgagagcggttgttag

SEQ ID NO: 111123 - DNA, 1287 bp, Artificial Sequence
  derived and/or modified sequence
atggagtccctcggcctccatactgtgaccctgagcgacggaactacagcctacgtgcagcaggcggtgaagggcgaaaagctcctcgagggtcaggtgattcagctggaggacggaaccaccgcctatatccaccaagtgaccgttcagaaggaagcacttagcttcgaagacggtcagcccgtgcagctcgaggatggctccatggcttatatccaccgcactccaagggagggctatgacccatccactctggaggccgtccagctcgaggacggttcgactgcctacatccaccacccagttgctgttccttcagagtccacaatattagctgtgcagacggaagtggggcttgaggacttggccgctgaagacgacgaaggcttttcagccgatgcagtggtcgccctggaacaatacgcgagtaaagtgctacacgactcccagattccgagaaacggaaagggccaacaggttggtgatagagctttccggtgcggttataaagggtgtggccgactgtacacgacggcacaccatttgaaagtgcacgaaagggcgcataccggggatagaccataccggtgtgatttccccagctgcggtaaggcctttgccaccggatacgggcttaaatctcatgttaggacacacacaggggaaaagccctacaaatgtcctgaggagctttgctccaaagccttcaagacatccggtgacctacaaaaacacgtcagaactcacactggcgagaggccattccagtgcccatttgagggatgtgggcgttcctttacaaccagtaatattagaaaagtgcatgtgcggacccatactggggaaagaccctacacttgtcccgagcctcactgtggacgcgggttcaccagcgcaacaaattataaaaaccacgtgcgtatccacaccggggagaaaccttacgtgtgcactgtgcctggctgcggcaagaggtttaccgagtactcttcactgtacaagcatcacgttgtgcacacacattgcaagccttacacttgtagcacctgtggtaaaacatatagacaaacttcgactctcgcgatgcacaagcgaagtggtcactgtggtcacgcagccagagggtgcgatccgggggacaatagtgtaggcgagtggctgcttagccctcgagggctcggacctacgccctgctggagaaagtgccatctgcacggccacagttgtccccaaggcccgcgcctgtggttaactcacagaagatggccgcatcgctcacttggatag

SEQ ID NO: 111124 - DNA, 1209 bp, Artificial Sequence
  derived and/or modified sequence
atggaatctctcgggctccataccgttaccctgagcgacgggaccacagcatacgtgcagcaggccgttaagggagaaaagctgctggaggggcaagttattcagctggaagatggtaccacagcatatatccatcaggttaccgtgcaaaaggaggccctctccttcgaagacggccagcccgtgcagctggaggatggcagtatggcttatatccatcggacacctagggaaggatatgaccctagcacacttgaagcagtccagctggaagacggcagtacagcctacatccatcaccccgtcgcagtgccttctgagtctactattctcgctgttcagaccgaggtaggtctagaagatcttgccgcagaagatgacgaaggtttctctgctgacgcagtggtcgccttggaacagtatgcttccaaagtgctccacgactcccagatccccaggaatgggaaaggacagcaggtgggggatcgtgcgtttagatgcgggtacaaagggtgcggacggctgtatactaccgctcaccatctgaaagtacatgaacgcgctcacaccggggataggccataccggtgcgattttccttcctgtgggaaggcctttgccaccggctacgggctgaagagccacgtaagaacccacacaggggaaaagccctataaatgtccggaggaactctgttctaaggcattcaaaactagcggggatctgcagaaacacgtgcgcactcataccggcgagcggccctttcagtgcccattcgagggctgcggtaggtctttcacgacctccaacattcgaaaagtccacgtgcgaacacataccggtgaacgaccttatacttgccccgaaccccattgtggtagaggttttactagtgccaccaattacaagaaccatgtgcgtatacacactggagagaagccatatgtgtgcaccgtccctggatgtggtaagaggttcacagaatactcctccctctataagcatcatgtggttcacacccatcactgtgggcacgcagcaaggggctgcgaccctggcgataattcagttggcgaatggctcctctccccaaggggcttgggtccaactccatgctggcgaaagtgccacttacacgggcacagctgcccgcaaggcccacggctctggctgacacatcggcgatggcctcacaggtctcttggatag

SEQ ID NO: 111125 - DNA, 1023 bp, Artificial Sequence
  derived and/or modified sequence
atggagtccctcggtctgcacacagtcaccctcagtgatgggactactgcatacgtccaacaggctgtcaagggggagaaactcctggaaggccaagtgattcaactggaggacggaaccacggcctatatccatcaggtgacggtgcaaaaggaagctctgtctttcgaagacgggcaacctgtgcagctggaggatgggagcatggcttatatacataggacaccccgggaagggtacgacccttccactcttgaggcggtacaactggaggacggtagtactgcctacattcaccatccggtcgctgtgcccagcgagagcacaattctggccgtccagacggaagtcggcctggaggacctcgccgctgaggacgacgaggggttcagcgctgacgcagtggtggccctcgagcagtatgcatctaaggtactacatgacagccagatccctagaaacggtaagggacaacaggtgggcgaccgcgccttccggtgcggatacaaaggttgtggaaggctgtataccactgcgcaccatttgaaggtacatgaaagggcccataccggcgatcgcccttaccgctgtgacttccccagctgcggtaaagccttcgcgaccggatacggcttgaagagccacgtgcggacccataccggcgaaaagccttataagtgcccagaggagctgtgctcaaaggcatttaagacctcgggagaccttcagaagcatgttcggactcacacgggagagaggccttttcagtgtccctttgagggctgtgggcgatcctttaccacctccaacattagaaaggtgcacgttcggactcacacaggtgaacgcccttatacgtgtccagagccacactgcggtcgcggattcacaagtgccactaactacaaaaaccatgttcgcatccatactggggaaaagccctacgtgtgtaccgtgcccggctgcggaaagagatttaccgagtattcaagcctttacaagcatcacgtggtccatacctag

SEQ ID NO: 111126 - DNA, 1548 bp, Artificial Sequence
  derived and/or modified sequence
atggagagcctgggcctgcacacagtgaccctgagtgatggcaccacagcctacgtgcagcaggccgtgaagggggagaagctgctggagggccaggtgatccagctggaggatggcaccacagcctacatccaccaggtgacagtgcagaaggaggccctgagctttgaagatggccagcctgtgcagctggaggatggctccatggcctacatccacaggaccccccgggagggctatgaccccagcaccctggaggccgtgcagctggaggatggcagcacagcctacatccaccaccctgtggccgtgcccagcgagagcaccatcctggccgtgcagacagaggtgggcctggaggacctggccgcagaagatgatgagggcttcagcgcagatgctgtggtggccctggagcagtatgccagcaaggtgctgcatgacagccagatccccagaaatggcaagggccagcaggtgggggaccgggccttccgctgtggctacaagggctgcggccgcctgtacaccacagcccaccacctgaaggtgcatgagcgggcccacactggagaccggccctaccgctgtgacttccccagctgtgggaaggcctttgccaccggctacggcctgaagagccacgtgaggacccacactggagagaagccctacaagtgcccagaggagctgtgcagcaaggccttcaagaccagcggggacctgcagaagcacgtgaggacccacactggagagcggcccttccagtgcccctttgagggctgcggccgctccttcaccaccagcaacatcaggaaggtgcacgtgaggacccacactggagagcggccctacacctgcccagagccccactgcggccggggcttcaccagcgccaccaactacaagaaccacgtgcgcatccacactggagagaagccctacgtgtgcaccgtgcccggctgtgggaagcgcttcacagagtacagcagcctgtacaagcaccacgtggtgcacacccactgcaagccctacacctgcagcacctgtgggaagacctaccggcagaccagcaccctggccatgcacaagaggtctgcccacggggagctggaggccacagaggagagcgagcaggccctgtatgagcagcagcagctggaggccgccagcgctgctgaggagagccccccacccaagaggccccgcatcgcctacctgtctgaggtgaaggaggagagagatgacatcccagcccaggtggccatggtgacagaagaagatggagccccccaggtggccctgatcacccaggatggagcccagcaggtgaccatcatcaccagcggggctgtggtggccgaggacagctctgtggccagcctgcggcaccagcaggtggccctgctggccacagccaacggcacccacatcgctgtgcagctggaggagcagcagaccctggaggaggccatcaacgtggccacagctgccatgcagcagggcgctgtgaccctggagaccaccgtgtctgagagcggctgctag

SEQ ID NO: 111127 - DNA, 1287 bp, Artificial Sequence
  derived and/or modified sequence
atggagagcctgggcctgcacacagtgaccctgagtgatggcaccacagcctacgtgcagcaggccgtgaagggggagaagctgctggagggccaggtgatccagctggaggatggcaccacagcctacatccaccaggtgacagtgcagaaggaggccctgagctttgaagatggccagcctgtgcagctggaggatggctccatggcctacatccacaggaccccccgggagggctatgaccccagcaccctggaggccgtgcagctggaggatggcagcacagcctacatccaccaccctgtggccgtgcccagcgagagcaccatcctggccgtgcagacagaggtgggcctggaggacctggccgcagaagatgatgagggcttcagcgcagatgctgtggtggccctggagcagtatgccagcaaggtgctgcatgacagccagatccccagaaatggcaagggccagcaggtgggggaccgggccttccgctgtggctacaagggctgcggccgcctgtacaccacagcccaccacctgaaggtgcatgagcgggcccacactggagaccggccctaccgctgtgacttccccagctgtgggaaggcctttgccaccggctacggcctgaagagccacgtgaggacccacactggagagaagccctacaagtgcccagaggagctgtgcagcaaggccttcaagaccagcggggacctgcagaagcacgtgaggacccacactggagagcggcccttccagtgcccctttgagggctgcggccgctccttcaccaccagcaacatcaggaaggtgcacgtgaggacccacactggagagcggccctacacctgcccagagccccactgcggccggggcttcaccagcgccaccaactacaagaaccacgtgcgcatccacactggagagaagccctacgtgtgcaccgtgcccggctgtgggaagcgcttcacagagtacagcagcctgtacaagcaccacgtggtgcacacccactgcaagccctacacctgcagcacctgtgggaagacctaccggcagaccagcaccctggccatgcacaagaggagcggccactgcggccacgccgcccggggctgtgaccccggggacaacagcgtgggggagtggctgctgagcccccggggcctgggccccaccccctgctggaggaagtgccacctgcacggccacagctgcccccagggcccccggctgtggctgacccaccggcgctggccccacaggagcctgggctag

SEQ ID NO: 111128 - DNA, 1209 bp, Artificial Sequence
  derived and/or modified sequence
atggagagcctgggcctgcacacagtgaccctgagtgatggcaccacagcctacgtgcagcaggccgtgaagggggagaagctgctggagggccaggtgatccagctggaggatggcaccacagcctacatccaccaggtgacagtgcagaaggaggccctgagctttgaagatggccagcctgtgcagctggaggatggctccatggcctacatccacaggaccccccgggagggctatgaccccagcaccctggaggccgtgcagctggaggatggcagcacagcctacatccaccaccctgtggccgtgcccagcgagagcaccatcctggccgtgcagacagaggtgggcctggaggacctggccgcagaagatgatgagggcttcagcgcagatgctgtggtggccctggagcagtatgccagcaaggtgctgcatgacagccagatccccagaaatggcaagggccagcaggtgggggaccgggccttccgctgtggctacaagggctgcggccgcctgtacaccacagcccaccacctgaaggtgcatgagcgggcccacactggagaccggccctaccgctgtgacttccccagctgtgggaaggcctttgccaccggctacggcctgaagagccacgtgaggacccacactggagagaagccctacaagtgcccagaggagctgtgcagcaaggccttcaagaccagcggggacctgcagaagcacgtgaggacccacactggagagcggcccttccagtgcccctttgagggctgcggccgctccttcaccaccagcaacatcaggaaggtgcacgtgaggacccacactggagagcggccctacacctgcccagagccccactgcggccggggcttcaccagcgccaccaactacaagaaccacgtgcgcatccacactggagagaagccctacgtgtgcaccgtgcccggctgtgggaagcgcttcacagagtacagcagcctgtacaagcaccacgtggtgcacacccaccactgcggccacgccgcccggggctgtgaccccggggacaacagcgtgggggagtggctgctgagcccccggggcctgggccccaccccctgctggaggaagtgccacctgcacggccacagctgcccccagggcccccggctgtggctgacccaccggcgctggccccacaggagcctgggctag

SEQ ID NO: 111129 - DNA, 1023 bp, Artificial Sequence
  derived and/or modified sequence
atggagagcctgggcctgcacacagtgaccctgagtgatggcaccacagcctacgtgcagcaggccgtgaagggggagaagctgctggagggccaggtgatccagctggaggatggcaccacagcctacatccaccaggtgacagtgcagaaggaggccctgagctttgaagatggccagcctgtgcagctggaggatggctccatggcctacatccacaggaccccccgggagggctatgaccccagcaccctggaggccgtgcagctggaggatggcagcacagcctacatccaccaccctgtggccgtgcccagcgagagcaccatcctggccgtgcagacagaggtgggcctggaggacctggccgcagaagatgatgagggcttcagcgcagatgctgtggtggccctggagcagtatgccagcaaggtgctgcatgacagccagatccccagaaatggcaagggccagcaggtgggggaccgggccttccgctgtggctacaagggctgcggccgcctgtacaccacagcccaccacctgaaggtgcatgagcgggcccacactggagaccggccctaccgctgtgacttccccagctgtgggaaggcctttgccaccggctacggcctgaagagccacgtgaggacccacactggagagaagccctacaagtgcccagaggagctgtgcagcaaggccttcaagaccagcggggacctgcagaagcacgtgaggacccacactggagagcggcccttccagtgcccctttgagggctgcggccgctccttcaccaccagcaacatcaggaaggtgcacgtgaggacccacactggagagcggccctacacctgcccagagccccactgcggccggggcttcaccagcgccaccaactacaagaaccacgtgcgcatccacactggagagaagccctacgtgtgcaccgtgcccggctgtgggaagcgcttcacagagtacagcagcctgtacaagcaccacgtggtgcacacctag

SEQ ID NO: 111130 - DNA, 1548 bp, Artificial Sequence
  derived and/or modified sequence
atggagagcctgggcctgcacaccgtgaccctgagcgacggcaccactgcctatgtgcagcaagcagtgaagggcgaaaaactgctggaggggcaggttattcagctcgaggacggaacgacagcgtacatccaccaggtcacggttcagaaggaggccctgtcctttgaagatgggcaaccggtccagctcgaagatgggtccatggcttatattcatagaacccccagagagggttacgatccttctacccttgaggctgtccaactcgaggacggctccaccgcctacattcatcacccagtcgctgtcccaagtgagagcaccatcctagcggtccagaccgaagtggggctcgaggatctcgctgccgaggacgatgaaggctttagcgccgatgccgtagtggccctggagcagtatgcaagcaaagtgcttcacgatagtcagatcccacgaaatggaaaaggccagcaggtgggcgatagagcgtttcgctgcggatataagggctgcggcaggctttataccaccgcccatcaccttaaggtccacgagcgggcacacaccggggaccgcccctatcgctgtgacttcccttcctgcgggaaggcctttgctactggatatggcctgaagtcccacgttaggacccacacgggagaaaagccttacaagtgtcccgaggaactttgctcaaaggctttcaaaacctccggtgatcttcaaaagcatgtgcggacacatactggcgaaaggccatttcagtgccctttcgaaggatgcggacggagcttcactacgagcaatatccgcaaggtgcatgttaggactcacaccggagagagaccatatacatgccccgagccgcactgtggaaggggctttacttcggcgactaattacaagaatcacgtgagaatacacaccggtgagaagccttatgtttgcacagttcccggttgcggcaagaggttcaccgaatattcttccctgtacaagcatcacgtggttcatacccactgtaaaccttacacttgtagtacttgtggaaagacatataggcagactagcacactggccatgcacaagcgttctgcccacggggagctggaggccaccgaggaatcagagcaagcactgtacgagcagcaacagctggaggctgctagtgctgctgaggaatccccccccccaaagcggccaagaattgcctatctgtcagaagtgaaagaggagcgcgacgacattccagcgcaggtcgcaatggtaaccgaggaagatggtgccccacaggtagcgcttattactcaagatggcgctcaacaggttaccattatcacctcaggggccgtggtcgctgaggacagctctgtggcgtccctccggcaccagcaggtcgctctgcttgccacagcgaatggcactcacattgctgtgcagctcgaggaacaacagaccctggaagaggcaatcaatgttgctaccgcagctatgcaacagggagccgtgacgctcgagactacggtgagcgagtcagggtgttag

SEQ ID NO: 111131 - DNA, 1287 bp, Artificial Sequence
  derived and/or modified sequence
atggagagcctgggcctgcacaccgtgaccctgagcgacggcaccactgcttacgttcagcaagccgtgaaaggcgagaaattactggagggacaagtgatccagctggaagatggtacaaccgcctacattcatcaagtcaccgtgcagaaagaagccttgtcatttgaagatggccagcccgtgcagctggaggacggctctatggcatacattcacagaactccgagggagggctatgatccttctaccctagaggccgtgcagctcgaagacggatctactgcatacatccatcatcctgtcgcagtgccttctgagagcacaattcttgccgtgcagaccgaggttgggcttgaagatcttgccgccgaagatgatgagggcttcagcgcggacgccgtcgtggctctagagcagtacgctagcaaagtcctgcacgattcacaaattccccgtaacggaaaggggcagcaggtaggcgatcgagccttccgctgtggctacaagggatgtggacgactgtacaccactgcccaccacttgaaagtgcacgaaagggctcacacaggagatcgaccctaccgctgtgattttccgtcttgtggaaaggcctttgcaacaggatatggactgaagtcacatgtgcgaacccacactggggagaaaccttataagtgccccgaagaattgtgctcaaaagcgtttaaaactagcggtgaccttcagaagcacgtacgcacccacaccggtgaacggcctttccagtgtccgttcgaaggctgcggacgctcctttacgaccagcaacattcgcaaagtgcacgttaggacgcataccggggagagaccttatacctgccccgagccacattgcggccgcggattcacctcagcaaccaattataagaatcatgtgcgcatacacactggtgagaagccttacgtctgtacagttcccggatgcggtaagcgatttacagagtactcgtctctgtacaaacaccacgtggtgcacactcactgcaaaccctacacatgctcaacttgcgggaaaacctatcggcagacgtcaacattggccatgcataaacggtctggtcattgcggacacgccgctagaggctgcgatcccggtgacaacagcgtgggcgagtggctcctatctcccaggggcctgggacccacaccctgctggagaaagtgccacctccacggacacagttgccctcagggaccacgtttatggttgacacacaggcgctggcctcacaggtctctcggatag

SEQ ID NO: 111132 - DNA, 1209 bp, Artificial Sequence
  derived and/or modified sequence
atggagagcctgggcctgcacaccgtgaccctgagcgacggcaccaccgcctacgtccagcaggctgttaagggcgagaaactgctggaagggcaggtcattcagctagaggacgggacgactgcctatattcaccaggttacggtgcagaaggaggccctttctttcgaggatgggcagcctgtacaactggaagatggatctatggcctacattcatcggactccccgtgaaggctatgacccttccaccctggaggctgtccagctggaggacgggagcactgcatatatccaccatcccgtggctgtgcccagcgagtctacaatactggcggtgcaaactgaagtgggactggaggatctcgcagccgaagatgatgagggctttagcgcagacgccgtggtcgccctggaacagtatgccagcaaggtgctgcacgatagtcagatcccccgaaacggaaagggccagcaggtgggtgacagggctttccgctgtggctacaagggctgcggaaggttgtacaccacagcacatcatcttaaagtacatgagcgggcgcacaccggtgatcggccatacaggtgtgacttcccttcctgtggtaaagccttcgctactgggtacgggctaaagtctcatgtgcgaactcacacaggtgaaaagccatataaatgcccagaggagttatgtagcaaagcattcaagaccagcggtgatctgcagaagcatgtgaggacccacacaggcgaacggccttttcaatgtccatttgagggctgcggcagatcatttacaaccagcaatataagaaaagtgcatgtgcggacgcatacaggtgagaggccctacacctgtcctgagccccactgcgggaggggattcaccagtgccacaaattacaagaaccatgtgagaattcacactggggagaaaccctacgtatgcacggtgcccggctgtgggaagcggttcacagagtacagctcactgtataagcatcacgttgtccacactcatcactgcgggcatgcggcaagaggctgcgacccaggagacaattccgttggagagtggcttctgagccccagagggctcggccccaccccgtgctggcgcaagtgccacctacatggtcatagttgtccgcagggacctaggctctggctgacacataggcggtggcctcaccgttctttagggtag

SEQ ID NO: 111133 - DNA, 1023 bp, Artificial Sequence
  derived and/or modified sequence
atggagagcctgggcctgcacaccgtgaccctgagcgacggcaccacagcctatgtgcagcaagctgttaagggggagaaactgctggagggccaggttattcagctcgaagacggtactaccgcctatattcatcaagtgaccgtgcagaaagaagccctgagcttcgaggacggccagcctgttcagctggaggatggaagtatggcatatatccacagaacaccacgagagggttacgatccttcgacacttgaagctgtgcagctggaagatggctccacagcctatattcatcaccccgtggctgtcccaagcgaatcaaccatcctcgcagttcagacagaggtcgggctcgaagacctggcagccgaagacgacgaagggttctcggcagatgctgtggtagctctggaacagtatgctagtaaggtactgcacgactcccaaatcccacgcaatggtaaggggcagcaagtgggagacagggccttcaggtgcggctataaggggtgtggcagactgtataccactgctcaccacctcaaagtacacgagcgggctcataccggggacaggccttaccggtgcgattttccttcttgtgggaaagcgtttgcaactggctacggcctgaaatctcacgtcagaacacacacaggagagaagccttataagtgccctgaggagctatgctccaaggcctttaaaacttcaggagacttacagaaacacgtccggacccacactggggagcgaccctttcagtgtcctttcgagggctgcggacgcagtttcactacatctaacatacgaaaggtccacgtgcggacacacaccggcgagcgcccttacacttgccctgagccccactgtggccggggttttacatccgccactaactacaagaatcatgtgagaattcatacaggtgagaagccttatgtctgtacagtaccaggatgtgggaagcgcttcacagagtattccagcctatacaaacatcacgtagtacacacatag

SEQ ID NO: 111134 - DNA, 1548 bp, Artificial Sequence
  derived and/or modified sequence
atggagtctctggggcttcatactgtgacactcagcgacggaacgacagcctatgttcagcaggccgtaaaaggcgaaaagctgttggaggggcaggtgatacaactggaggacggcactactgcgtatattcatcaagtcaccgttcaaaaggaggccctgtcttttgaagacggccaaccggtgcagcttgaagacgggtccatggcttacatccatcgtacacccagggagggctatgatccttctaccctcgaggccgtacaattagaagatggatctaccgcatacatccatcatccagtggctgtcccctcagaatctactattctggcagtccagacagaagttggcttggaagatctcgccgcagaagatgacgaggggttcagtgcagacgctgtggtcgctttggagcagtacgcgagtaaagtgttacacgacagccagataccccgaaatggcaaggggcaacaagtcggcgatcgagcttttcgctgcggctataaaggttgcggaaggctgtacacaactgcccaccacttgaaggtgcatgaaagggcccacacaggcgatcgcccttaccgctgtgacttccccagctgcggcaaggcatttgctacgggctacggattgaaatctcacgttcgcactcacaccggcgaaaaaccatacaaatgcccagaggagttgtgcagcaaggcctttaaaacttccggcgacctgcagaagcatgtgcggacccacactggcgagaggccgtttcagtgtccgtttgaaggctgcggcaggtccttcaccaccagcaacatccgcaaagttcacgtacggacccatacgggtgagaggccctatacatgccctgaacctcattgcgggcgaggattcacttctgctaccaactataagaatcacgtgcgtattcatactggcgagaagccatatgtctgcacagtgccaggctgtggaaaacggttcacagagtattcttcactttacaagcaccacgttgtccacactcactgtaagccatacacttgtagcacatgcggtaaaacgtataggcagactagtaccctggccatgcacaaaaggtcggcccatggcgagctggaagcaacagaggagtcagagcaagcactctacgagcagcagcagctggaagctgcttcagcagccgaggagagcccacccccaaagcggccacgcatagcctacctctctgaggtcaaggaagagcgcgacgatataccagctcaggttgctatggtgaccgaagaagatggagccccacaggtggctctgatcacacaggatggggctcaacaagtcacaatcatcacatccggcgctgtggtggctgaggattcatctgtcgctagcttgcgccatcagcaggtggcgcttctggccacagccaatggcactcatattgctgtacagttagaggaacagcagactctggaagaagccatcaatgtggcgaccgccgctatgcaacaaggcgcagttacgctagagaccaccgtgtctgagtctggatgttag

SEQ ID NO: 111135 - DNA, 1287 bp, Artificial Sequence
  derived and/or modified sequence
atggagtccttgggacttcatactgttactttatcagacggaactaccgcgtatgtccagcaggcagtaaaaggagaaaaactcctggaggggcaggttattcagctggaagatgggacaacggcgtatatacatcaggtcaccgtacagaaagaggccctctcttttgaagatgggcagccagtccagctcgaggacggttccatggcatatatacatcgtactcctcgagaaggatatgacccgtctaccctggaagccgtgcaactagaagatggcagtaccgcctatatacatcatccagtcgcagtcccttcggagtccaccatcctcgcagtacagactgaggtgggcctcgaagatctggcagcagaggacgacgaggggttttccgccgatgctgtggtggctctggagcagtatgccagcaaggtactgcacgacagccagattcctcggaacggtaagggacaacaagtaggcgaccgggcttttaggtgtggctataagggttgtggaaggctctataccacggcccaccatctaaaagtccacgaacgagcccacaccggggaccgcccttataggtgtgactttccatcgtgcggcaaagcattcgcaaccggctacggcctcaaaagtcacgtgcggacccacaccggcgagaagccgtacaagtgtccagaagagctgtgctccaaagcattcaaaacttccggtgacctacaaaagcacgtgcggactcatacgggcgagagaccatttcagtgtccttttgaaggttgcggtcgcagtttcacaaccagtaacatccggaaggttcacgtacgcacacacactggggagcggccatatacttgtccagaaccacactgtggcaggggcttcacctctgccactaattacaagaaccacgtcagaattcatacaggagaaaagccctacgtctgtacagtgcctgggtgtggcaaacgttttactgagtactccagtctgtacaagcaccacgtagtgcacacgcactgcaagccctacacctgttccacgtgcggcaagacctacagacagactagtaccttggccatgcataagaggagtggtcactgcgggcacgctgccaggggttgtgaccccggagataactccgtcggcgaatggttgttgtctccaaggggactgggccctacaccctgctggaggaagtgccacttgcacggccattcatgtccccagggccctcgtctctggcttactcacagacggtggccccatcgctcccttgggtag

SEQ ID NO: 111136 - DNA, 1209 bp, Artificial Sequence
  derived and/or modified sequence
atggagagcctgggcctccataccgtgaccctttcagacggtactactgcctacgtgcagcaggccgttaagggggagaagctcctggagggacaggtgatacagctggaggacggaacaactgcttatatccaccaggtgactgtgcagaaggaggccctctcattcgaagatggccagcccgtgcagttggaggacggatcgatggcttatatccataggacccccagagaagggtacgacccaagcacgttggaggctgtgcagctggaagacggaagcacagcttatatccaccatcccgtggccgtgccatcggaatctaccatactggcagttcagacagaggtgggactcgaggatctggctgccgaggatgacgagggtttcagcgccgacgcggtagtggctctggagcagtatgcctcaaaagtcctgcatgatagccaaatccccaggaacggtaagggacagcaggtgggcgaccgtgccttccggtgtggatacaagggatgcggccgactctatacaaccgcccaccatcttaaagtgcatgagcgggcacatactggggacagaccgtaccgctgcgattttccatcctgcggcaaggcttttgccaccgggtatgggctgaagagccacgtgcgcacgcataccggcgagaaaccttacaaatgcccagaggaactttgcagcaaggcctttaagacaagcggtgacctgcaaaagcacgttaggacgcatacaggcgagcgtcccttccaatgcccattcgaaggatgtggccgttcatttacaaccagcaacatccggaaagtgcatgtcaggacccacacaggagagagaccctacacctgccccgaaccacactgcggcagggggttcaccagcgcaacaaattacaagaatcacgtcaggatccacaccggcgagaagccgtacgtatgtactgtgcctggttgtggaaaaagatttacagaatactcatcactttacaaacatcacgtcgtgcacactcaccattgcggccatgcagcaagggggtgtgatcctggtgacaattcagttggagagtggcttctcagccctagagggctgggccctacaccctgttggcgaaagtgtcacttgcacggtcactcgtgtccccaaggccctaggctctggctgactcatcgcaggtggccacatcgtagcctagggtag

SEQ ID NO: 111137 - DNA, 1023 bp, Artificial Sequence
  derived and/or modified sequence
atggaatcgttaggcctacacacagtgaccctctctgatggtacaacagcttacgtgcagcaagctgtcaaaggagaaaagctgctggaagggcaggtaatccaactggaagatgggacaacagcctacattcatcaggtgactgtgcaaaaggaagccttatctttcgaggatggtcagcccgtccagcttgaggatggcagcatggcctatattcatcgcactcctagggagggctacgacccaagcacgctggaggctgttcagctcgaggatggatcaacagcctatatccaccatcccgtcgccgtgccctctgagtcaaccatcctggcagtgcagactgaggtaggactggaagatctagcagccgaagatgatgagggcttttctgctgacgctgtggtcgcactggagcagtacgctagtaaggtcctgcacgattcacagatcccaagaaacgggaagggtcagcaggtgggggatcgggctttccgctgtggttacaagggctgcggcagactgtataccaccgctcaccatctgaaggtccacgagcgggctcatacaggcgatagaccttatcgatgcgacttcccatcctgtgggaaagccttcgccacaggatatggcctgaagtctcacgtccgcacccatacgggggaaaagccttacaaatgccccgaagagctctgctctaaagcttttaagactagtggtgatcttcagaaacatgtcaggacccacactggcgaaagaccttttcagtgccccttcgagggctgtgggcgttcctttaccacctccaacatcaggaaggtccacgtgcggacgcataccggggagagaccctacacctgtccagaacctcactgtgggaggggcttcacgtccgcgactaactataaaaaccatgttagaatacataccggagaaaaaccatatgtgtgtacagttccaggatgtgggaagcgctttaccgagtactcgtcgctatataagcatcatgtggtgcatacatag

SEQ ID NO: 111138 - DNA, 2447 bp, Artificial Sequence
  derived and/or modified sequence
ggccggcgctggtggcggggcccggtgcatggcggtctgtcggcggagtcgccctcgggggctgtcagatttgtgacccagaaggaaatctctgacctcagctgtggctcttggtgctggccagaagccaacttcatgtctgagtgcacgagcagcagtttgccatggagagcttggggctgcacacggtgacccttagtgatgggacaacagcctacgtccagcaagctgtcaaaggagagaagcttcttgaagggcaggtgatccagctcgaggatgggaccaccgcatacattcaccaggtgacggtacagaaagaagctctctcctttgaggatggtcagcctgtgcagctggaagatggcagcatggcttacatacaccgcacacccagagaaggctatgaccccagcaccctggaagccgtccaactggaagatggctccactgcctacattcaccaccctgtggctgtgccatcggagagcaccatcctggccgtacagacagaggtgggcttggaggacctggcagcagaggatgatgagggcttcagtgcagacgcagtggtggccctggagcagtatgccagcaaggttcttcatgacagccagattccccgtaatggaaaagggcagcaagttggagacagagcattccgctgtggctacaagggctgtgggcgtctctacaccaccgctcatcacttaaaggtgcatgaacgagctcatacaggtgaccgtccatacagatgtgacttccccagctgtggaaaggcctttgccacaggctatggactgaagagccacgttcgtacccacactggtgagaaaccatacaagtgcccagaggagctgtgcagcaaggccttcaagacctcaggagacctgcagaagcatgtccgtacccacactggtgaacgcccgttccagtgcccttttgagggctgtggccgctccttcaccacatctaacatccgcaaggtacatgtgcgcacccacacaggcgagaggccctacacctgcccggagccccactgtggccgcggcttcaccagcgccaccaactataagaatcacgtgcgcatccacacaggggagaagccatacgtttgcacggtgccaggctgcgggaaacgcttcaccgagtactcgagcttgtataagcaccacgtggtgcacacacactgcaagccctacacctgcagcacctgcggcaagacctaccggcagacctccaccttggccatgcacaagcgcagtgcccacggcgagctggaggccacggaggagagcgagcaggccctctatgagcagcagcaacttgaggccgcctctgcagccgaggagagtccgccacccaaacgaccccggatagcttacctttcggaggtgaaggaagagagagatgacatcccagcccaggtggcgatggtgactgaagaagatggggccccccaggtggctctgatcactcaggatggtgcccagcaggtcacaatcattacctctggggctgtggtggctgaggactcaagtgtagcatctcttcgtcatcaacaggtggcactgttggccacagccaacggaacgcacattgcagtgcagctggaggaacagcagaccttagaggaggccatcaatgtggccactgcggccatgcagcaaggggctgtgaccctggagacaacagtgtcggagagtggctgctgagtccaagagggctgggtcccacaccatgctggaggaagtgccatctgcatggccactcttgcccccaagggcccaggctgtggctgacacatagaaggtggccacataggtctctggggtgagaagacagcaagaaaactgcctaactgaagggaatgggggccctgctcaagaagggggccaggcagctggaatcaggggagtgcatcatcctcgggagctgacaacagccaggctacaccagggcacccgcctctcaaaatcagctgggcgcccactctcctcctaaagaacacccttctggccctcagtctgttccccttctcaggtagagattggggctgctatggggactggccctgtagggttgagccacagacagctcttcagcccagtagcagtggagcaggccctgtcctgccctcccagcaataaccacctccctggaggccagctgagatgcctggctacttggcaccagggacttcctgacaccacagtcaattaattcctcaggggcctgtggctgaagaaaaggtgcccagcccccaccactcctcagctgccccccaacctctctatggcagagaggcagggagtggccctgtacatagactgctggggattgggtttgatttgttttgttttttttaattccattttgataatttttttcctgctctgggtggtggtggcacatggatgaatgagtatttaataaaagttccaaatttc

SEQ ID NO: 111139 - DNA, 2000 bp, Artificial Sequence
  derived and/or modified sequence
aagctgcgcgcgggcgggcgggctatggcgcaggcgggttgtggggccggcgctggtggcggggcccggtgcatggcggtctgtcggcggagtcgccctcgggggctgtcagatttgtgacccagaaggaaatctctgacctcagctgtggctcttggtgctggccagaagccaacttcatgtctgagtgcacgagcagcagtttgccatggagagcttggggctgcacacggtgacccttagtgatgggacaacagcctacgtccagcaagctgtcaaaggagagaagcttcttgaagggcaggtgatccagctcgaggatgggaccaccgcatacattcaccaggtgacggtacagaaagaagctctctcctttgaggatggtcagcctgtgcagctggaagatggcagcatggcttacatacaccgcacacccagagaaggctatgaccccagcaccctggaagccgtccaactggaagatggctccactgcctacattcaccaccctgtggctgtgccatcggagagcaccatcctggccgtacagacagaggtgggcttggaggacctggcagcagaggatgatgagggcttcagtgcagacgcagtggtggccctggagcagtatgccagcaaggttcttcatgacagccagattccccgtaatggaaaagggcagcaagttggagacagagcattccgctgtggctacaagggctgtgggcgtctctacaccaccgctcatcacttaaaggtgcatgaacgagctcatacaggtgaccgtccatacagatgtgacttccccagctgtggaaaggcctttgccacaggctatggactgaagagccacgttcgtacccacactggtgagaaaccatacaagtgcccagaggagctgtgcagcaaggccttcaagacctcaggagacctgcagaagcatgtccgtacccacactggtgaacgcccgttccagtgcccttttgagggctgtggccgctccttcaccacatctaacatccgcaaggtacatgtgcgcacccacacaggcgagaggccctacacctgcccggagccccactgtggccgcggcttcaccagcgccaccaactataagaatcacgtgcgcatccacacaggggagaagccatacgtttgcacggtgccaggctgcgggaaacgcttcaccgagtactcgagcttgtataagcaccacgtggtgcacacacactgcaagccctacacctgcagcacctgcggcaagacctaccggcagacctccaccttggccatgcacaagcgcagtggccactgcggccatgcagcaaggggctgtgaccctggagacaacagtgtcggagagtggctgctgagtccaagagggctgggtcccacaccatgctggaggaagtgccatctgcatggccactcttgcccccaagggcccaggctgtggctgacacatagaaggtggccacataggtctctggggtgagaagacagcaagaaaactgcctaactgaagggaatgggggccctgctcaagaagggggccaggcagctggaatcaggggagtgcatcatcctcgggagctgacaacagccaggctacaccagggcacccgcctctcaaaatcagctgggcgcccactctcctcctaaagaacacccttctggccctcagtctgttccccttctcaggtagagattggggctgctatggggactggccctgtagggttgagccacagacagctcttcagcccagtagcagtggagcaggccctgtcctgccctcccagcaataaccacctccctggaggccagctgagatgcctggctacttggcaccagggacttcctgacaccacagtcaattaattcctcaggggcctgtggctgaagaaaaggtgcccagcccccaccactcctcagctgccccccaacctctctatggcagagaggcagggagtggccctgtacatagactgctggggatt

SEQ ID NO: 111140 - DNA, 1928 bp, Artificial Sequence
  derived and/or modified sequence
atgcgtcaccccggccttggtgggggcggggctccgaagagctcggttcagatcccggccgcctgggctccaggagccccggaaccaggataagttggatggctgccgcggcgaagcggggggcggggtggaccgtgcccggtattttctatacgggttccggggcccggtagaggcgcgccaagaggaaaggaaagtgcggcggccctggaacctggatatcgcgcgagatttgtgacccagaaggaaatctctgacctcagctgtggctcttggtgctggccagaagccaacttcatgtctgagtgcacgagcagcagtttgccatggagagcttggggctgcacacggtgacccttagtgatgggacaacagcctacgtccagcaagctgtcaaaggagagaagcttcttgaagggcaggtgatccagctcgaggatgggaccaccgcatacattcaccaggtgacggtacagaaagaagctctctcctttgaggatggtcagcctgtgcagctggaagatggcagcatggcttacatacaccgcacacccagagaaggctatgaccccagcaccctggaagccgtccaactggaagatggctccactgcctacattcaccaccctgtggctgtgccatcggagagcaccatcctggccgtacagacagaggtgggcttggaggacctggcagcagaggatgatgagggcttcagtgcagacgcagtggtggccctggagcagtatgccagcaaggttcttcatgacagccagattccccgtaatggaaaagggcagcaagttggagacagagcattccgctgtggctacaagggctgtgggcgtctctacaccaccgctcatcacttaaaggtgcatgaacgagctcatacaggtgaccgtccatacagatgtgacttccccagctgtggaaaggcctttgccacaggctatggactgaagagccacgttcgtacccacactggtgagaaaccatacaagtgcccagaggagctgtgcagcaaggccttcaagacctcaggagacctgcagaagcatgtccgtacccacactggtgaacgcccgttccagtgcccttttgagggctgtggccgctccttcaccacatctaacatccgcaaggtacatgtgcgcacccacacaggcgagaggccctacacctgcccggagccccactgtggccgcggcttcaccagcgccaccaactataagaatcacgtgcgcatccacacaggggagaagccatacgtttgcacggtgccaggctgcgggaaacgcttcaccgagtactcgagcttgtataagcaccacgtggtgcacacacaccactgcggccatgcagcaaggggctgtgaccctggagacaacagtgtcggagagtggctgctgagtccaagagggctgggtcccacaccatgctggaggaagtgccatctgcatggccactcttgcccccaagggcccaggctgtggctgacacatagaaggtggccacataggtctctggggtgagaagacagcaagaaaactgcctaactgaagggaatgggggccctgctcaagaagggggccaggcagctggaatcaggggagtgcatcatcctcgggagctgacaacagccaggctacaccagggcacccgcctctcaaaatcagctgggcgcccactctcctcctaaagaacacccttctggccctcagtctgttccccttctcaggtagagattggggctgctatggggactggccctgtagggttgagccacagacagctcttcagcccagtagcagtggagcaggccctgtcctgccctcccagcaataaccacctccctggaggccagctgagatgcctggctacttggcaccagggacttcctgacaccacagtcaattaattcctca

SEQ ID NO: 111141 - DNA, 1373 bp, Artificial Sequence
  derived and/or modified sequence
ttccctgggcgctcagcctcgctggccatgcgtcaccccggccttggtgggggcggggctccgaagagctcggttcagatcccggccgcctgggctccaggagccccggaaccaggataagttggatggctgccgcggcgaagcggggggcggggtggaccgtgcccggtattttctatacgggttccggggcccggtagaggcgcgccaagaggaaaggaaagtgcggcggccctggaacctggatatcgcgcgagatttgtgacccagaaggaaatctctgacctcagctgtggctcttggtgctggccagaagccaacttcatgtctgagtgcacgagcagcagtttgccatggagagcttggggctgcacacggtgacccttagtgatgggacaacagcctacgtccagcaagctgtcaaaggagagaagcttcttgaagggcaggtgatccagctcgaggatgggaccaccgcatacattcaccaggtgacggtacagaaagaagctctctcctttgaggatggtcagcctgtgcagctggaagatggcagcatggcttacatacaccgcacacccagagaaggctatgaccccagcaccctggaagccgtccaactggaagatggctccactgcctacattcaccaccctgtggctgtgccatcggagagcaccatcctggccgtacagacagaggtgggcttggaggacctggcagcagaggatgatgagggcttcagtgcagacgcagtggtggccctggagcagtatgccagcaaggttcttcatgacagccagattccccgtaatggaaaagggcagcaagttggagacagagcattccgctgtggctacaagggctgtgggcgtctctacaccaccgctcatcacttaaaggtgcatgaacgagctcatacaggtgaccgtccatacagatgtgacttccccagctgtggaaaggcctttgccacaggctatggactgaagagccacgttcgtacccacactggtgagaaaccatacaagtgcccagaggagctgtgcagcaaggccttcaagacctcaggagacctgcagaagcatgtccgtacccacactggtgaacgcccgttccagtgcccttttgagggctgtggccgctccttcaccacatctaacatccgcaaggtacatgtgcgcacccacacaggcgagaggccctacacctgcccggagccccactgtggccgcggcttcaccagcgccaccaactataagaatcacgtgcgcatccacacaggggagaagccatacgtttgcacggtgccaggctgcgggaaacgcttcaccgagtactcgagcttgtataagcaccacgtggtgcacaca

SEQ ID NO: 111142 - protein, 453 aa, Artificial Sequence
  derived and/or modified sequence
MDQFGDILEGEVDHSFFDSDFEEGKKCETNSVFDKQNDDPKERIDKDTKNVNSNTGMQTTENYLTEKGNERNVKFPPEHPVENDVTQTVSSFSLPASSRSKKLCDVTTGLKIHVSIPNRIPKIVKEGEDDYYTDGEESSDDGKKYHVKSKSAKPSTNVKKSIRKKYCKVSSSSSSSLSSSSSGSGTDCLDAGSDSHLSDSSPSSKSSKKHVSGITLLSPKHKYKSGIKSTETQPSSTTPKCGHYPEESEDTVTDVSPLSTPDISPLQSFELGIANDQKVKIKKQENVSQEIYEDVEDLKNNSKYLKAAKKGKEKHEPDVSSKSSSVLDSSLDHRHKQKVLHDTMDLNHLLKAFLQLDKKGPQKHHFDQPSVAPGKNYSFTREEVRQIDRENQRLLKELSRQAEKPGSKSTIPRSADHPPKLYHSALNRQKEQQRIERENLTISLCHPGWSAVT

SEQ ID NO: 111143 - DNA, 1362 bp, Artificial Sequence
  derived and/or modified sequence
atggaccagttcggcgacatcctggagggcgaggtggaccacagcttcttcgacagcgacttcgaggagggcaagaagtgcgagaccaacagcgtgttcgacaagcagaacgacgaccccaaggagagaatcgacaaggacaccaagaacgtgaacagcaacaccggcatgcagaccaccgagaactacctgaccgagaagggcaacgagagaaacgtgaagttcccccccgagcaccccgtggagaacgacgtgacccagaccgtgagcagcttcagcctgcccgccagcagcagaagcaagaagctgtgcgacgtgaccaccggcctgaagatccacgtgagcatccccaacagaatccccaagatcgtgaaggagggcgaggacgactactacaccgacggcgaggagagcagcgacgacggcaagaagtaccacgtgaagagcaagagcgccaagcccagcaccaacgtgaagaagagcatcagaaagaagtactgcaaggtgagcagcagcagcagcagcagcctgagcagcagcagcagcggcagcggcaccgactgcctggacgccggcagcgacagccacctgagcgacagcagccccagcagcaagagcagcaagaagcacgtgagcggcatcaccctgctgagccccaagcacaagtacaagagcggcatcaagagcaccgagacccagcccagcagcaccacccccaagtgcggccactaccccgaggagagcgaggacaccgtgaccgacgtgagccccctgagcacccccgacatcagccccctgcagagcttcgagctgggcatcgccaacgaccagaaggtgaagatcaagaagcaggagaacgtgagccaggagatctacgaggacgtggaggacctgaagaacaacagcaagtacctgaaggccgccaagaagggcaaggagaagcacgagcccgacgtgagcagcaagagcagcagcgtgctggacagcagcctggaccacagacacaagcagaaggtgctgcacgacaccatggacctgaaccacctgctgaaggccttcctgcagctggacaagaagggcccccagaagcaccacttcgaccagcccagcgtggcccccggcaagaactacagcttcaccagagaggaggtgagacagatcgacagagagaaccagagactgctgaaggagctgagcagacaggccgagaagcccggcagcaagagcaccatccccagaagcgccgaccacccccccaagctgtaccacagcgccctgaacagacagaaggagcagcagagaatcgagagagagaacctgaccatcagcctgtgccaccccggctggagcgccgtgacctag

SEQ ID NO: 111144 - DNA, 1362 bp, Artificial Sequence
  derived and/or modified sequence
atggatcaatttggagacattctagagggcgaagtcgatcacagttttttcgactccgatttcgaggagggaaagaaatgcgaaacgaacagtgtcttcgacaagcagaacgatgatccaaaggaacgtatcgacaaagacacgaagaacgttaactctaacaccggaatgcagacaacagaaaactaccttactgaaaaaggaaacgagaggaatgttaaattcccaccagagcacccagtggagaatgacgtgactcagacggtaagcagcttcagcttgcccgcttcaagccgcagcaaaaaactctgtgacgtgacgactggcctgaagatccatgtttcgattcccaaccgcattcccaagatagtcaaagagggcgaggatgactactacacagacggtgaagagtcatccgacgacggaaagaagtatcatgtgaagagtaaaagtgctaagccctcaacaaatgtcaagaaatcaataagaaaaaagtactgcaaagtcagttctagcagctcgagttctttgtcctcttcctcaagtggtagcggtaccgactgcctagatgcagggagcgacagtcacctgagcgactcttctcccagctcaaaatcttccaaaaaacacgtgtccggcattaccctcctgtccccgaagcataaatacaagtccggaattaaaagcacagagacccagccatccagcactactccaaagtgtggccactatcctgaggagagcgaggatactgtgacggatgtatctcccttgtccacgccagatatatccccgctgcagagctttgagctgggcatcgctaacgaccaaaaggtcaaaattaagaagcaggaaaatgtgtcacaggaaatttatgaagacgttgaagacctcaaaaataatagcaagtacttgaaagccgcaaaaaaagggaaggagaagcatgaacccgatgtgagcagcaagtccagtagcgttcttgactcttcgctagatcatcgacataagcagaaggtactgcacgacaccatggatctcaatcatctgctgaaagcattcctccagttagataaaaagggcccccagaagcaccacttcgaccagccatctgtggcacccggtaagaattattcctttactcgggaagaagtgaggcagatcgaccgcgaaaatcagaggcttctgaaggagttaagtcggcaggcggaaaagccagggagcaagtctaccataccaagatctgccgaccatcctcctaaactgtaccacagtgctctgaaccgtcagaaagaacaacagcggatcgagagggagaatctgactatttcgctctgccatccaggttggagtgcagtcacatag

SEQ ID NO: 111145 - DNA, 1362 bp, Artificial Sequence
  derived and/or modified sequence
atggaccagtttggagacatcctggagggggaggtggaccacagcttctttgacagcgactttgaggagggcaagaagtgtgagaccaacagcgtgtttgacaagcagaatgatgaccccaaggagagaattgacaaggacaccaagaatgtgaacagcaacacaggcatgcagaccacagagaactacctgacagagaagggaaatgaaagaaatgtgaagttccccccagagcaccctgtggagaatgatgtgacccagacagtgtcctccttcagcctgcctgccagcagccgcagcaagaagctgtgtgatgtgaccaccggcctgaagatccacgtgtccatccccaaccgcatccccaagatcgtgaaggagggggaggatgactactacacagatggagaggagagcagtgatgatggcaagaagtaccacgtgaagagcaagagcgccaagcccagcaccaacgtgaagaagagcatcaggaagaagtactgcaaggtgagcagcagcagcagcagcagcctgagcagcagcagcagcggcagcggcacagactgcctggatgctggcagtgacagccacctgagtgacagcagccccagcagcaagagcagcaagaagcacgtgtctggcatcaccctgctgagccccaagcacaagtacaagagcggcatcaagagcacagagacccagcccagcagcaccacccccaagtgtggccactacccagaggagagtgaagatactgtgacagatgtgagccccctgagcaccccagacatcagccccctgcagagctttgagctgggcatcgccaatgaccagaaggtgaagatcaagaagcaggagaatgtgtcccaggagatctatgaagatgtggaggacctgaagaacaacagcaagtacctgaaggccgccaagaagggcaaggagaagcatgagccagatgtgagcagcaagagcagctctgtgctggacagcagcctggaccaccgccacaagcagaaggtgctgcatgacaccatggacctgaaccacctgctgaaggccttcctgcagctggacaagaagggcccccagaagcaccactttgaccagcccagcgtggcccctgggaagaactacagcttcacccgggaggaggtgcggcagattgaccgggagaaccagaggctgctgaaggagctgagccggcaggccgagaagccaggcagcaagagcaccatccccaggtctgctgaccacccccccaagctgtaccacagcgccctgaaccggcagaaggagcagcagagaattgagcgggagaacctgaccatcagcctgtgccaccctggctggagcgctgtgacctag

SEQ ID NO: 111146 - DNA, 1362 bp, Artificial Sequence
  derived and/or modified sequence
atggaccagttcggcgacatcctggagggcgaggtggaccacagctttttcgatagcgatttcgaggagggaaagaagtgcgagactaactcagtcttcgataagcagaatgatgatccaaaggaacgtatcgacaaggacaccaagaacgtgaacagcaacaccggaatgcaaactaccgaaaattaccttaccgagaaaggcaatgagcgaaacgtcaaattcccccctgaacatcctgtggaaaatgatgtgacccagaccgtttcttctttcagtctgccggcctcaagtaggtccaaaaagctgtgtgatgtgactacaggactcaaaatacacgttagtatcccaaaccgcattcccaagattgtgaaagaaggagaagacgactattacactgatggcgaagagtccagcgatgacggtaaaaagtaccacgtcaaatcaaagtcagccaagccttctaccaatgtcaaaaaaagcatccggaagaaatactgcaaggtaagctcctcttctagctcctcgctaagtagctcttcctccgggagcggaactgactgcttggacgccggatcggattcccaccttagcgactcatccccttcttcaaagtcaagtaagaagcatgtttccgggattacactgttaagtcccaagcataagtacaaatccggaatcaagagcaccgagacgcagccttcgtctaccactcccaaatgtggccactaccccgaagagtctgaggataccgtaaccgatgtgtctcctctctctactcctgacatttcaccattgcaatccttcgagttggggattgcaaacgatcaaaaagtaaaaatcaagaaacaggaaaacgtatcccaggagatctatgaagatgtggaggacttaaaaaataacagtaaatatctgaaggctgctaagaagggaaaggagaaacacgaacctgacgtcagttccaagtccagctcagtgctggactcatcccttgaccatagacataagcagaaagtcttgcacgataccatggacctgaatcatctactcaaggccttcctgcaacttgataaaaaggggcctcaaaagcatcacttcgatcagccctctgtggcgcccggaaagaactactccttcacacgcgaagaggtgaggcagatcgatcgagagaaccagcggctcctgaaggagctgtcacggcaagctgaaaaaccgggaagcaagtctactataccgcggagtgccgaccatccacccaagctgtatcactccgccctgaataggcagaaggaacagcagaggatcgaacgtgagaacctgaccatttctctgtgtcaccccggttggtcagcagtaacatag

SEQ ID NO: 111147 - DNA, 1362 bp, Artificial Sequence
  derived and/or modified sequence
atggatcagtttggcgacatactggaaggcgaggtggatcacagctttttcgattctgactttgaggagggcaaaaaatgcgagaccaacagtgtgtttgacaaacaaaatgacgaccccaaagagagaatcgataaggacacaaaaaatgtcaattcaaacactgggatgcagaccactgagaactaccttaccgagaaaggaaatgaaagaaacgtgaagttccctcccgagcatcctgttgagaacgatgttacccaaacggtaagtagctttagcttgccagcttcctccaggagcaagaagctgtgtgatgtgaccaccggactgaagatccatgtttcaatacccaaccgaatccctaagatcgtcaaggagggcgaagacgactactacaccgacggagaagagagctcagacgatggcaaaaagtaccacgtcaagagcaagagtgcaaaacccagtactaatgttaagaaaagcatcagaaagaagtactgtaaagtttcctcatcctcatccagctcgctgtcgtctagctcatccgggagtggcacagattgtctcgacgccggtagcgatagtcacctgtccgatagctcaccctcctcgaagtcttcaaagaagcacgtttccgggatcacactgctgtcccccaagcataaatacaaatctggaatcaaatctaccgagacacagccgagctcgaccacccccaaatgcggccactaccctgaagagtccgaggacaccgtcacagatgtttctcccttgtcaacccccgatatctcaccacttcagtcattcgaactcggcattgctaacgaccagaaggtaaaaatcaagaaacaggagaacgtgtcacaagagatttacgaggacgtcgaggatctcaaaaacaactctaagtacctaaaggctgccaagaagggtaaagagaaacacgaaccagatgtgtcctcaaaatcatctagcgtactcgacagtagcctggaccatagacataaacaaaaggtccttcacgacacaatggacttaaatcatctgctgaaggcctttttacaattagacaagaaaggacctcagaagcatcattttgaccagccaagcgtggctcctgggaagaattattcttttacccgggaagaggtgcgccagatcgacagagagaaccagaggttactaaaggagctgtcaaggcaagccgaaaagcccggatccaaatcgaccattcctcggagcgcagaccacccccctaaactctatcattccgccctgaaccggcaaaaggagcagcaacggattgaacgggaaaatctaactatatccttgtgtcacccgggttggtctgctgtgacctag

SEQ ID NO: 111148 - DNA, 1509 bp, Artificial Sequence
  derived and/or modified sequence
cacgccgcccctcctttccctttccgctctctccgcctccggaagcgcgggcgcgcggcgccgggagcccgttcagggccgcgggagtgcgccagcgccgcgcgtggggctgtggtggccgcggctctcagatatatttttgccatcatggatcagtttggagatatattagaaggtgaagtggaccattctttctttgacagtgactttgaagaaggaaagaaatgtgaaactaactcagtttttgacaagcaaaatgatgacccaaaggaaagaatagataaagatacaaaaaatgtaaattcgaacactggaatgcaaacaacagaaaattatcttactgagaagggaaatgaaagaaacgtgaaatttcccccagaacaccccgtagagaatgatgttacacaaactgtaagttctttctcattgccagcctcttcaagatcaaaaaaattgtgtgatgttacaacaggacttaaaatacacgtgtccattccaaatagaattcccaaaattgtaaaagaaggtgaagatgattactacacagatggagaggaaagcagtgatgatgggaagaaataccatgtgaagtccaagtccgctaaaccatctactaacgttaaaaaaagcataaggaaaaagtattgcaaagttagctcctcttcctcctcctctttatcttcctcatcttcaggttcaggtacagattgtttagatgcagggtctgatagccatctatctgattcgtctccgtcatctaagtcatctaagaaacatgtatctggtataaccctcctgtcaccaaaacacaagtataaatcaggaataaaatcgacagaaacacagccttcaagtactacaccaaaatgtggccactaccctgaggagtctgaagatactgtgactgacgtaagtcccttatcaactccagacattagccctcttcagtcttttgaactgggcatagcaaatgatcaaaaagtgaaaattaaaaagcaagaaaatgtgagccaagaaatatatgaagatgttgaggatttgaaaaataattcaaaatatttgaaagcagccaaaaaagggaaagaaaaacatgagcctgatgtctcctcaaagtcgtcttcagtgttagactccagtttagaccacagacataaacagaaagtcttacatgacacaatggatctgaatcatctcttgaaagcttttctgcaattagataaaaaaggaccacaaaaacatcactttgatcagccttcagtagcacccgggaaaaactactctttcacaagagaagaggtgagacagatcgatcgggaaaatcagaggcttttgaaagaactgtcaagacaggcggaaaagccgggaagcaaaagtacaattcctagatcggctgatcatcccccaaagttatatcacagtgctctcaacagacagaaggaacaacaaaggattgagagagaaaacttgactatctcgctctgtcacccaggctggagtgcagtgacgtga

SEQ ID NO: 111149 - protein, 661 aa, Artificial Sequence
  derived and/or modified sequence
MQNNNNLDACCAVLSQESTRYLYGEGDLNFSDDSGISGLRNHMTSLNLDLQSQNIYHHGREGSRMNGSRTLTHSISDGQLQGGQSNSELFQQEPQTAPAQVPQGFNVFGMSSSSGASNSAPHLGFHLGSKGTSSLSQQTPRFNPIMVTLAPNIQTGRNTPTSLHIHGVPPPVLNSPQGNSIYIRPYITTPGGTTRQTQQHSGWVSQFNPMNPQQVYQPSQPGPWTTCPASNPLSHTSSQQPNQQGHQTSHVYMPISSPTTSQPPTIHSSGSSQSSAHSQYNIQNISTGPRKNQIEIKLEPPQRNNSSKLRSSGPRTSSTSSSVNSQTLNRNQPTVYIAASPPNTDELMSRSQPKVYISANAATGDEQVMRNQPTLFISTNSGASAASRNMSGQVSMGPAFIHHHPPKSRAIGNNSATSPRVVVTQPNTKYTFKITVSPNKPPAVSPGVVSPTFELTNLLNHPDHYVETENIQHLTDPTLAHVDRISETRKLSMGSDDAAYTQALLVHQKARMERLQRELEIQKKKLDKLKSEVNEMENNLTRRRLKRSNSISQIPSLEEMQQLRSCNRQLQIDIDCLTKEIDLFQARGPHFNPSAIHNFYDNIGFVGPVPPKPKDQRSIIKTPKTQDTEDDEGAQWNCTACTFLNHPALIRCEQCEMPRHF

SEQ ID NO: 111150 - DNA, 1986 bp, Artificial Sequence
  derived and/or modified sequence
atgcagaacaacaacaacctggacgcctgctgcgccgtgctgagccaggagagcaccagatacctgtacggcgagggcgacctgaacttcagcgacgacagcggcatcagcggcctgagaaaccacatgaccagcctgaacctggacctgcagagccagaacatctaccaccacggcagagagggcagcagaatgaacggcagcagaaccctgacccacagcatcagcgacggccagctgcagggcggccagagcaacagcgagctgttccagcaggagccccagaccgcccccgcccaggtgccccagggcttcaacgtgttcggcatgagcagcagcagcggcgccagcaacagcgccccccacctgggcttccacctgggcagcaagggcaccagcagcctgagccagcagacccccagattcaaccccatcatggtgaccctggcccccaacatccagaccggcagaaacacccccaccagcctgcacatccacggcgtgcccccccccgtgctgaacagcccccagggcaacagcatctacatcagaccctacatcaccacccccggcggcaccaccagacagacccagcagcacagcggctgggtgagccagttcaaccccatgaacccccagcaggtgtaccagcccagccagcccggcccctggaccacctgccccgccagcaaccccctgagccacaccagcagccagcagcccaaccagcagggccaccagaccagccacgtgtacatgcccatcagcagccccaccaccagccagccccccaccatccacagcagcggcagcagccagagcagcgcccacagccagtacaacatccagaacatcagcaccggccccagaaagaaccagatcgagatcaagctggagcccccccagagaaacaacagcagcaagctgagaagcagcggccccagaaccagcagcaccagcagcagcgtgaacagccagaccctgaacagaaaccagcccaccgtgtacatcgccgccagcccccccaacaccgacgagctgatgagcagaagccagcccaaggtgtacatcagcgccaacgccgccaccggcgacgagcaggtgatgagaaaccagcccaccctgttcatcagcaccaacagcggcgccagcgccgccagcagaaacatgagcggccaggtgagcatgggccccgccttcatccaccaccacccccccaagagcagagccatcggcaacaacagcgccaccagccccagagtggtggtgacccagcccaacaccaagtacaccttcaagatcaccgtgagccccaacaagccccccgccgtgagccccggcgtggtgagccccaccttcgagctgaccaacctgctgaaccaccccgaccactacgtggagaccgagaacatccagcacctgaccgaccccaccctggcccacgtggacagaatcagcgagaccagaaagctgagcatgggcagcgacgacgccgcctacacccaggccctgctggtgcaccagaaggccagaatggagagactgcagagagagctggagatccagaagaagaagctggacaagctgaagagcgaggtgaacgagatggagaacaacctgaccagaagaagactgaagagaagcaacagcatcagccagatccccagcctggaggagatgcagcagctgagaagctgcaacagacagctgcagatcgacatcgactgcctgaccaaggagatcgacctgttccaggccagaggcccccacttcaaccccagcgccatccacaacttctacgacaacatcggcttcgtgggccccgtgccccccaagcccaaggaccagagaagcatcatcaagacccccaagacccaggacaccgaggacgacgagggcgcccagtggaactgcaccgcctgcaccttcctgaaccaccccgccctgatcagatgcgagcagtgcgagatgcccagacacttctag

SEQ ID NO: 111151 - DNA, 1986 bp, Artificial Sequence
  derived and/or modified sequence
atgcagaataataataacctggacgcatgctgcgcagtgctgagccaggaatctacacgttacctatacggcgagggcgacctgaacttctcagacgactcagggatctctgggctgaggaaccatatgacttctctgaacctggatttgcagagtcagaacatatatcatcatgggcgggagggcagcaggatgaatgggtcccgcaccctgacacattccatttcagatggacagctccagggcggtcagagcaacagcgaacttttccaacaggaaccgcaaacagcgcccgcccaggtccctcaggggttcaacgtcttcggaatgtcatcttccagcggcgcgtctaactcggcaccacacctcggttttcatctgggatcaaaaggaacaagtagcttatctcagcaaactccaagatttaatcccataatggttactcttgcccccaatatacagaccggtagaaatacgccgacctcgctgcacatccacggagtgccaccccctgttctaaacagcccacaggggaatagtatttatatccggccttatataactactcctggcgggaccacaagacagacccaacagcacagcggctgggtgtcccagtttaacccaatgaacccacagcaggtgtaccagcctagccaacccggtccttggacaacttgccccgctagtaatccgctaagtcacacttcatcacaacagcccaaccaacaaggacaccagactagccatgtgtacatgccaataagctcacctacaacatcacaaccccctaccatccatagttcagggtctagccagtccagcgcacattctcagtacaacattcagaacatcagcacgggtccacgaaagaatcagattgaaatcaaactcgagccacctcagcggaataacagctccaaactccggagctccggtccccgcacttcctccacaagtagctccgtgaactcgcagacattgaatagaaatcagcccaccgtctacatcgctgccagccctcccaatacagatgagctgatgtcacgaagtcagcctaaagtgtacatcagtgccaatgccgctactggtgatgagcaggtgatgagaaaccaacccactttgttcatctctaccaatagtggggcttcagccgcatcccggaatatgtctgggcaggtgtctatgggacccgcctttatccatcaccacccacctaagtctcgagccatcggcaacaactcagccacgtcaccaagggtggtggttactcaaccaaatacaaagtatacttttaaaatcaccgtgtctccaaataaacctccggctgtttctcctggcgttgtgagtcctaccttcgagctgacaaatcttctgaaccatccagatcactacgtggaaacagagaacattcagcacctcactgaccctaccttggctcacgtggaccgaatatcggaaacacggaagctctcaatgggctctgatgacgccgcctacacacaggccctgcttgtgcatcagaaggcccgaatggaaagactccagcgagaactagagatccagaaaaagaagctggataaacttaaatctgaggtgaacgagatggaaaacaatcttacacgacgtcgtctaaaacggagcaacagtatctctcaaattcctagcttggaggagatgcagcaactgcgctcgtgcaatcggcagctccagatcgacattgactgcctaaccaaggagattgacctgtttcaagcgaggggaccacacttcaacccatccgctatccacaatttctacgacaacataggttttgttggaccagtaccgccaaagcctaaggatcagaggtcaatcatcaagacccccaagactcaggacaccgaggacgacgagggcgcccaatggaattgtaccgcttgtacgttccttaaccatcctgcattgatcagatgcgaacagtgtgagatgccccgccacttctag

SEQ ID NO: 111152 - DNA, 1986 bp, Artificial Sequence
  derived and/or modified sequence
atgcagaacaacaacaacctggatgcctgctgtgctgtgctgagccaggagagcacccgctacctgtatggagagggggacctgaacttcagtgatgacagcggcatcagcggcctgaggaaccacatgaccagcctgaacctggacctgcagagccagaacatctaccaccacggccgggagggcagcaggatgaatggcagcaggaccctgacccacagcatcagtgatggccagctgcagggcggccagagcaacagcgagctgttccagcaggagccccagacagccccagcccaggtgccccagggcttcaacgtgtttggcatgagcagcagcagcggggccagcaacagcgccccccacctgggcttccacctgggcagcaagggcaccagcagcctgagccagcagaccccccgcttcaaccccatcatggtgaccctggcccccaacatccagacaggaagaaacacccccaccagcctgcacatccacggcgtgcccccacctgtgctgaacagcccccagggcaacagcatctacatccggccctacatcaccacccctgggggcaccacccggcagacccagcagcacagcggctgggtgtcccagttcaaccccatgaacccccagcaggtgtaccagcccagccagcccggcccctggaccacctgcccagccagcaaccccctgagccacaccagcagccagcagcccaaccagcagggccaccagaccagccacgtgtacatgcccatcagcagccccaccaccagccagccccccaccatccacagcagcggcagcagccagagcagcgcccacagccagtacaacatccagaacatcagcacaggccccaggaagaaccagatcgagatcaagctggagcccccccagaggaacaacagcagcaagctgcggagcagcggccccaggaccagcagcaccagcagctctgtgaacagccagaccctgaacagaaaccagcccaccgtgtacatcgccgccagcccccccaacacagatgagctgatgagccgcagccagcccaaggtgtacatcagcgccaatgctgccactggagatgagcaggtgatgaggaaccagcccaccctcttcatcagcaccaacagcggggccagcgctgccagcaggaacatgagcggccaggtgtccatgggccctgccttcatccaccaccacccccccaagagccgggccatcggcaacaacagcgccaccagcccccgggtggtggtgacccagcccaacaccaagtacaccttcaagatcaccgtgagccccaacaagcccccagctgtgtcccctggggtggtgagccccacctttgagctgaccaacctgctgaaccacccagaccactacgtggagacagagaacatccagcacctgacagaccccaccctggcccacgtggaccgcatcagcgagaccaggaagctgtccatgggcagtgatgatgctgcctacacccaggccctgctggtgcaccagaaggccaggatggagcggctgcagcgggagctggagatccagaagaagaagctggacaagctgaagtctgaggtgaatgagatggagaacaacctgacccggcggcggctgaagaggagcaacagcatcagccagatccccagcctggaggagatgcagcagctgcggagctgcaaccggcagctgcagattgacatcgactgcctgaccaaggagattgacctcttccaggcccggggcccccacttcaaccccagcgccatccacaacttctatgacaacattggatttgtgggccctgtgccccccaagcccaaggaccagaggagcatcatcaagacccccaagacccaggacacagaagatgatgaaggagcccagtggaactgcacagcctgcaccttcctgaaccacccagccctgatccgctgtgagcagtgtgagatgcccaggcacttctag

SEQ ID NO: 111153 - DNA, 1986 bp, Artificial Sequence
  derived and/or modified sequence
atgcagaacaacaacaacctggacgcctgctgcgccgtgctgagccaggagtctaccagatatctgtacggagaaggggacctgaattttagtgatgactccgggatttccggactgaggaaccacatgacaagcttgaacttagacttgcagtctcagaacatctatcatcatggccgggaggggtcccggatgaatggtagccgcacattgactcactcaatatccgatggtcagcttcagggcgggcagtctaattccgagctgtttcaacaagagccccagacagcccccgcccaggtgccgcagggattcaacgttttcggcatgagctcttctagtggcgcctcaaactctgccccccacttgggctttcacttaggatctaagggcacctcttcactgagtcagcaaacccctagatttaaccctataatggtcacactggctcctaacatccagaccggacgaaacacgcctacttcccttcacattcatggcgttccgccgccagtcctcaattcgccgcagggaaatagtatatatattcgtccgtatattactacccctggtggcaccaccagacaaacacaacagcactcaggttgggtctcacaatttaatcctatgaatccgcagcaggtgtatcaaccatctcagccggggccatggacaacatgccccgctagcaacccactgtcacacacctctagccagcagcctaaccagcaaggccatcagacatcgcatgtctacatgcccatttctagtccaactacttctcaacccccaaccatccatagctccggcagttctcagtcgtcggctcactcgcaatataacattcaaaacatcagcaccggcccacggaaaaaccagatcgagattaagctggagcctccccaaagaaataatagttctaaactgagaagcagtggtcctagaactagctctaccagctcttctgtgaatagccaaaccctgaataggaaccagccaaccgtgtatatcgcagccagcccacccaacacagacgaactaatgtcccggagccagccaaaggtgtatatctctgctaatgcagcaacaggggatgagcaggtaatgagaaaccagcctaccctttttattagcacgaacagcggcgcgtcagcagcctccaggaacatgtctggtcaggtctctatggggcctgccttcatacatcatcacccaccaaaatctagggcgataggaaataacagcgccacaagcccgagagtggtcgtcactcaacctaacacaaaatacactttcaagataacagtgagccccaacaagccgccggccgtaagccctggtgtggtgtcccctaccttcgaacttacaaatctcctgaaccacccggaccactacgttgaaacagaaaacattcagcatcttactgaccctaccttggcccacgtcgacaggattagcgagactagaaagctatcaatgggatccgacgacgctgcctatacccaagccctgttagtccatcagaaggcccggatggagcgcctccagagggagctggagattcagaagaagaaactggacaagttgaaaagtgaggtcaacgagatggaaaacaatctcacaagaaggcgcctgaagcgcagcaacagcatttcacagattccttccctggaggagatgcagcagctgcgatcatgtaaccgccagttgcaaattgatattgactgcctgacaaaggaaatagatctgttccaggccaggggtccacactttaacccatccgctattcataacttttatgacaatataggcttcgtcggacccgtacctcctaagccaaaggatcagcgtagtataatcaagacccctaagacccaagacacagaagacgacgagggtgctcagtggaactgcaccgcctgtacctttctcaatcacccagcactcattaggtgtgagcagtgcgagatgccacgccatttctag

SEQ ID NO: 111154 - DNA, 1986 bp, Artificial Sequence
  derived and/or modified sequence
atgcaaaataataataacctggatgcatgttgcgctgtgctttcacaggagtctacaaggtatctgtacggcgaaggagatcttaacttctcagacgattctggaattagcggcctgcggaaccacatgacaagcctaaatctggacttgcagagccaaaacatctatcaccacggaagagaagggagtcggatgaacgggtctcgaacccttacgcactctattagcgacggccagctgcagggtggccagagtaacagtgagctgttccagcaggaaccacagacggccccagcccaggtaccccaagggtttaatgtctttgggatgagttccagctccggagcaagcaattccgctccccacctgggttttcatctgggatccaaaggaacttcttcactcagccagcaaacccctcgtttcaatccaatcatggtgacccttgcacctaacattcaaaccggacgcaataccccgacaagtctgcacatccacggcgtgccccctccagtgctgaattcacctcaagggaactcaatctacattcgaccctacatcacaaccccaggcggaactacacgacagactcagcagcattccggttgggtgtcacaattcaatcccatgaatccccagcaggtgtatcagccttcccaaccagggccatggactacttgcccagcaagcaacccactcagccatacttcctctcagcagcctaaccaacaggggcatcagacaagccacgtgtacatgccaatctcgtcaccgacaacaagtcagcctccgacaatccatagcagcgggtcgtcacaatctagtgctcacagtcagtataatatccaaaacatttcaactggtccaagaaaaaaccagattgagatcaaattggagccaccccagagaaataacagtagcaaactccgcagctccggccctcggacctccagtacctcctctagcgtgaacagccagaccctgaacagaaaccagcctaccgtgtatattgccgctagtcctcccaacacggacgaactgatgtctaggagccagcctaaggtttacatctccgctaatgccgcaacgggggacgaacaagtgatgcgcaaccagccaactttatttatttcaactaatagcggagcctctgcagcctctcgaaatatgtccggacaggtgagtatgggcccagcatttatccatcaccatcccccaaaatcccgcgctataggaaacaattctgccacctctcctagagttgtggtaactcaacctaacactaaatatacatttaagattacggtttcaccaaacaaaccgccagcagtatcgcccggagtggtgagccccacctttgagttaaccaatcttctgaatcatcctgatcattacgtggaaactgaaaacatacaacacctgacggatcctaccctcgctcacgtggaccgcatctccgagacaaggaagctaagcatgggcagcgatgacgctgcctacacacaggccctgctggtgcaccagaaggctaggatggaacggctccagagggagctggaaatccagaaaaagaagctggacaagttaaaaagcgaagttaacgaaatggagaacaacctgacccgacggagactaaagcgcagtaattctatctcacagatcccctctttggaggagatgcaacagctgaggtcttgtaaccggcaactgcagattgatattgactgtttgaccaaagaaatcgatctgtttcaggcaagggggccacatttcaacccttctgccattcataacttctacgacaacattgggttcgttgggccagtaccccctaagccaaaggatcagcgctctataatcaagaccccaaaaacacaagacacagaagacgatgagggggctcagtggaactgcaccgcttgcacgtttttaaatcaccctgcgctcatcaggtgcgagcaatgcgaaatgcccaggcacttttag

SEQ ID NO: 111155 - DNA, 2336 bp, Artificial Sequence
  derived and/or modified sequence
agtgaggtgaactccttcagggccacaggctgtaaagatctaaacaccatctgatccagtttcaatatgactgcctggatgaagaaggatttgagactaagtttattcctccaaagcaaaccaactgagaatgcagaataataataacctggatgcctgctgtgctgttctctctcaggagagtacaagatatctttatggtgaaggagacttgaatttttcagatgattctggaatttctggtctacgcaatcacatgacttctctcaacttggacttgcaatcacagaacatttaccaccatggaagagaaggaagtaggatgaatggaagtaggactctaacgcacagcattagtgatggacaacttcaaggtggccagtccaatagtgaactatttcagcaggagccacagacagcaccagctcaagttcctcaaggctttaatgtttttggaatgtccagttcctctggtgcttcaaattcagcaccacatcttggatttcacttaggcagcaaaggaacatctagcctttctcaacaaactcccagatttaatcccattatggtaactttagccccaaatatccagactggtcgtaatactcctacatctttgcacatacatggtgtacctccacctgtacttaacagtccacagggaaattctatctatattaggccttacattacaactcctggtggtacaactcgacagacacaacagcattctggctgggtatctcagtttaatcccatgaaccctcagcaagtttatcagccttcacagcctggtccctggactacttgtcctgcatctaatcctctgtcacatacctcatctcaacagccaaatcagcaaggccaccagacctctcatgtctacatgccaatcagttcacctactacttcacaaccaccaaccattcattcatctggtagctcacagtcttctgcccatagccaatataacattcagaatatttcaacaggacctcgaaaaaaccagattgaaatcaaacttgaacccccacaaagaaataattcttcaaaactgcgttcttctggacctcgaacctccagcacttcctcttcagtcaatagccagaccttaaacagaaatcagcccactgtttacatagctgccagccccccaaatacggatgagctgatgtcccgtagtcaacctaaggtctatatttcagcgaatgctgccacaggagatgaacaggtcatgcggaatcagcccacactcttcatatccacaaactctggagcatctgctgcctccaggaacatgtctgggcaagtgagcatgggtcctgcctttattcatcaccatcctcccaaaagtcgagcaataggcaataactctgcaacctctcctcgagtggtagtcactcagcccaatacgaaatacactttcaaaattacagtctctcccaataagccccctgcagtttcaccaggggtggtgtcccctacctttgaacttacaaatcttcttaatcatcctgatcattatgtagaaaccgagaatattcagcacctcacggaccctacattagcacatgtggatagaataagtgaaacacggaaactgagtatgggatctgatgatgctgcctacacacaagctcttttggtacaccagaaggccagaatggaacgacttcaaagagaacttgagattcaaaagaaaaagctggataaattaaaatctgaggttaatgaaatggaaaataatctaactcgaaggcgcctgaaaagatcaaattctatatcccagataccttcccttgaagaaatgcagcagctgagaagttgtaatagacaactccagattgacattgactgcttaaccaaagaaattgatctttttcaagcccgaggaccacattttaaccccagcgctattcataacttttatgacaatattggatttgtaggtcctgtgccaccaaaacccaaagatcaaaggtccatcatcaaaacaccaaagactcaagacacagaagatgatgagggagctcagtggaattgtaccgcctgtacttttttgaaccatccagccttaattcgctgtgaacagtgtgagatgccaaggcatttctgagccaaatggccctgtatcttctctaaaaccacatctaaagttcaagaaactagtctgtcatcgggaaaaagtttcactgctacataggattttgtcaaattgaaggtgtgacaagatggtgttctgctaatgttaaatgtcagcccacagagctaataatacctcagtataatgtcatgagcagttgaaattcatcacatgaaaagtaatctgctgaaag

SEQ ID NO: 111156 - protein, 1344 aa, Artificial Sequence
  derived and/or modified sequence
MSRGKVIRLHRRKQDNISGGDSSATESWDEELSPSTVLYTATQHTPTSITLTVRRTKPKKRKKSPEKGRAAPKTKKIKAFREGSRKSLRMKNSPSEAQNLDENTTEGWENRIRLWTDQYEEAFTNQYSADVQNALEQHLHSSKEFVGKPTILDTINKTELACNNTVIGSQMQLQLGRVTRVQKHRKILRAARDLALDTLIIEYRGKVMLRQQFEVNGHFFKKPYPFVLFYSKFNGVEMCVDARTFGNDARFIRRSCTPNAEVRHMIADGMIHLCIYAVSAITKDAEVTIAFDYEYSNCNYKVDCACHKGNRNCPIQKRNPNATELPLLPPPPSLPTIGAETRRRKARRKELEMEQQNEASEENNDQQSQEVPEKVTVSSDHEEVDNPEEKPEEEKEEVIDDQENLAHSRRTREDRKVEAIMHAFENLEKRKKRRDQPLEQSNSDVEITTTTSETPVGEETKTEAPESEVSNSVSNVTIPSTPQSVGVNTRRSSQAGDIAAEKLVPKPPPAKPSRPRPKSRISRYRTSSAQRLKRQKQANAQQAELSQAALEEGGSNSLVTPTEAGSLDSSGENRPLTGSDPTVVSITGSHVNRAASKYPKTKKYLVTEWLNDKAEKQECPVECPLRITTDPTVLATTLNMLPGLIHSPLICTTPKHYIRFGSPFIPERRRRPLLPDGTFSSCKKRWIKQALEEGMTQTSSVPQETRTQHLYQSNENSSSSSICKDNADLLSPLKKWKSRYLMEQNVTKLLRPLSPVTPPPPNSGSKSPQLATPGSSHPGEEECRNGYSLMFSPVTSLTTASRCNTPLQFELCHRKDLDLAKVGYLDSNTNSCADRPSLLNSGHSDLAPHPSLGPTSETGFPSRSGDGHQTLVRNSDQAFRTEFNLMYAYSPLNAMPRADGLYRGSPLVGDRKPLHLDGGYCSPAEGFSSRYEHGLMKDLSRGSLSPGGERACEGVPSAPQNPPQRKKVSLLEYRKRKQEAKENSAGGGGDSAQSKSKSAGAGQGSSNSVSDTGAHGVQGSSARTPSSPHKKFSPSHSSMSHLEAVSPSDSRGTSSSHCRPQENISSRWMVPTSVERLREGGSIPKVLRSSVRVAQKGEPSPTWESNITEKDSDPADGEGPETLSSALSKGATVYSPSRYSYQLLQCDSPRTESQSLLQQSSSPFRGHPTQSPGYSYRTTALRPGNPPSHGSSESSLSSTSYSSPAHPVSTDSLAPFTGTPGYFSSQPHSGNSTGSNLPRRSCPSSAASPTLQGPSDSPTSDSVSQSSTGTLSSTSFPQNSRSSLPSDLRTISLPSAGQSAVYQASRVSAVSNSQHYPHRGSGGVHQYRLQPLQGSGVKTQTGLS

SEQ ID NO: 111157 - DNA, 4035 bp, Artificial Sequence
  derived and/or modified sequence
atgagcagaggcaaggtgatcagactgcacagaagaaagcaggacaacatcagcggcggcgacagcagcgccaccgagagctgggacgaggagctgagccccagcaccgtgctgtacaccgccacccagcacacccccaccagcatcaccctgaccgtgagaagaaccaagcccaagaagagaaagaagagccccgagaagggcagagccgcccccaagaccaagaagatcaaggccttcagagagggcagcagaaagagcctgagaatgaagaacagccccagcgaggcccagaacctggacgagaacaccaccgagggctgggagaacagaatcagactgtggaccgaccagtacgaggaggccttcaccaaccagtacagcgccgacgtgcagaacgccctggagcagcacctgcacagcagcaaggagttcgtgggcaagcccaccatcctggacaccatcaacaagaccgagctggcctgcaacaacaccgtgatcggcagccagatgcagctgcagctgggcagagtgaccagagtgcagaagcacagaaagatcctgagagccgccagagacctggccctggacaccctgatcatcgagtacagaggcaaggtgatgctgagacagcagttcgaggtgaacggccacttcttcaagaagccctaccccttcgtgctgttctacagcaagttcaacggcgtggagatgtgcgtggacgccagaaccttcggcaacgacgccagattcatcagaagaagctgcacccccaacgccgaggtgagacacatgatcgccgacggcatgatccacctgtgcatctacgccgtgagcgccatcaccaaggacgccgaggtgaccatcgccttcgactacgagtacagcaactgcaactacaaggtggactgcgcctgccacaagggcaacagaaactgccccatccagaagagaaaccccaacgccaccgagctgcccctgctgccccccccccccagcctgcccaccatcggcgccgagaccagaagaagaaaggccagaagaaaggagctggagatggagcagcagaacgaggccagcgaggagaacaacgaccagcagagccaggaggtgcccgagaaggtgaccgtgagcagcgaccacgaggaggtggacaaccccgaggagaagcccgaggaggagaaggaggaggtgatcgacgaccaggagaacctggcccacagcagaagaaccagagaggacagaaaggtggaggccatcatgcacgccttcgagaacctggagaagagaaagaagagaagagaccagcccctggagcagagcaacagcgacgtggagatcaccaccaccaccagcgagacccccgtgggcgaggagaccaagaccgaggcccccgagagcgaggtgagcaacagcgtgagcaacgtgaccatccccagcaccccccagagcgtgggcgtgaacaccagaagaagcagccaggccggcgacatcgccgccgagaagctggtgcccaagcccccccccgccaagcccagcagacccagacccaagagcagaatcagcagatacagaaccagcagcgcccagagactgaagagacagaagcaggccaacgcccagcaggccgagctgagccaggccgccctggaggagggcggcagcaacagcctggtgacccccaccgaggccggcagcctggacagcagcggcgagaacagacccctgaccggcagcgaccccaccgtggtgagcatcaccggcagccacgtgaacagagccgccagcaagtaccccaagaccaagaagtacctggtgaccgagtggctgaacgacaaggccgagaagcaggagtgccccgtggagtgccccctgagaatcaccaccgaccccaccgtgctggccaccaccctgaacatgctgcccggcctgatccacagccccctgatctgcaccacccccaagcactacatcagattcggcagccccttcatccccgagagaagaagaagacccctgctgcccgacggcaccttcagcagctgcaagaagagatggatcaagcaggccctggaggagggcatgacccagaccagcagcgtgccccaggagaccagaacccagcacctgtaccagagcaacgagaacagcagcagcagcagcatctgcaaggacaacgccgacctgctgagccccctgaagaagtggaagagcagatacctgatggagcagaacgtgaccaagctgctgagacccctgagccccgtgaccccccccccccccaacagcggcagcaagagcccccagctggccacccccggcagcagccaccccggcgaggaggagtgcagaaacggctacagcctgatgttcagccccgtgaccagcctgaccaccgccagcagatgcaacacccccctgcagttcgagctgtgccacagaaaggacctggacctggccaaggtgggctacctggacagcaacaccaacagctgcgccgacagacccagcctgctgaacagcggccacagcgacctggccccccaccccagcctgggccccaccagcgagaccggcttccccagcagaagcggcgacggccaccagaccctggtgagaaacagcgaccaggccttcagaaccgagttcaacctgatgtacgcctacagccccctgaacgccatgcccagagccgacggcctgtacagaggcagccccctggtgggcgacagaaagcccctgcacctggacggcggctactgcagccccgccgagggcttcagcagcagatacgagcacggcctgatgaaggacctgagcagaggcagcctgagccccggcggcgagagagcctgcgagggcgtgcccagcgccccccagaaccccccccagagaaagaaggtgagcctgctggagtacagaaagagaaagcaggaggccaaggagaacagcgccggcggcggcggcgacagcgcccagagcaagagcaagagcgccggcgccggccagggcagcagcaacagcgtgagcgacaccggcgcccacggcgtgcagggcagcagcgccagaacccccagcagcccccacaagaagttcagccccagccacagcagcatgagccacctggaggccgtgagccccagcgacagcagaggcaccagcagcagccactgcagaccccaggagaacatcagcagcagatggatggtgcccaccagcgtggagagactgagagagggcggcagcatccccaaggtgctgagaagcagcgtgagagtggcccagaagggcgagcccagccccacctgggagagcaacatcaccgagaaggacagcgaccccgccgacggcgagggccccgagaccctgagcagcgccctgagcaagggcgccaccgtgtacagccccagcagatacagctaccagctgctgcagtgcgacagccccagaaccgagagccagagcctgctgcagcagagcagcagccccttcagaggccaccccacccagagccccggctacagctacagaaccaccgccctgagacccggcaacccccccagccacggcagcagcgagagcagcctgagcagcaccagctacagcagccccgcccaccccgtgagcaccgacagcctggcccccttcaccggcacccccggctacttcagcagccagccccacagcggcaacagcaccggcagcaacctgcccagaagaagctgccccagcagcgccgccagccccaccctgcagggccccagcgacagccccaccagcgacagcgtgagccagagcagcaccggcaccctgagcagcaccagcttcccccagaacagcagaagcagcctgcccagcgacctgagaaccatcagcctgcccagcgccggccagagcgccgtgtaccaggccagcagagtgagcgccgtgagcaacagccagcactacccccacagaggcagcggcggcgtgcaccagtacagactgcagcccctgcagggcagcggcgtgaagacccagaccggcctgagctag

SEQ ID NO: 111158 - DNA, 4035 bp, Artificial Sequence
  derived and/or modified sequence
atgtccagggggaaggtgattaggttacaccgccgtaaacaggataatataagtgggggcgactcttcagccaccgagagctgggatgaggaactgagcccatctacagtcctgtacacagccacacagcacaccccgacaagtattaccctcactgtgcgcaggactaagcctaagaaacggaagaagagtcccgaaaaaggaagggcagccccaaagaccaaaaaaataaaagcctttagagaggggagcagaaagtctctccgaatgaaaaattccccttcagaagcgcagaacctggatgaaaataccaccgagggctgggaaaatagaattaggctgtggacagaccagtacgaagaggcgttcaccaatcaatactcagctgacgtccagaacgctctggagcagcacttgcactcctccaaggagttcgttgggaaacctaccatactggacactatcaacaaaacagagctcgcttgtaacaataccgtgataggatctcagatgcagctccagttgggtcgggtgacccgagtgcaaaagcaccgcaaaatattacgcgctgctcgggatcttgcacttgacacactcataattgaatatcgcggaaaagtgatgttgagacagcagtttgaggtcaatggccatttcttcaagaagccatacccattcgtgttattctattccaagtttaatggagtggagatgtgcgtggatgcaagaacatttggcaacgacgctcggtttatacgcaggtcgtgcacccccaacgctgaggtgcgccatatgatcgctgacggcatgattcatctctgcatctatgcagtctcggcaattacaaaagacgccgaggtgacgattgcctttgattatgaatatagcaattgcaattacaaggtggactgtgcctgccataagggaaaccgcaattgtcctattcagaaacgaaacccaaacgctacagagctgccacttctgccaccccccccaagcctgccaaccatcggagcggaaactagaaggcgaaaggccaggcgcaaggaattagaaatggagcagcaaaatgaggcctcggaggagaataatgatcaacagagtcaggaagttcccgagaaggtgacggttagctcagatcacgaggaggtggacaaccctgaggagaagcctgaggaggagaaggaagaggtcatagatgaccaggaaaatctggcccattcacggcgtacacgggaagatcgtaaggtggaggcgatcatgcatgcttttgagaatctcgagaagagaaagaaacgaagggatcagcctctagaacagtctaacagtgatgtggagattacaactactaccagtgagacacccgtgggcgaagaaaccaagacagaggcccccgagtctgaggtgtcaaacagcgtgtctaacgtaaccataccttctactcctcagtcggtcggagtgaacaccaggcgctcgtctcaagcaggggacattgcggccgaaaagctcgtgccgaagccccctcctgccaagccttcaagacccagacccaagtcgaggattagccgctacagaacttcctccgcacagcgcctcaagaggcagaagcaggctaacgcccagcaggccgaactctcccaggcagcactggaggaaggaggctccaactcgctcgtcacccccaccgaggctggtagtctggatagttccggcgaaaacagaccgttgacaggaagcgaccctactgtggtgtctatcacaggttcccatgtgaatcgagccgccagtaagtatcccaagacgaaaaagtacctagtgacagagtggctgaacgacaaagccgagaagcaggaatgcccagttgagtgtcctcttcggatcactactgaccctactgtgctagcaacaaccctgaacatgttaccaggcctgattcattctccactgatctgcaccacaccaaagcattatataagatttgggtctcctttcatcccagagcgtcgaaggagaccactgctgcccgacgggaccttttcctcatgtaagaagcggtggattaagcaagccctcgaagagggaatgacccaaacgtcatctgttccccaggagacgagaactcagcatctgtaccagagtaacgaaaacagcagctctagcagtatttgtaaagacaatgccgacctcctgtcccccctgaaaaaatggaagagcagatatttgatggaacagaatgtgacaaagctcctccggcccctgtctcctgtgacccccccacctcccaattctggcagcaaaagcccccagttggccaccccaggctcctcgcaccccggtgaggaagaatgtagaaacggctattctctgatgttttctccagtgacatctcttaccacagcaagccgctgcaatacccccttgcagtttgagctatgccacagaaaagatctggacctcgcaaaggtagggtacctggactcaaatacaaatagctgcgccgaccgaccttccctgttaaacagcggccattctgatctagcaccacacccaagtttagggccaacatcagagaccggttttccttccagatccggagacggccatcagaccctagtgcgcaattccgaccaagccttccgaacagagtttaatctgatgtatgcctattcgcccttgaatgctatgccacgcgccgatggcctctaccggggctcaccactcgtgggagatcgcaagcctttacacttggatggcgggtactgctcacccgccgagggattctcttcacgttacgagcacgggctaatgaaggacctgtctagaggaagtctgagtcccggcggcgaaagagcgtgcgaaggcgtgccctcagctccccagaatccgccacagcgcaagaaggtgtcgttactggaataccgaaaacgcaaacaagaagctaaagagaactctgccggtggtggaggggacagcgcacagagcaagagcaagtcagccggagcaggacagggaagcagtaacagcgtgtcagatactggtgcccacggggttcagggctcatccgcacgcactccaagcagccctcacaaaaaattctcaccaagccatagcagcatgtctcatctggaggctgttagcccttccgatagccgaggtacatccagtagccactgccgtccccaagaaaatatctcaagccgatggatggtcccaacctcagtcgaacgattgcgagaaggtggctccatcccaaaagtcttgagatcaagtgtgcgggtggctcagaagggtgaaccttccccaacttgggagagtaacattacagaaaaggactccgacccagcagatggcgaaggcccagagacacttagctctgctctcagcaaaggcgccaccgtgtattcaccttcccgttatagttatcagttgctccagtgcgacagcccaaggacggagagccagagtctgctgcagcagagcagtagcccatttcgcggccatcccacacagtctcctggttatagctaccgcaccactgcgctacggccagggaatccccctagtcacgggtcctcggagagcagcctgtcgagcacgtcctactccagtccagcccatcctgtttccactgacagcctcgcccccttcaccggtacccctggatacttctcttcccagccacatagcgggaatagcaccggctctaacttgcccaggcgtagctgcccatccagcgccgctagcccaaccttgcaggggccttcagattcacccacatccgatagcgtttctcagtcgtcaacaggtaccctgagctctacttcatttccacaaaacagccggtccagcctgccctcagaccttaggactatcagcttaccgtccgctggacaatctgctgtataccaagcaagccgtgtatctgcggtgagtaatagtcagcattaccctcaccgcggctcaggtggagtccaccaatacagacttcagcccttacagggtagtggagtgaagacgcaaaccggcttgagctag

SEQ ID NO: 111159 - DNA, 4035 bp, Artificial Sequence
  derived and/or modified sequence
atgtccagaggaaaggtaatccgcctgcaccgcaggaaacaggacaacataagcgggggcgacagctccgccacagaaagctgggatgaggagctgtccccgagcaccgttctgtacaccgctactcagcatacaccgacttccataactcttaccgtgaggagaactaagcccaaaaaacgaaagaagtccccagagaagggccgggccgcacccaaaaccaaaaagatcaaggcatttcgcgaggggtccaggaagagtcttaggatgaaaaattcaccctcagaggcgcagaatttggatgaaaacacaacggaagggtgggagaatagaattaggctgtggacagaccaatacgaggaggcttttaccaatcagtactctgcagacgtgcagaatgcgctggagcagcatctgcacagctccaaggaattcgtgggcaagccaacgatcctggacacaatcaataagactgaactcgcatgtaataacactgtgattggcagccagatgcagctccagctcggtagagtcacccgagtccaaaaacacagaaaaatcctgagggctgcgcgagatcttgctctagacacactgatcatcgagtacagaggtaaagttatgttgaggcagcaattcgaagttaacggccatttctttaaaaagccctacccattcgtgctcttctattcgaagtttaacggagtggaaatgtgcgtcgacgcgcgtacgtttggaaatgatgccagattcatacggcgaagctgcacccccaatgcagaagtacgacatatgatcgccgatggcatgatccacttgtgtatctacgccgtgagtgctatcacaaaggatgcagaggtaactatagcatttgattatgagtattccaactgcaattacaaagtggattgcgcctgtcataaaggcaaccgtaactgccccatacagaagagaaatcccaatgctaccgaacttcccctgctccccccaccaccgtctcttccaactattggggcggagactagaagaaggaaagcacgcagaaaagaattggaaatggaacagcagaatgaagctagtgaggagaataacgaccagcaaagtcaggaggttcccgagaaagtgacagtgtcttccgatcacgaagaggtggataaccccgaggaaaagccggaagaagagaaggaggaggtgatcgacgatcaagagaatctggcccattctagacgcactagagaggatcgcaaagtcgaggctataatgcacgcttttgagaacctggagaaaaggaagaagaggagagatcagcccttagaacagtccaacagcgatgttgaaatcacgaccaccacttctgagacgccagtaggtgaggagaccaagacagaagccccggaaagcgaggtaagcaactcagtgtccaacgtgaccattccttcgaccccacagtctgtgggtgtgaatacgaggagatcatctcaggcgggtgacatcgccgctgagaaactggttcctaaacctcctccagccaagccttccagaccacgcccaaaatctcgcatatcacgttacagaaccagctctgcccaacgcctgaagcgccaaaagcaggccaatgcacaacaggctgagctgtctcaggcggcattggaggaaggtggctccaactcactggtcacgcctacagaggctggcagcctcgacagcagtggagagaatagaccccttacaggtagtgatcctaccgtggtctcgatcaccggctcccatgtgaaccgcgccgcctccaagtacccaaagacgaaaaagtatctggttactgaatggctcaatgataaagcagaaaaacaagaatgccccgtggagtgcccgctgaggattacgactgaccctactgtcctagccaccaccctcaatatgctccctggtcttatccatagcccattaatctgcaccaccccaaaacattacattcgatttggaagcccttttattcccgaaaggaggaggcggcccctgctgccagacggtaccttttcctcttgcaagaaacgttggatcaagcaggctctggaagaggggatgactcaaacgtcctccgtgccacaggaaactcgcacccagcatctgtatcaatccaacgaaaattcctcttcctcctccatctgtaaagataacgccgacctactctcccccctgaaaaaatggaagtctcggtacctcatggagcaaaatgtgacaaagctgctacgcccgctctcccccgtcacccctcctcctcctaactctggatctaagtcgccccagctggcaacacctgggtcttcccaccctggagaggaggagtgtcggaatggatattccctgatgttctcccccgtgacatccctcactactgcgagcaggtgcaacacgcccctccagttcgagctgtgccacaggaaggacctagatctggccaaagtcggatacctggattccaacaccaacagctgtgccgatcgaccgtccctgcttaatagcgggcactcagatctggccccacacccaagcctcgggccgacgagcgaaacgggctttccctccaggtcaggcgacgggcaccagaccctcgtgcgcaattctgatcaagctttccgcacggagttcaatctaatgtacgcttatagccctctgaacgcaatgcctcgagccgacgggctctacagggggtctcctctggttggggaccgcaagcccctccatctcgacggaggatattgcagtcccgctgaaggcttcagctcacggtatgaacatgggctgatgaaagatttgagtaggggatcattgagccctggaggggagagagcttgcgagggcgtgcctagcgctccccagaatccccctcagaggaaaaaagtatctcttctggaataccgcaaacgaaagcaggaagcaaaggaaaatagcgctgggggcgggggtgattccgcccaatccaagagcaagtcagcaggagcaggtcaaggttcgagcaattcggtatctgacacaggggcacacggcgtgcaagggagctctgccaggaccccatcgtctccccacaaaaaattttcaccgtctcatagctctatgtctcatctggaagctgtgtcccccagtgattcaagagggacaagttcatcgcattgtaggccccaggagaatatctcctcgcggtggatggttcccacaagtgtagagcggctgagagagggcggctccataccaaaagtgctcagatctagtgtgcgggttgcacagaaaggagaaccatcgccaacctgggaaagtaacattacagagaaggacagcgaccccgctgacggagaggggcctgagaccttgtccagtgccctttccaagggcgcgaccgtatacagcccgtccaggtactcctatcagctgctccagtgcgacagcccccgtacagaatcccagtccttacttcagcagtcttcttcccccttcaggggccatccaacccagtcccccggttacagctacaggacaacagcgctgagacctgggaaccccccaagtcatggctcctcagagagttccctctctagtacctcatactcaagccctgcacacccagtttcgaccgacagtctggcaccttttaccggaacacccgggtacttcagctcacagccgcacagcgggaacagcaccggctcaaatttaccccgtcgaagctgccccagttcagccgcaagtcccaccctgcaagggccgtcagactctcccaccagcgactcggtgtcacagtcatccaccgggactctgagctccacgagcttccctcagaacagccgatcatccctgcctagcgatttgcggactatctctctgccctctgcaggacagagcgccgtataccaagccagtcgagtatctgccgtgtctaattcccagcattacccacataggggttctggtggggtgcatcagtacagactgcagccccttcaagggagcggcgttaagacgcagacaggattgtcttag

SEQ ID NO: 111160 - DNA, 4035 bp, Artificial Sequence
  derived and/or modified sequence
atgagccggggcaaggtgatccggctgcacaggaggaagcaggacaacatcagcggcggggacagcagcgccacagagagctgggatgaggagctgagccccagcacagtgctgtacacagccacccagcacacccccaccagcatcaccctgactgtgcggaggaccaagcccaagaagaggaagaagagccctgagaagggccgggccgcccccaagaccaagaagatcaaggccttccgggagggcagcaggaagagcctgaggatgaagaacagccccagcgaggcccagaacctggatgagaacaccacagagggctgggagaaccgcatccggctgtggacagaccagtatgaggaggccttcaccaaccagtacagcgcagatgtgcagaatgccctggagcagcacctgcacagcagcaaggagtttgtgggcaagcccaccatcctggacaccatcaacaagacagagctggcctgcaacaacacagtgattggcagccagatgcagctgcagctgggccgggtgaccagggtgcagaagcacaggaagatcctgcgggccgcccgggacctggccctggacaccctcatcatcgagtaccggggcaaggtgatgctgcggcagcagtttgaggtgaatggccacttcttcaagaagccctacccctttgtgctcttctacagcaagttcaacggggtggagatgtgtgtggatgcccggacctttggaaatgatgcccgcttcatcagaagaagctgcaccccaaatgctgaggtgcgccacatgattgctgatggcatgatccacctgtgcatctatgctgtgtctgccatcaccaaggatgctgaggtgaccatcgcctttgattatgagtacagcaactgcaactacaaggtggactgtgcctgccacaagggcaacagaaactgccccatccagaagaggaaccccaatgccacagagctgcccctgctgcccccaccacccagcctgcccaccatcggggctgagaccaggaggaggaaggcccggaggaaggagctggagatggagcagcagaatgaggccagcgaggagaacaatgaccagcagagccaggaggtgcctgagaaggtgacagtgtccagtgaccacgaggaggtggacaaccctgaggagaagccagaggaggagaaggaggaggtgattgatgaccaggagaacctggcccacagcaggaggacccgggaggacaggaaggtggaggccatcatgcacgcctttgagaacctggagaagaggaagaagagaagagaccagcccctggagcagagcaacagtgatgtggagatcaccaccaccaccagcgagacccctgtgggggaggagaccaagacagaggcccctgagagcgaggtgagcaacagcgtgtccaatgtgaccatccccagcaccccccagagcgtgggcgtgaacacccggcgcagcagccaggccggggacattgctgctgagaagctggtgcccaagcccccaccagccaagcccagccggccccggcccaagagccgcatcagccgctaccgcaccagcagcgcccagaggctgaagaggcagaagcaggccaatgcccagcaggccgagctgagccaggccgccctggaggagggcggcagcaacagcctggtgacccccacagaggccggcagcctggacagcagcggggagaaccggcccctgactggaagtgaccccaccgtggtgtccatcaccggcagccacgtgaacagagctgccagcaagtaccccaagaccaagaagtacctggtgacagagtggctgaatgacaaggccgagaagcaggagtgccctgtggagtgccccctgcgcatcaccacagaccccaccgtgctggccaccaccctgaacatgctgcccggcctcatccacagccccctcatctgcaccacccccaagcactacatccgcttcggcagccccttcatccctgagaggagaagaagacccctgctgcctgatggcaccttcagcagctgcaagaagcgctggatcaagcaggccctggaggagggcatgacccagaccagctctgtgccccaggagaccaggacccagcacctgtaccagagcaatgaaaacagcagcagcagcagcatctgcaaggacaatgctgacctgctgagccccctgaagaagtggaagagccgctacctgatggagcagaatgtgaccaagctgctgcggcccctgagccctgtgaccccacctccacccaacagcggcagcaagagcccccagctggccaccccaggcagcagccaccctggagaggaggagtgcagaaatggctacagcctgatgttcagccctgtgaccagcctgaccacagccagccgctgcaacacccccctgcagtttgagctgtgccacaggaaggacctggacctggccaaggtgggctacctggacagcaacaccaacagctgtgccgaccggcccagcctgctgaacagcggccacagcgacctggccccccaccccagcctgggccccaccagcgagaccggcttccccagccgctctggagatggccaccagaccctggtgaggaacagcgaccaggccttcagaacagagttcaacctgatgtatgcctacagccccctgaatgccatgcccagggcagatggcctgtaccggggcagccccctggtgggggacaggaagcccctgcacctggatggcggctactgcagccctgctgagggcttcagcagccgctatgaacatggcctgatgaaggacctgagccggggcagcctgagccctggaggagagcgggcctgtgagggcgtgcccagcgccccccagaaccccccccagaggaagaaggtgtccctgctggagtacaggaagaggaagcaggaggccaaggagaacagcgctgggggcggcggggacagcgcccagagcaagagcaagtctgctggagctggccagggcagcagcaacagcgtgtctgacaccggggcccatggagtgcagggcagcagcgcccggacccccagcagcccccacaagaagttcagccccagccacagctccatgagccacctggaggccgtgagccccagcgacagccggggcaccagcagcagccactgccggccccaggagaacatcagcagccgctggatggtgcccacctctgtggagcggctgcgggagggcggcagcatccccaaggtgctgcggagctctgtgcgggtggcccagaagggggagcccagccccacctgggagagcaacatcacagagaaggacagcgaccctgcagatggagagggccctgagaccctgagcagcgccctgagcaaaggagccaccgtgtacagccccagccgctacagctaccagctgctgcagtgtgacagccccaggacagagagccagagcctgctgcagcagagcagcagccccttccggggccaccccacccagagccctggctacagctaccgcaccacagccctgcggcccggcaacccccccagccacggcagcagcgagagcagcctgagcagcaccagctacagcagccctgcccaccctgtgtccacagacagcctggcccccttcaccggcaccccaggctacttcagcagccagccccacagcggcaacagcacaggcagcaacctgcccaggaggagctgccccagcagcgctgccagccccaccctgcagggccccagcgacagccccaccagtgacagcgtgtcccagagcagcacaggcaccctgagcagcaccagcttcccccagaacagccgcagcagcctgcccagcgacctgcggaccatcagcctgcccagcgctggccagagcgctgtgtaccaggccagccgggtgtctgctgtgagcaacagccagcactacccccaccggggcagcggaggagtgcaccagtaccgcctgcagcccctgcagggcagcggcgtgaagacccagacaggcctgtcctag

SEQ ID NO: 111161 - DNA, 4035 bp, Artificial Sequence
  derived and/or modified sequence
atgagccggggcaaggtgatccggctgcaccggcggaagcaggacaatatttcaggcggggattcttcagcaacggaaagctgggatgaagaattaagtccctccaccgttctgtatactgccacccaacatactccaaccagtatcactctcactgtccgtcgcaccaagcccaagaaacgcaagaagtcccccgagaaagggagggccgccccaaagactaaaaagattaaagccttcagggagggcagtaggaaatcactgcgcatgaagaactccccatccgaagctcagaacctggacgagaacaccactgagggttgggagaacagaatccgtctttggacggatcagtatgaagaagctttcacaaaccagtattctgctgatgtccagaatgccttggaacagcatctgcactcaagcaaagagtttgtgggaaaaccaactattctggatactattaataagacggaattggcttgcaataatactgtgataggctcacagatgcagctgcaacttggcagagttacaagagtgcagaagcacagaaaaatcctgcgagccgcgagagacttggcccttgatactctcatcattgagtaccgaggaaaagtcatgcttagacagcagtttgaagtgaacggacacttcttcaagaagccgtatcccttcgtactgttttacagtaagtttaacggtgtagagatgtgtgtggacgcaaggaccttcggaaatgacgccaggttcattcgacgtagctgtaccccaaacgcggaagtgcgccatatgatcgcagatggcatgatccacctctgcatatatgctgtgtcagctattactaaggatgctgaggtgactattgcctttgactatgagtactctaattgtaattacaaggtggactgtgcttgccataaaggcaatcggaactgtcctattcaaaagcgaaaccccaatgccactgagttgccccttcttccccctcctccttcgctgccaacgatcggagctgagacaagacggaggaaggctcgaaggaaagagctggagatggaacagcagaacgaagcttcagaggagaataatgatcagcagtctcaggaagtgccagagaaggtcaccgtctcaagcgaccatgaagaggtcgacaatcccgaagagaaacctgaggaggaaaaagaggaagtgatagacgaccaggagaatctagctcacagccgacggacaagggaagacaggaaagtcgaggcaatcatgcatgcattcgaaaacctcgagaaaagaaaaaaacgccgggatcagccactagagcagtctaattctgacgtggagatcacaactacaaccagtgagacacccgtgggggaggaaaccaaaactgaggcccccgagtctgaggtgagcaacagcgtgagcaacgtgactatcccttccaccccgcagtctgttggcgttaatacccggcgctcttcgcaggctggagatattgccgccgagaagctcgtaccaaagccccccccagccaagcctagcaggcccaggcctaagagccgcatcagcaggtaccgcacttcctccgcacagagactgaaacgtcagaagcaggccaatgcccagcaggctgaattatctcaggccgctctcgaagagggcggaagcaattcactggtcaccccaacagaggcaggatcactagattcatcgggggaaaataggccactgacgggctccgatcctactgtcgtgagcattaccggttctcacgtaaatcgcgcagcgagtaagtaccccaagaccaagaagtacctggtcaccgaatggctcaatgataaagctgagaagcaggaatgtcctgtggagtgccctttacgtattaccaccgaccctacagtgcttgctactacactgaacatgctccccggtctcattcattccccactcatttgcactacacctaaacattatatcagattcggatccccattcatacctgagcgaagacggaggccccttctgccagatggaaccttctcttcctgcaaaaaacggtggataaaacaggctctggaggaaggaatgacacagacttccagcgtccctcaggagacaagaactcagcatttataccagtcaaacgagaacagctcctccagtagtatctgcaaggacaatgctgacctccttagcccgctcaagaagtggaagagtcgttacctgatggagcagaatgtgaccaaactgctgcgcccactgagccccgtgaccccaccccctcctaattctggctcaaaatcaccacagctggctactcccgggtcaagccatccaggcgaagaggagtgccgtaacggctattccctcatgttttcccccgtgacgtccctgacaaccgcgagcagatgcaacacaccccttcaatttgaattgtgccacaggaaagatctggatctcgccaaggtcggctacctcgatagtaacaccaactcctgtgcagaccgccccagcttgttgaactcaggacactcagacctggcaccacaccccagcctgggccccacctcagaaaccgggtttcccagccgctcaggtgacgggcaccagactctggtgcgaaactctgaccaggccttccggaccgaatttaaccttatgtacgcatatagcccattgaatgccatgcccagagccgacggactgtataggggctccccgttagtaggcgaccggaagcccctgcatctagatgggggatattgttctcctgctgaaggttttagttccaggtatgagcacggcctcatgaaggatctctcccgcggcagtctgagtcctggtggggaaagggcttgtgaaggggtccccagcgcaccgcagaatcctccgcagcgaaagaaagtttcactgctggaatatagaaagcggaaacaagaagccaaggagaatagtgcgggcggtggcggcgactccgcacagtccaagagtaagagcgccggcgccggtcagggatccagtaacagcgtttctgacacaggagcccacggtgtgcaaggcagtagcgcacgcacacccagtagcccgcataaaaagttcagcccttcacacagcagcatgagccacctcgaggccgttagcccctctgattcccgaggcacctcgagcagccattgccgcccacaagagaacatttcttctcgctggatggtgccaacatcagtggagagactgcgcgagggcggatcaatccctaaggtacttcggagctcagtacgcgtggcccaaaagggagaaccctcacctacgtgggaatccaacatcacagaaaaggacagcgaccccgccgacggcgagggccctgagacgcttagttcagcgttaagtaagggagcaaccgtgtactcacctagtcgctatagctatcaacttctacagtgcgattcgccccgtacagagtcccagtccttattgcagcagagctcctctccattccgaggtcacccaacacagtcaccggggtacagttaccgcaccacagctttgcgcccaggaaatccgccctcccacggctcctccgaaagctcgctgtcttctacaagctattccagcccggcacaccctgtgtcaaccgatagcctggcgcccttcaccggtacccctggttacttttctagccagccgcactcaggaaacagtaccgggagcaatctcccacggcggagctgtcccagctcagccgctagcccaacgcttcagggaccatccgattccccaacttccgattctgtgtcacaatctagcaccgggaccttatcctctacttcttttccccagaatagccgaagcagcctaccttcagacctgcgaacaatttcacttccttctgcaggccagtctgctgtctaccaggcatcacgagtaagcgccgtcagcaattcccaacactacccccataggggatccggaggcgtccaccagtataggctccaaccactccaggggtcgggagtcaaaactcagaccggactgtcgtag

SEQ ID NO: 111162 - DNA, 4035 bp, Artificial Sequence
  derived and/or modified sequence
atgagccggggcaaggtgatccggctgcaccggcggaagcaggacaatatttcgggaggggactcctccgctaccgaatcttgggatgaggagttatccccttctaccgtcctgtacaccgcgactcagcacactcctacgtcaattactctgaccgtgaggcggactaagcccaagaaaaggaagaaaagccccgagaaaggaagggccgctccaaagactaagaagatcaaggccttccgagaaggaagtcggaagtcactccggatgaagaacagcccgtccgaagcccaaaatctggatgaaaacaccaccgaaggctgggaaaaccggattcgattatggacagaccagtacgaggaagccttcaccaaccagtattctgcggacgtgcagaacgcgctggagcagcatctgcattcatctaaggaattcgtgggcaagccgaccatcttagacaccatcaataagactgaactggcctgtaataatacggtcatcggctcacaaatgcagctgcaacttggacgggtgacacgcgtgcagaagcacaggaagatccttagagccgcccgggatctcgctctggatacacttatcatagaataccggggcaaagtcatgctccgccagcagttcgaagttaatggacacttttttaagaagccatacccattcgtcctcttctatagcaaatttaacggagtggagatgtgcgtagatgccaggacctttggcaatgacgcacgctttattaggcggtcctgtacccccaacgccgaggtcaggcacatgattgctgatggaatgatacacttgtgcatctacgccgtatctgccatcactaaggacgcggaggtaaccattgcttttgactacgaatactctaactgcaactacaaggtggattgcgcctgccataaaggcaatagaaattgccccatccagaagcgcaaccctaatgcaactgagctgccgctcctaccacctcctccctcacttccaaccatcggagccgagaccagacgtagaaaggcacgaagaaaagagctggagatggaacagcagaacgaagcttctgaagaaaacaatgaccagcagagccaagaggtccctgaaaaagtgacagtcagtagcgaccatgaagaagttgataatccagaagagaagccggaagaagagaaggaggaagtgatcgatgaccaggagaacctggcgcatagtaggcggacaagagaggaccggaaggtggaagccattatgcacgcttttgagaacctggagaaaagaaaaaaaaggcgtgatcagcccctagaacagtcgaacagtgatgttgaaattaccactacaacaagtgagacacccgtaggagaagaaaccaagaccgaagctcccgaatctgaagtttcaaatagtgtgtctaacgtcaccattccttccaccccgcagtctgtgggggtcaacaccagacgctcatcgcaggctggggacattgccgctgaaaagctcgtacccaagccacccccagctaagccttcgaggccccgtccaaagagtaggatctcccggtaccgaacttcatccgcacagcgcctgaagcgacagaagcaggcaaacgctcagcaggccgagctatcacaggccgctctggaggaaggaggatccaattctctggtgacccctaccgaggccggatctttggattcctccggggagaaccgtcccctgacaggctccgatccaaccgtggttagtataacaggaagtcatgtgaaccgcgccgcttcaaaatatccaaaaacaaagaagtatctggtaaccgaatggctcaatgacaaggcagagaaacaagaatgcccggtcgagtgtcccttaaggatcacaacagatcctacagtgttggctaccactctgaacatgctgcccggtttgattcacagtccgctcatctgtactacacctaagcattatatcagatttgggtcaccttttatccccgaacggcgtaggcgccctctccttccagacggtacattttccagctgcaagaagcgttggattaaacaggcactggaagagggaatgacccagacctctagcgtcccccaggagactaggacacagcatctctaccagagcaacgagaactccagctctagttctatatgtaaggacaatgcagatctgctaagtcccctgaagaagtggaagtcccggtatctgatggagcagaatgtgacgaaattgctgaggcccctaagcccagtcactcccccgcctcccaattcaggttctaagtcaccacagctggccacacccggaagctcccatcctggggaggaagaatgccggaacgggtattccctcatgttctcccctgtgacttcacttaccacagcctccaggtgcaacaccccactccagtttgagctgtgccatcgtaaagatctggacctcgcgaaggttggctatctggattcaaacaccaattcctgcgcagatcgcccctcactgctgaacagtggccattctgacttggcgccccacccctccttggggcctacatctgagaccgggtttcctagcaggagcggcgacggccaccagacactagtgagaaacagtgatcaggccttccggaccgaattcaatctgatgtacgcttattctcccctgaacgctatgccccgggccgatggcctgtaccgagggtcccctcttgttggtgatcggaagcccctacacctagatggcggatattgctcacccgcggaaggattttcaagcaggtatgagcacggcttaatgaaagacctgagccggggatcgctcagcccggggggagaacgagcttgtgagggcgtgccgagcgcacctcaaaacccaccccaaaggaagaaagtctcgcttttagagtacaggaaacgaaagcaggaagccaaggagaactccgcagggggtggaggggactccgcccagagtaagtctaaaagcgccggggccggacagggttccagcaactcagtctcagatactggcgctcatggtgttcagggttcatcggccagaacacctagctctcctcacaaaaagtttagcccatcacattcctccatgtcccatctcgaggccgtgtcaccgtcagactctcggggaacgtccagttcccactgcaggccacaggaaaacatctcctccagatggatggtgcccactagcgtggaaaggttgcgagaaggaggaagcattcctaaggtcctgaggagttcagtgagagttgctcagaaaggggagccaagccctacctgggaatctaacataacagagaaggactcagatccggccgacggggaaggccccgagactctatccagcgcgctcagcaagggagcaaccgtgtatagtccatctaggtacagctaccagctgctccaatgcgactcgccaagaacagaaagtcagagcctgctccagcagtctagctctccatttcgaggacatcccacacagtctcctgggtacagctatcggacaacggccctgcgtcccgggaacccgccttcccacggttcctcagagtcctcactatcatccacctcctattcaagtcctgctcaccccgtctcgaccgactccctcgcaccattcaccgggacccctggatacttctctagtcaaccgcacagcggcaattccacgggatctaacctgcctcggcgcagctgcccctcctccgccgcatcacccactctgcagggaccgagcgattcaccaacctctgactctgtgagccagagctcaaccggcactctgtctagcaccagtttcccccagaactcccgttcctcattaccttcagacctaaggacaatcagcctaccttccgcagggcagagtgcagtgtaccaggcaagccgggtgagtgcagtaagcaattctcaacattatccacacaggggtagcgggggtgtccatcagtaccgactgcagccattgcaggggtctggagtcaaaactcagaccggcctatcatag

SEQ ID NO: 111163 - DNA, 4035 bp, Artificial Sequence
  derived and/or modified sequence
atgagtagaggaaaggtgattaggctgcatcgtaggaagcaagataacatttctgggggtgactcgtctgccacggaatcctgggatgaggagctgtcaccgtctaccgtactttataccgccacacagcataccccaacaagcatcactctgacagtccgtcggacaaagcccaaaaagaggaagaaaagcccagagaaaggtcgagctgccccaaaaactaaaaaaataaaggcattccgcgagggctctagaaaatcactgaggatgaagaatagtccatccgaggctcagaacctggacgaaaacacgaccgaagggtgggagaatcgtattagactttggacagatcagtatgaggaagcttttacaaaccagtactctgcagatgtgcagaatgccctggaacagcacctacacagcagtaaggaatttgtgggaaagccaacaatcttagataccataaataaaacagaactcgcatgcaataataccgtcatcgggtctcagatgcagctacaactgggtcgagtgactagagtgcagaagcaccggaagatccttcgcgctgcccgagaccttgccctcgacaccctgattattgagtatcgcggaaaagtgatgttgcggcaacaatttgaggttaacggccatttcttcaaaaaaccatacccattcgtgttgttctattccaagttcaatggggtggagatgtgtgtggatgctagaacgttcggcaacgacgctcgatttattagacgctcttgcaccccaaacgccgaagtacgccacatgatagccgatggcatgatccatctgtgtatttacgctgtctcagcaataacaaaagatgctgaggtgaccatagcctttgactatgaatactccaactgtaactataaggtggactgcgcctgccataagggcaatcggaactgccccatacagaagcggaatcccaacgccacagagcttccattactgccccctccgcctagtctccccacaatcggggcagaaacccgaagaagaaaggcgaggcgaaaagagttagaaatggagcagcagaacgaggccagcgaagaaaataatgatcagcaatctcaggaggttcctgaaaaggtgactgtgagcagcgaccatgaggaagtggacaatccggaggaaaagcctgaggaggagaaagaagaggtgatagatgatcaggagaacctcgcccattctaggcggacccgagaagacaggaaagtagaagctataatgcatgccttcgagaacctagaaaagagaaagaaacgcagggatcagccgcttgagcagagcaactcagacgtcgaaatcacaaccaccactagcgagactcccgtcggcgaagaaactaaaacagaggcccctgaatctgaggtaagtaactcggtatctaacgtcactataccatcaacaccccaaagcgttggtgtgaatacccggaggagctcacaagcaggagacattgcagccgaaaaactcgtgccgaagccgccaccagccaaaccatcacgcccacgacccaagtctcgcatctcaaggtacaggacaagctctgctcaaaggttaaagcgacaaaagcaggcgaatgcccaacaggctgaactaagtcaagctgcactggaagagggcggttccaatagcctggtaactccgacagaggcagggtcactagacagttcaggcgaaaatagaccacttaccggttcggatccaacagtcgtctctattaccggtagccacgtcaatagagccgcttccaagtacccaaagacgaagaaatatcttgttacggaatggttgaatgataaagccgaaaaacaagaatgcccagtggaatgtcccctgcggattacaaccgaccccacggtcctagctacaacgctgaatatgctgccaggtctcattcacagtccattaatatgcaccacccccaagcattatattaggttcgggtctccttttatcccagagcggcgaaggcggcctctgctgccagatggtaccttcagttcatgtaaaaagcgatggatcaagcaagccttggaggaagggatgactcagacctctagcgtgccccaggagacacgaacacagcatctctaccagagcaatgagaacagctcatccagcagcatttgcaaggacaatgcagacctcctaagcccccttaagaaatggaagagtcgctacctgatggagcaaaacgtgaccaagttactgcgcccactgtctcctgtgactccaccacccccaaattcagggagcaagagtccccagctggccaccccaggctctagccatcctggagaggaagaatgccgaaacggctactccctaatgtttagtcctgtgacttctttaacgaccgcgtcccgttgtaacactcctttgcagttcgagctgtgccaccgcaaagacctggatttggcaaaggtgggataccttgattctaacactaattcttgtgctgaccgtccttcccttttgaactcaggacactccgatttagctccacatccaagtctcggaccaaccagtgaaacgggattcccctcaagaagtggcgacggtcaccagacattggtgcgtaactccgatcaggccttcagaacggagtttaatctgatgtatgcatactctcccctcaacgccatgcccagagccgatggactataccgaggaagccctttggtgggggacaggaagcctctccatttagatggaggttattgcagtccggctgaaggattctcttccagatatgaacacggcctcatgaaagacctgtccagggggtcactgtcaccaggcggagaaagggcttgcgaaggtgtaccgtctgcacctcaaaaccccccacagagaaagaaggtttctctgctagaatatcgaaaacggaagcaggaggctaaagagaacagcgcgggtggcggtggcgattctgcacaatctaaatccaagtcggcaggagccggacaggggagttccaactctgtctccgatacaggcgctcacggggtccaggggagttccgctaggaccccaagcagccctcacaaaaaattctctccctcccacagctcaatgtcgcacctggaggccgtgagcccgtccgattcaaggggcacttcctctagtcactgtcggccacaggaaaacataagttctaggtggatggtgcccacctccgttgagaggctgcgagaggggggatcaataccgaaggtcctgcgatcttcagtgagggttgcccagaagggtgaaccttcgccgacctgggagagcaatattactgagaaggactcggaccctgcagacggtgaagggcctgaaaccctttctagcgctctttccaagggggcaacggtatattcgccatcacgctattcataccagctgctgcagtgcgattcgccgcgtacagaatcccaaagcttgctgcagcagagcagctccccttttcgcggacacccgacgcaatcacctggctatagctaccgaacaaccgcccttcgtcctggcaaccctcctagccacggctcctctgagtccagcctgtctagcacgtcgtacagttcacctgctcatcctgtgtcaacggattccctggccccttttacaggaacacctggttacttttcatctcaaccccactcgggaaatagcaccgggagtaatctgccacgtaggtcttgcccgtcttctgcagcatcgcccaccctccaggggccttccgattcaccaacgtctgacagtgtttcccagagcagcacggggaccttaagttctacctctttcccgcagaactcccggtctagtcttccatccgacctgcggaccatcagcctgccctctgctgggcaatccgccgtttatcaggccagccgggtctcggctgtcagtaacagtcaacactatccgcaccgcggatcaggaggggttcaccagtataggctacagcctctccagggttctggtgtgaaaactcagaccggccttagctag

SEQ ID NO: 111164 - DNA, 4035 bp, Artificial Sequence
  derived and/or modified sequence
atgtctaggggcaaggtaatacgactgcacagaaggaagcaggacaacatatcaggaggtgacagtagcgcaaccgagagttgggacgaggaactcagcccttccactgtgctttacaccgctacacagcacaccccaacatccatcacacttactgtcagacggaccaagccaaagaaacgtaagaaaagcccggagaagggaagagccgctcctaagaccaaaaagattaaagccttccgggaaggcagtaggaagtcgctgcggatgaaaaattcgccaagcgaggcccagaacctggatgaaaatacaaccgagggatgggagaataggatcagactgtggaccgatcaatacgaggaggcctttacaaaccagtatagcgcagacgttcagaatgctctcgaacaacatctgcacagttccaaggagtttgttgggaaaccaactatactagacaccataaataagacggagttggcttgtaacaacaccgtgatcggtagtcaaatgcagttacaactgggacgggttacacgggtgcagaaacatcgcaaaattctgcgagccgcaagggatctggctctggataccctgatcattgagtaccggggtaaggtaatgcttcggcaacagtttgaagtgaatggacacttctttaaaaaaccttacccatttgtcttattttacagcaagtttaacggcgtggagatgtgtgtggatgcacgcacatttggtaatgatgctcgattcatccggaggtcatgcacacccaacgccgaagtgcgccatatgattgccgatggaatgattcacctctgcatctacgccgtatccgcgatcacaaaagatgccgaagtaacaattgccttcgactacgaatactccaattgcaattacaaagttgattgtgcctgccacaaaggtaatagaaattgccctattcagaagcggaatccgaatgctactgaactcccattgctcccgcctcctccatcactgccgaccattggggctgagacccgccgaagaaaggcaaggcgtaaggaacttgagatggaacagcagaatgaagcatccgaagaaaataacgaccagcagtcgcaagaggtgcctgagaaggtcaccgtgagttcagaccatgaggaggtcgacaatcctgaggaaaagcccgaagaggagaaggaggaagtgatcgatgaccaggagaacctggcacattcccgtcggacccgggaggacaggaaggtcgaggcaatcatgcacgcctttgaaaatctggagaaaaggaagaagagaagggaccaaccactggagcagagtaactccgacgtcgaaatcacaactacaacttctgagaccccagtgggtgaggagaccaagacagaggcacccgaaagtgaggtgagcaattccgtgtctaacgtgacaatcccatcgaccccccagtccgtgggggtgaatactcggagaagcagccaagccggagatatcgctgcagagaagctggtgcccaagccccctccggctaagccttccaggcccaggcctaaaagccgcatatctcgatatcgaacatcaagcgctcagagattaaaaagacagaagcaagccaatgctcagcaagctgaactatcccaggcagccctcgaagaaggcggtagcaactcccttgtgacgcccactgaggccggaagtctggattcttcaggggaaaaccgccctctaaccgggtcggatccaaccgttgtgtccatcactggctcccatgtcaatcgggcagcaagcaaatatcccaagacaaagaagtatttggttacagaatggctgaatgacaaagcggaaaaacaggagtgcccggtggagtgtccgctgcgaattaccacagacccaaccgttctcgccaccactctaaacatgctgccaggtttgatccactcccccctgatttgtacgacaccaaagcattacatccgttttggttcaccattcatcccggagagacgccgacgcccactgctccccgacggtacattctcatcctgcaagaagaggtggattaaacaagccttagaagagggcatgactcagacctccagtgtgcctcaagaaactcgcactcagcatctataccagagtaacgaaaattccagctctagtagcatatgcaaagacaacgctgatttgctcagtcctttaaaaaaatggaaatctcgctacttgatggaacagaacgtgacaaaactgcttagaccgcttagccctgtgacaccccctcccccaaactctgggagcaaatctccccagttggccaccccgggaagctcccatcccggtgaggaggagtgtcgcaatggctatagcctgatgttttctcctgtgacctctcttaccacagcctctcgctgcaatactcctctccagtttgagctgtgccatcgaaaagacttggacttggccaaggtgggttacctggacagtaacaccaattcgtgtgcggataggccatccctgttaaatagcgggcacagcgatctcgcccctcacccatccttggggcctacctccgagaccggttttccatcaagatccggcgacggacaccagactcttgtgcgaaactctgatcaggccttccggactgagttcaacttgatgtatgcgtactcacccctgaatgcaatgcctcgagcagatggcttataccgcggttcacccctagtcggtgatcgcaaacccctacacctggatggcggttactgctctcctgctgaggggttctccagccgctatgaacacgggctgatgaaagatctgtctaggggcagcctgtcgccaggcggtgaacgagcatgtgaaggagtgcccagcgctccccagaaccccccacaaagaaaaaaagtgtcactcttggaatataggaagagaaaacaggaggcaaaagaaaactcagcaggaggcggtggggattccgcgcagtccaagtccaagtccgcaggggcaggacagggttcgagcaatagtgtgagcgacacaggagcgcatggggttcagggcagtagcgcaaggacccccagcagcccacataagaaattctctcctagtcactcttccatgtcacatctcgaggccgtgtcaccaagtgacagccggggaaccagttcaagtcactgtagacctcaagagaatatctcatctcggtggatggtgcccaccagcgtggagagattgcgagaaggaggcagcatcccaaaagtgctgaggtccagtgtgagagtcgctcagaaaggggaaccgtcacccacttgggagagcaatatcactgaaaaggacagcgatcctgctgatggagaaggtccagaaaccctgtcatctgctctgagcaaaggagccacggtgtattccccttcacggtacagttatcagttactgcaatgcgactccccacgaactgagagtcagagtctgctccagcaaagctccagcccgtttcggggacatcccactcagagccccggatactcttacaggaccaccgcactgaggccaggcaacccccctagccatggcagttctgagtcatctctatcctctaccagctatagctctcccgctcatcccgtctctaccgactcattagcccctttcacagggactcctgggtactttagctctcagccgcattctggcaattcaaccgggtctaacctgccacgtcggtcctgtcctagctctgctgcgtctcctaccctgcaggggccttccgacagccccacgagcgatagcgtgtctcaatcgtctaccggaaccctttctagcacaagtttcccccagaactctaggagctccttgccaagcgatctccgcaccatatcacttccaagtgctgggcagagcgctgtctaccaggcttcacgagtctctgcagttagtaacagccagcattatccccaccggggttctgggggtgtccatcagtaccgactacaacccctgcagggctctggggtgaagactcagacaggtcttagttag

SEQ ID NO: 111165 - protein, 201 aa, Artificial Sequence
  derived and/or modified sequence
MASRGATRPNGPNTGNKICQFKLVLLGESAVGKSSLVLRFVKGQFHEFQESTIGVKFEIWDTAGQERYHSLAPMYYRGAQAAIVVYDITNEESFARAKNWVKELQRQASPNIVIALSGNKADLANKRAVDFQEAQSYADDNSLLFMETSAKTSMNVNEIFMAIAKKLPKNEPQNPGANSARGRGVDLTEPTQPTRNQCCSN

SEQ ID NO: 111166 - DNA, 606 bp, Artificial Sequence
  derived and/or modified sequence
atggcctcccgaggcgccacacgacccaatggtcccaatacaggaaataaaatttgtcagtttaaactggtcctcctgggagaatccgcagtgggaaagtccagtttagtcctgcggttcgtaaaggggcagttccacgaattccaggaaagcacaataggggtgaagtttgaaatctgggacaccgctggccaagagcggtaccatagtctcgctccaatgtactacagaggagcgcaggcggccattgtcgtgtatgatattacaaacgaagaaagcttcgccagggcgaaaaactgggtcaaagaactgcaacgccaggcttcacccaacatcgttatcgctctgagcggcaacaaagccgacctcgctaataagagagctgtcgacttccaagaggcccagtcctatgccgacgacaacagcctgctctttatggagacctctgcaaagacgagcatgaacgtgaatgagatttttatggccatagctaagaaattgcctaagaacgagccccagaacccgggagcaaatagtgcgagaggcagaggtgtggatttgactgaaccgacccaaccaacccgaaaccagtgctgttcgaattag

SEQ ID NO: 111167 - DNA, 48 bp, Artificial Sequence
  derived and/or modified sequence
atggcctcccgcggggcaacccgcccaaacggtcccaacacagggtag

SEQ ID NO: 111168 - DNA, 606 bp, Artificial Sequence
  derived and/or modified sequence
atggccagcagaggagccacccggcccaacggccccaacacaggcaacaagatctgccagttcaagctggtgctgctgggggagagcgctgtgggcaagagcagcctggtgctgcgctttgtgaagggccagttccacgagttccaggagagcaccatcggcgtgaagtttgagatctgggacacagctggccaggagcgctaccacagcctggcccccatgtactacagaggagcccaggccgccatcgtggtgtatgacatcaccaatgaggagagctttgcccgggccaagaactgggtgaaggagctgcagaggcaggccagccccaacatcgtcatcgccctgagcggcaacaaggctgacctggccaacaagagagctgtggacttccaggaggcccagagctatgcagatgacaacagcctgctcttcatggagaccagcgccaagacctccatgaatgtgaatgagatcttcatggccatcgccaagaagctgcccaagaatgagccccagaaccctggggccaacagcgcccggggccggggcgtggacctgacagagcccacccagcccaccaggaaccagtgctgcagcaactag

SEQ ID NO: 111169 - DNA, 48 bp, Artificial Sequence
  derived and/or modified sequence
atggccagcagaggagccacccggcccaacggccccaacacaggatag

SEQ ID NO: 111170 - DNA, 606 bp, Artificial Sequence
  derived and/or modified sequence
atggccagccggggcgccacccggcccaacggccccaacaccggcaacaagatctgccaattcaaactggttctcctcggtgaatctgctgtcggcaaatcatccctcgtgctgcggtttgtaaagggtcagttccacgaatttcaggaatctaccataggagtcaagtttgagatctgggacaccgctgggcaggagcggtatcacagcttagctcccatgtactatagaggggcccaggcagcaatcgtggtgtatgacatcaccaatgaagagagtttcgcccgggcgaaaaattgggttaaggagttacaacggcaggcctccccaaatatagtcattgccctctccggtaacaaagccgacctcgccaataagcgggctgtggattttcaggaggcccagagctacgctgacgacaactccttgctgtttatggagacatctgccaaaactagtatgaacgttaacgaaatcttcatggcgattgctaagaagctcccgaaaaacgaaccacagaatcctggtgccaacagtgccaggggtaggggtgtggatctgactgaacctacacagccgacacggaaccagtgctgttccaattag

SEQ ID NO: 111171 - DNA, 48 bp, Artificial Sequence
  derived and/or modified sequence
atggccagccggggcgccacccggcccaacggccccaacaccggctag

SEQ ID NO: 111172 - DNA, 606 bp, Artificial Sequence
  derived and/or modified sequence
atggctagccgaggagcaacaagaccaaacggtccgaataccggcaataagatctgccagttcaaattggtgctcttaggcgagtctgccgtgggcaaatcttctctggtattaagatttgtgaagggccagtttcatgaatttcaggaatccactatcggcgtgaagttcgagatctgggatacagccggacaggagaggtaccatagtttagcacccatgtattatcgcggagcccaggctgcgatcgtcgtgtacgacatcaccaatgaagaatcatttgcccgtgctaagaactgggtcaaagagttgcagagacaggccagtccaaacatcgtaatcgcactatcaggaaacaaagccgacctcgccaacaagcgagctgtcgatttccaggaagcacaatcctatgcagacgataattcattgttgtttatggagacctcggcgaagacctccatgaacgttaacgagatctttatggccattgccaaaaagctcccgaaaaacgaaccccagaatccaggggcaaattccgccaggggccgtggggtcgacctcacagaaccgactcagccgacccggaatcagtgctgttctaattag

SEQ ID NO: 111173 - DNA, 48 bp, Artificial Sequence
  derived and/or modified sequence
atggcatctagaggagctacaaggcccaatggaccaaacacaggctag

SEQ ID NO: 111174 - DNA, 1443 bp, Artificial Sequence
  derived and/or modified sequence
aggcgacgccgccgccgccaccaccaccgccatagatacactctcatcctacgggccacgcctgggccttgctgccaggaagcttcggccccgcagctcggcttgctgcggtctcaggtttctttacctccagaaagaagaatattggccccttgaattctggaagttcattgaagagtctgaaattagggacttatttcaaatttggacatggctagtcgaggcgcaacaagacccaacgggccaaatacgggaaataaaatatgccagttcaaactagtacttctgggagagtccgctgttggcaaatcaagcctagtgcttcgttttgtgaaaggccaatttcatgaatttcaagagagtaccattggggtaaagtttgaaatatgggatacagctggtcaagaacgataccatagcctagcaccaatgtactacagaggagcacaagcagccatagttgtatatgatatcacaaatgaggagtcctttgcaagagcaaaaaattgggttaaagaacttcagaggcaagcaagtcctaacattgtaatagctttatcgggaaacaaggccgacctagcaaataaaagagcagtagatttccaggaagcacagtcctatgcagatgacaatagtttattattcatggagacatccgctaaaacatcaatgaatgtaaatgaaatattcatggcaatagctaaaaaattgccaaagaatgaaccacaaaatccaggagcaaattctgccagaggaagaggagtagaccttaccgaacccacacaaccaaccaggaatcagtgttgtagtaactaaacctctagtttgaactagctggaatagtcttctgcttcctaaatgttaataacaatggaattggagcatttaaccagcccagtatgacttccaaaagaagagacttatgatagagtcaagtttctaatacagaattattttaagtgttttgaacttaatttttaataacatgcatgggtccctctcactaatgtttcaacaatagggaaaaatgagaactatgtggacacttgtttcattggaaggttagggggaataatttctcatcactaggaatatagacaaatgactgtctgggcccacacagttaaccagcccatttctccacactggtacagtagtcacctgtgaaaaaaaaattggaacttactaatttgggcttttcaaaaacattctttgtttagaaggagattctaaagttatttatgatgcttagccatagtattcaggcaaatgttcatttctcctggtacctgtatttaaaatgtacattccacattttaataaattaaccacaagaaaataatcccacatatacaaggtcaggggtggggaagagtattaatggtatcttaattatacccagtctggttttttttttttaaatggggtaaaaatcaaatgcaa

SEQ ID NO: 111175 - DNA, 606 bp, Artificial Sequence
  derived and/or modified sequence
atggccagcagaggcgccaccagacccaacggccccaacaccggcaacaagatctgccagttcaagctggtgctgctgggcgagagcgccgtgggcaagagcagcctggtgctgagattcgtgaagggccagttccacgagttccaggagagcaccatcggcgtgaagttcgagatctgggacaccgccggccaggagagataccacagcctggcccccatgtactacagaggcgcccaggccgccatcgtggtgtacgacatcaccaacgaggagagcttcgccagagccaagaactgggtgaaggagctgcagagacaggccagccccaacatcgtgatcgccctgagcggcaacaaggccgacctggccaacaagagagccgtggacttccaggaggcccagagctacgccgacgacaacagcctgctgttcatggagaccagcgccaagaccagcatgaacgtgaacgagatcttcatggccatcgccaagaagctgcccaagaacgagccccagaaccccggcgccaacagcgccagaggcagaggcgtggacctgaccgagcccacccagcccaccagaaaccagtgctgcagcaactag

SEQ ID NO: 111176 - DNA, 48 bp, Artificial Sequence
  derived and/or modified sequence
atggccagcagaggcgccaccagacccaacggccccaacaccggctag

SEQ ID NO: 111177 - protein, 1508 aa, Artificial Sequence
  derived and/or modified sequence
MFPARGVPLHLEGEGVFPWGPGDVSLPYLSTSDVSFSVIVENVNCYSSGMICRKFISINVGNSLIVFDDDSGNPSPESFLDDKQEVHTWRVGFFTLVHFPQEHITLLWDQRTTVHVQAGPQWQGQLAGLCGNFDLKTINEMRTPENLELTNPQEFGSSWAAVECPDTLDPRDMCVLNPLREPFAKKECSILLSEVFEICHPVVDVTWFYSNCLTDTCGCSQGGDCECFCASVSAYAHQCCQHGVAVDWRTPRLCLLGKGPYQLSSLAAGGALVGMKAVGDDIVLVRTEDVAPADIVSFLLTAALYKAKAHDPDVVSLEAADRPNFFLHVTANGSLELAKWQGRDTFQQHASFLLHRGTRQAGLVALESLAKPSSFLYVSGAVLALRLYEHTEVFRRGTLFRLLDAKPSGAAYPICEWRYDACASPCFQTCRDPRAASCRDVPRVEGCVPVCPTPQVLDEVTQRCVYLEDCVEPAVWVPTEALGNETLPPSQGLPTPSDEEPQLSQESPRTPTHRPALTPAAPLTTALNPPVTATEEPVVSPGPTQTTLQQPLELTASQLPAGPTESPASKGVTASLLAIPHTPESSSLPVALQTPTPGMVSGAMETTRVTVIFAGSPNITVSSRSPPAPRFPLMTKAVTVRGHGSLPVRTTPPQPSLTASPSSRPVASPGAISRSPTSSGSHKAVLTPAVTKVISRTGVPQPTQAQSASSPSTPLTVAGTAAEQVPVSPLATRSLEIVLSTEKGEAGHSQPMGSPASPQPHPLPSAPPRPAQHTTMATRSPALPPETPAAASLSTATDGLAATPFMSLESTRPSQLLSGLPPDTSLPLAKVGTSAPVATPGPKASVITTPLQPQATTLPAQTLSPVLPFTPAAMTQAHPPTHIAPPAAGTAPGLLLGATLPTSGVLPVAEGTASMVSVVPRKSTTGKVAILSKQVSLPTSMYGSAEGGPTELTPATSHPLTPLVAEPEGAQAGTALPVPTSYALSRVSARTAPQDSMLVLLPQLAEAHGTSAGPHLAAEPVDEATTEPSGRSAPALSIVEGLAEALATTTEANTSTTCVPIAEQDCVRHICLEGQLIRVNQSQHCPQGAAPPRCGILGLAVRVGGDRCCPLWECACRCSIFPDLSFVTFDGSHVALFKEAIYILSQSPDEMLTVHVLDCKSANLGHLNWPPFCLVMLNMTHLAHQVTIDRFNRKVTVDLQPVWPPVSRYGFRIEDTGHMYMILTPSDIQIQWLHSSGLMIVEASKTSKAQGHGLCGICDGDAANDLTLKDGSVVGGAEDPAPFLDSWQVPSSLTSVGQTRFRPDSCATTDCSPCLRMVSNRTFSACHRFVPPESFCELWIRDTKYVQQPCVALTVYVAMCHKFHVCIEWRRSDYCPFLCSSDSTYQACVTACEPPKTCQDGILGPLDPEHCQVLGEGCVCSEGTILHRRHSALCIPEAKCACGDCPDSIPECQEGEALTVHRNTTELCCPLYQCVCENFRCPQVQCGLGTALVEVWSPDRCCPYKSCG

SEQ ID NO: 111178 - DNA, 189 bp, Artificial Sequence
  derived and/or modified sequence
atgctgcaggtggttcaggaaggcaacccggcaccatttatcatcaacaccgttaagcgcggtcggcgagatcgggagaggcaaagaactccctgggctcctcacccacttggatttcaggagagaagatacatttacgaatcccccaaccaccgcggaaaagatagtagcttcctggcacagaagtag

SEQ ID NO: 111179 - DNA, 4527 bp, Artificial Sequence
  derived and/or modified sequence
atgtttccagccaggggagtgccgctgcacctagaaggggagggggtctttccatggggaccaggggacgtctcactgccgtatttatctaccagtgatgtgtcctttagcgtgattgttgagaacgtgaattgctactctagcggcatgatctgtaggaaatttatatcaatcaatgtgggcaacagcctgatcgtgttcgatgacgacagcggtaacccatctcccgagagctttctggacgataagcaggaagttcatacctggcgggttgggttttttactctcgtacacttccctcaggagcacattacacttctgtgggaccagcgcaccactgtgcatgtgcaggccgggcctcagtggcaaggccagctcgctggcctctgcggcaactttgaccttaagaccatcaatgaaatgcggactccagagaatctcgagctgactaacccccaagagtttggcagcagttgggccgccgtggagtgccccgatacgcttgatcccagggatatgtgcgttctgaaccctctccgggagccgtttgctaagaaggagtgctctatcctcctctccgaagtcttcgaaatatgccaccctgtggtcgatgttacgtggttctactcgaactgcctgaccgatacatgtggctgctcccaaggcggtgattgcgaatgcttttgcgctagtgtgagtgcttacgcacatcagtgctgccagcacggagtggctgtagactggagaacccctaggctgtgcttgctgggtaagggaccataccagctctcaagcctcgctgccggaggggcactagttggtatgaaggccgtgggagacgacatcgtgttagtcagaaccgaggatgttgcaccagccgacattgtgagctttctcctcacagctgccctgtataaggccaaggcccacgatcccgacgtagtctccctggaggcagcagaccgtcctaacttcttcctgcacgtgactgccaatgggagtcttgaacttgccaagtggcaggggagagacactttccaacaacacgcctctttcctcctgcacagaggaacccgacaggccggactggtggctctggagtctctagccaagccgagttcctttctttatgtgtcgggagccgtactcgcactgaggctctacgagcacaccgaagtcttccgccggggaacactgtttcggctgctggatgctaagcctagcggggccgcctatccgatctgtgaatggcgctacgatgcctgtgcgtcaccttgtttccagacttgtcgagatccaagggccgcatcctgccgggacgtgccccgtgtggaaggatgtgtaccagtgtgccctaccccacaggtgctggatgaagtcacccagaggtgtgtatatctcgaagattgcgtggagcccgccgtatgggtgcctactgaggccctcggtaatgaaaccctccccccatctcaggggctccctactccctcggacgaggaaccccaattatcacaggagagtccaagaacacctactcaccgacccgccctgactcctgcagctccccttacaaccgcgctcaaccccccagttaccgctactgaagaacctgtggtttctccaggccccacacagacgactcttcaacaaccactggaactgaccgcatcacagctccccgcgggacctaccgaaagccccgcttcgaagggcgtcacggcctcattgctggcgatcccacacaccccagagagctcttccctgcccgtcgctctgcagactcctactccaggtatggtgtcaggcgctatggaaaccactagagtgactgtaatatttgccggctccccaaacattactgtgtcttcccggtcacccccagctcccaggtttcccctgatgacaaaagccgtcacggtaagggggcatggcagcctccccgttcgtaccacaccgccacaacccagtcttactgccagcccctcctctcggccagtggcctctccgggggcaatttcaaggtcacctaccagttctggctctcacaaagcagtcctcacacccgcagtgactaaggtgatctccagaacaggtgtgcctcagcccacacaggcacagtctgcctccagccctagcacacccctcacagtcgccggaacagccgccgagcaggttcccgtctctcctctcgcgactaggagcctggagattgtcttgagcactgaaaaaggtgaggcgggccacagtcagcccatgggctcccccgcatccccccagccgcacccattaccttcagcgccccccaggccagcccagcatacaacgatggccactcgctcacccgcactcccccctgagacgccagctgctgcctcactctctaccgccacagatggcttggcagccactccttttatgagccttgagagcactaggcccagccaacttctgtcaggcctgccccccgatacgagcctgccactcgccaaggttggcacctctgcccctgtcgccacacccggtcccaaggcatccgtgattacaacacctctgcagcctcaggctactaccctgccagctcagacacttagtcctgtcctgccttttacccctgcagccatgacccaagcacatccacccacccacattgcccctccagcagccggtaccgccccagggctgttattaggagctaccctcccaacctctggggttctgcccgtggccgaaggcacggcttccatggtgtccgtagtccctcggaagtccaccaccggtaaagtggccatactaagcaaacaggtttccctgcctacttccatgtacgggtcagcagagggtgggccaacagaacttacacccgccacatcacacccactcacccccctcgtagctgagccagaaggagctcaggctggaacggctctccctgttcctaccagctacgcactgagccgcgtcagtgcccgaacggcgccccaggatagcatgctggtcctcctgcctcagcttgctgaagcccacggtacatcagctggtccccacctggcagcagagcccgttgatgaagcaactactgagccaagcgggagatccgctcccgccctgagcatcgtggaggggttggcagaggccttggccactactaccgaagctaacacttccactacgtgtgtcccaattgcagagcaggactgtgtgcggcacatttgtctggaaggacagcttattagagtgaaccagtcccagcattgtccccagggggctgctccgccgcggtgtggcatactgggacttgctgttagggttggaggcgaccggtgctgccccctctgggaatgtgcttgcagatgcagtatttttccagatctatccttcgtcacttttgatggaagccacgttgcgctgttcaaagaagcaatctatatcctgagccagagccccgacgagatgctgacagtgcacgtgctggattgcaagagcgctaacttaggccatctgaattggccaccattctgcttggttatgctgaacatgacacacctggcacatcaagtgacgattgacagatttaatagaaaagtaaccgttgatctacaaccagtgtggccgcctgtaagccggtatggcttcaggattgaagacactgggcatatgtatatgatcttgactcccagcgatatccagatccaatggctccattccagcggcttgatgattgtggaggctagcaaaacctccaaggcgcaggggcatggcctgtgtggtatttgcgacggcgacgctgccaacgacctaactctgaaagacggatccgttgtagggggggccgaagatccggccccattcctcgatagttggcaggtgcctagctctctgacaagcgttggccagacaaggtttcgcccagactcatgcgctactaccgattgctccccttgcctgaggatggtgagtaatcgtactttctcagcttgccatcgattcgtgcctccagaatctttttgcgagctgtggatccgtgatacaaagtatgtccaacagccctgtgtcgctctcactgtctatgtcgctatgtgccacaagtttcatgtctgcattgaatggcgcaggtccgactactgtcccttcctgtgcagtagcgactccacataccaggcctgtgtgacggcatgcgagcctccaaagacatgccaggatggaatcctggggccactcgatccggagcactgccaggtgctcggagaagggtgcgtctgttctgagggtacaattctgcacagacgccacagtgccctttgcatcccagaagcaaagtgcgcatgcggcgactgtcccgattctatacctgaatgccaagagggtgaggcactcacggtgcacaggaacacaacggagctgtgctgtccactttatcagtgcgtgtgcgaaaattttcgctgcccacaagttcagtgtggtctgggaaccgcattggtggaagtctggagtcccgacaggtgctgcccctacaagagctgcgggtag

SEQ ID NO: 111180 - DNA, 4527 bp, Artificial Sequence
  derived and/or modified sequence
atgtttcctgcccggggcgtgcccctgcacctggagggggagggcgtcttcccctggggccctggagatgtgtccctgccctacctgagcaccagtgatgtgtccttctctgtgattgtggagaatgtgaactgctacagcagcggcatgatctgcaggaagttcatcagcatcaacgtgggcaacagcctgattgtgtttgatgatgattctggcaaccccagccctgagagcttcctggatgacaagcaggaggtgcacacctggagggtgggcttcttcaccctggtgcacttcccccaggagcacatcaccctgctgtgggaccagaggaccaccgtgcacgtgcaggccggcccccagtggcagggccagctggccggcctgtgtggcaactttgacctgaagaccatcaatgagatgaggaccccagagaacctggagctgaccaacccccaggagtttggcagctcctgggccgctgtggagtgcccagacaccctggacccccgggacatgtgtgtgctgaaccccctgcgggagccctttgccaagaaggaatgttccatcctgctgtctgaggtgtttgagatctgccaccctgtggtggatgtgacctggttctacagcaactgcctgacagacacctgtggctgcagccagggcggggactgtgagtgcttctgtgcctctgtgtctgcctatgcccaccagtgctgccagcacggcgtggccgtggactggaggaccccccggctgtgcctgctgggcaagggcccctaccagctgagcagcctggccgccggcggggccctggtgggcatgaaggctgtgggagatgacatcgtgctggtgaggacagaagatgtggccccagctgacatcgtgtccttcctgctgacagctgccctgtacaaggccaaggcccatgaccctgatgtggtgtccctggaggccgctgaccggcccaacttcttcctgcacgtgacagccaacggcagcctggagctggccaagtggcagggccgggacaccttccagcagcacgccagcttcctgctgcaccggggcacccggcaggccggcctggtggccctggagagcctggccaagcccagcagcttcctgtatgtgtctggagctgtgctggccctgcggctgtatgagcacacagaggtgttcagaagaggcaccctcttccggctgctggatgccaagcccagcggggccgcctaccccatctgtgagtggaggtatgatgcctgtgccagcccctgcttccagacctgccgggaccccagggctgccagctgcagagatgtgccccgggtggagggctgtgtgcctgtgtgccccaccccccaggtgctggatgaggtgacccagagatgtgtgtacctggaggactgtgtggagcctgctgtgtgggtgcccacagaggccctgggcaatgagaccctgccccccagccagggcctgcccacccccagtgatgaggagccccagctgagccaggagagccccaggacccccacccacaggcctgccctgaccccagctgcccccctgaccacagccctgaacccccctgtgacagccacagaggagcctgtggtgtccccaggccccacccagaccaccctgcagcagcccctggagctgacagccagccagctgcctgctggccccacagagagccctgccagcaagggcgtgacagccagcctgctggccatcccccacaccccagagagcagcagcctgcctgtggccctgcagacccccaccccaggcatggtgtctggggccatggagaccaccagggtgaccgtcatctttgctggcagccccaacatcaccgtgagcagccgcagccccccagccccccgcttccccctgatgaccaaggctgtgacagtgcggggccacggcagcctgcctgtgaggaccaccccaccccagcccagcctgacagccagccccagcagcaggcctgtggccagccctggggccatcagccgcagccccaccagcagcggcagccacaaggctgtgctgaccccagctgtgaccaaggtgatcagcaggactggagtgccccagcccacccaggcccagagcgccagcagccccagcacccccctgactgtggccggcacagctgctgagcaggtgcctgtgagccccctggccaccaggagcctggagatcgtgctgagcacagagaagggggaggccggccacagccagcccatgggcagccctgccagcccccagccccaccccctgcccagcgccccacccaggcctgcccagcacaccaccatggccaccaggagccctgccctgcccccagagaccccagctgctgccagcctgagcacagccacagatggcctggccgccacccccttcatgagcctggagagcacccggcccagccagctgctgagcggcctgcccccagacaccagcctgcccctggccaaggtgggcaccagcgcccctgtggccaccccaggccccaaggccagcgtcatcaccacccccctgcagccccaggccaccaccctgcctgcccagaccctgagccctgtgctgcccttcaccccagctgccatgacccaggcccacccccccacccacatcgcccctcctgctgctggaacagcccctggcctgctgctgggcgccaccctgcccaccagcggcgtgctgcctgtggccgagggcacagcctccatggtgtctgtggtgcccaggaagagcaccaccgggaaggtggccatcctgagcaagcaggtgtccctgcccacctccatgtatggcagcgctgagggcggccccacagagctgaccccagccaccagccaccccctgacccccctggtggccgagcctgagggcgcccaggccggcacagccctgcctgtgcccaccagctatgccctgagccgggtgtctgccaggacagccccccaggacagcatgctggtgctgctgccccagctggccgaggcccacggcaccagcgctggcccccacctggccgctgagcctgtggatgaggccaccacagagcccagcggccgcagcgccccagccctgagcatcgtggagggcctggccgaggccctggccaccaccacagaggccaacaccagcaccacctgtgtgcccatcgccgagcaggactgtgtgcgccacatctgcctggagggccagctgatccgggtgaaccagagccagcactgcccccagggcgccgccccaccccgctgtggcatcctgggcctggccgtgcgggtgggcggggaccgctgctgccccctgtgggagtgtgcctgccgctgcagcatcttcccagacctgagctttgtgacctttgatggcagccacgtggccctcttcaaggaggccatctacatcctgagccagagcccagatgagatgctgactgtgcacgtgctggactgcaagagcgccaacctgggccacctgaactggccacccttctgcctggtgatgctgaacatgacccacctggcccaccaggtgaccatcgaccgcttcaacaggaaggtgacagtggacctgcagcctgtgtggccccctgtgagccgctatggcttcagaattgaggacaccggccacatgtacatgatcctgacccccagcgacatccagatccagtggctgcacagcagcggcctgatgattgtggaggccagcaagaccagcaaggcccagggccacggcctgtgtggcatctgtgatggagatgctgccaatgacctgaccctgaaggatggctctgtggtgggcggcgctgaggaccctgcccccttcctggacagctggcaggtgcccagcagcctgacctctgtgggccagacccgcttccggccagacagctgtgccaccacagactgcagcccctgcctgaggatggtgagcaacagaaccttcagcgcctgccacagatttgtgcccccagagagcttctgtgagctgtggatccgggacaccaagtatgtgcagcagccctgtgtggccctgactgtgtatgtggccatgtgccacaagttccacgtgtgcatcgagtggaggagaagtgactactgccccttcctgtgcagcagtgacagcacctaccaggcctgtgtgacagcctgtgagccccccaagacctgccaggacggcatcctgggccccctggaccctgagcactgccaggtgctgggggagggctgtgtgtgcagcgagggcaccatcctgcaccggcggcacagcgccctgtgcatccctgaggccaagtgtgcctgtggggactgcccagacagcatccctgagtgccaggagggggaggccctgactgtgcacaggaacaccacagagctgtgctgccccctgtaccagtgtgtgtgtgagaacttccgctgcccccaggtgcagtgtggcctgggcacagccctggtggaggtgtggagcccagaccgctgctgcccctacaagagctgtggctag

SEQ ID NO: 111181 - DNA, 4527 bp, Artificial Sequence
  derived and/or modified sequence
atgttccccgcccggggcgtgcccctgcacctggagggcgagggcgtgtttccctggggaccaggggacgtgagtttgccatatctgtctacctctgacgtaagcttcagcgtaatcgtcgagaatgtaaactgttactcttctgggatgatttgtagaaaattcatttcaatcaacgttggcaacagcctaatcgtgttcgatgacgatagcggcaatccaagccccgagtcctttctggacgataagcaggaggtgcatacttggagggtgggcttctttacgctcgtgcattttccccaggaacatatcaccttactttgggaccagcgcaccactgtgcacgtgcaggccgggccacagtggcagggccagttggcgggcctatgcggaaactttgatttgaaaaccataaacgagatgcgtacaccggagaatctcgagctgacaaacccccaggagttcggatcgtcctgggctgccgttgagtgtccagacactctggacccccgcgatatgtgcgtgctgaatcctttgagggagccttttgccaagaaggagtgcagcatactgctgtccgaagtgtttgagatctgccatcctgtggtggatgtgacctggttttattctaactgcttgacagacacctgcgggtgctctcaaggaggcgattgcgaatgtttttgcgcctctgtgagcgcctatgcacaccaatgctgtcaacacggcgtggctgtcgattggcgcacacctagactgtgcctgttaggtaaaggcccctatcagctcagcagcctcgctgcaggcggcgctctagttggcatgaaggcagtgggcgacgacattgtactggttcggaccgaagatgtggcccccgcggatatcgtctcatttttgcttaccgctgccctgtacaaagcgaaggcccatgaccctgacgtggtatcactggaggccgcggatcggcctaacttcttcctgcacgtcaccgctaacgggtccctagagctggcaaagtggcaggggcgagatacctttcagcagcacgcatcctttcttctacaccgcggaacaaggcaggcgggactggtcgcactggagagccttgccaaaccgtcttctttcctctacgtctcaggcgcagttctcgcgctacgcctctatgaacacaccgaggtttttcggaggggcaccctgtttcggctgttggatgcaaagcccagtggggctgcataccctatttgtgaatggaggtacgacgcctgcgcctccccgtgcttccagacttgcagggatcctcgggctgcctcttgtcgagatgtgcctagggtggagggatgtgtcccggtgtgccccaccccccaagtgctggacgaggtcacccagaggtgcgtgtacctggaggactgcgtcgaacccgccgtttgggtccctaccgaggcactaggtaatgaaaccctaccacccagtcaggggttgccaactccttcagacgaagaaccacagctgtcacaagagtcacccaggacgcccacccataggccagcactgactccagccgcacctttgaccacagctcttaaccctccagttactgccactgaggaaccagtagtttcgcccgggcccacacagactaccttacagcagcccctcgaactgacagcatctcagcttccggctggacctactgagagccccgcgagcaagggagtaaccgctagcctgctcgcaataccacatacaccagagtcgagcagcctgcctgtggccttgcagacccctaccccgggtatggtgtcaggcgcaatggaaaccacaagagtaaccgttatcttcgccggctctccaaacattacagtgagtagccgcagccccccagcaccaagattcccattgatgactaaggccgttaccgttagaggacacggctctctgccagtccgtacaacacccccccaaccgagcttaacagcaagcccttcatcccgcccagtcgcgagtccaggcgccattagccgttctcctacctcatcaggaagccacaaggctgtactgacacccgctgtgaccaaagtgattagtagaactggggtgccccagcccacacaggcccaatccgcctctagtccatctaccccactcactgtggccggcactgctgctgaacaggtcccagtgagtcccttggccactaggtccctcgaaattgtcctgagcactgaaaaaggtgaggcaggtcacagccaacctatgggttcacctgccagtcctcagccacaccccctgccaagcgcaccccctaggcctgcgcaacacactacaatggcgactcgatcccccgccttgccccccgagacccctgctgcagcatcactaagcactgccacagacggactggcagcaacgccctttatgtctctagaaagtacccggccttctcaactcctttctggtctgccacccgacacctcactacccctcgccaaggtcggtacctcagccccagtcgccaccccaggcccaaaggcaagtgtcatcacgacacccctgcaacctcaagcgaccacccttccagcccagaccctctcacctgttcttccctttacccctgctgctatgacacaggcacatccccctacacatatcgctcctccggccgccggcactgcaccgggcctcctgcttggcgcaacattgcccacctccggcgtgctcccggtggcggaaggaacggcctcaatggtgtccgtggtgccgaggaagtcaaccacgggaaaggtggcgattttgagtaaacaggtgtctttgcctacaagcatgtatggctctgctgaaggcggacccactgaactaaccccagccaccagccatcctttgactcctttggtggccgaaccagagggcgctcaggcgggaacggccctgcctgtccctacgtcatatgccctgagccgggtatccgcaagaacagcaccacaagactccatgctggtcttgctaccccagctggcagaggcccatggcacatccgccggtccacatttagccgcagaacccgtcgatgaggctaccaccgagccatccggaaggtccgctcctgcactctctatcgtggagggacttgctgaggcactggcgacaaccacagaagcaaacacttccaccacctgcgtgcccatcgcagagcaggactgcgtccggcatatatgtctcgaggggcagctcatccgtgtcaatcagagccaacattgtcctcaaggcgcagcgccccctaggtgcggcatcttagggctagccgtccgcgttggtggggaccgatgctgtcccctgtgggagtgtgcttgccggtgtagcatcttccctgacttaagcttcgtgaccttcgacggatcgcatgttgccctgttcaaagaggcaatctacattttgagccagagccccgacgagatgttaacggtacatgtcttggattgcaagtctgcgaatctgggccacctgaattggcctccgttctgtttggtgatgctgaatatgacccacttagcccaccaggtgaccattgatcgctttaatagaaaagtaactgtggatttgcagccagtctggcctccagtgagtaggtacggcttccggatcgaggataccggtcatatgtatatgattctcacaccatccgatatccagattcagtggttacactcatcgggcctaatgattgtggaggcaagcaagacctcgaaggcacaggggcacggtctgtgcggtatctgcgatggcgacgctgctaatgatttgacactgaaggatggcagcgtggtaggcggtgcagaggaccctgccccattcttagatagctggcaagtgccctctagcctaacatccgttggccagacacgcttccgtccagattcctgtgccaccaccgattgctctccatgtctgagaatggtgtccaatcgaacgtttagtgcttgtcatcgctttgtgcctccagagtctttctgcgagttgtggatcagagataccaagtatgtccaacagccctgtgtggcgctgacagtgtacgtggcaatgtgccacaagttccacgtgtgcatcgaatggaggagaagtgattattgcccattcctctgtagttccgattcgacataccaagcctgcgtcacagcctgtgagcctcccaaaacatgtcaggatgggatcctcggacccctggaccctgagcactgtcaggtcttaggtgagggatgtgtgtgctccgaggggaccatcctgcaccggcgccactcagccctgtgcatcccagaagctaagtgtgcctgcggagactgtcctgatagcataccagagtgtcaagagggcgaggcgttgactgttcatcgcaacactacagagctgtgttgcccattgtatcagtgcgtgtgtgagaactttcggtgtccacaggttcagtgcggtctcgggactgctctggtcgaagtgtggagcccagaccggtgttgtccctacaagtcctgtgggtag

SEQ ID NO: 111182 - DNA, 4992 bp, Artificial Sequence
  derived and/or modified sequence
aggagacttccgagcccgtctctccctccatcctccagctgctgcccctgtagcccaggagcccatactgaggccccagggcctccgctcccatcttcttctcttccagctgctgcctgcccagcaggccaggtcttcgtgaactgcagcgacctgcacacggacctggagctgagcagggagaggacgtgtgagcagcaactgctgaacctgagcgtgtcagcccgtggcccctgcctctcgggctgcgcctgtccccagggtctgctcagacacggggatgcatgtttcctgccagaggagtgcccctgcacttggaaggggaaggagtatttccctggggaccaggtgatgtctccttgccatacctgagcacatcagatgtcagcttctctgtgattgtagagaatgtgaactgctacagctctggcatgatctgcaggaaatttatttccatcaacgttgggaactcactcattgtctttgatgatgactccggaaatcctagtccagagagcttcctggatgacaagcaggaggtccacacatggcgagtgggatttttcacactggtgcatttcccacaggagcacatcaccctcttgtgggaccagagaaccacagtgcacgtccaggctgggcctcagtggcagggccagctggcgggcctctgtgggaactttgacttaaaaaccatcaatgagatgaggaccccggagaacctagagctaactaacccccaggagtttggcagcagttgggctgcagttgagtgcccagacaccctcgatcctcgggatatgtgtgtcctgaatcctctccgagaaccatttgccaagaaggagtgcagcatcctgctcagtgaggtgtttgagatctgccaccctgtggttgatgtcacttggttttactcaaactgcctgacagacacatgtggctgcagccagggtggtgactgtgagtgcttctgtgccagcgtctccgcttatgcccaccagtgttgccagcatggggtggctgttgactggcgaaccccccgcctctgcctgctaggtaagggcccctatcagctatccagcttggcagccggtggtgctctggtgggcatgaaggcggtgggcgatgacatagtcctagtgaggacagaggatgtggcgccagcagacattgtgagcttcctgctgacagctgctctgtacaaggccaaggcccatgacccagatgtggtgtccctggaggcagcagacagacccaacttcttccttcacgtcacagccaacgggtctctggagctggctaagtggcagggccgtgacaccttccaacagcatgcctccttcttgctgcaccgggggacacggcaggcaggcctggtggccctggagtccctggccaagcccagctccttcctctatgtgtcgggcgcggtgctggccctgcggctgtacgaacacacagaggtgttccgccggggcacactcttccgccttctggatgccaagccctcgggggctgcctaccccatctgcgagtggcgctacgatgcctgtgccagcccctgcttccaaacctgccgggacccacgggcagccagctgccgggacgtacccagggtagaaggctgtgtccctgtgtgccccaccccccaggtcctggatgaagtcacacagagatgtgtctacttggaggactgtgtggagccagcagtttgggttcccacagaggcccttggcaatgagaccctccctcccagtcaagggttgcccactcccagtgatgaggagccacagctgtcacaggaaagccccaggacccccacccacaggccagccctcaccccagctgccccactcaccacagccctgaacccaccagtgacagccactgaggagccagtggtgtctccaggccccacccagaccaccctgcagcagccactggagctcactgcatctcaactccccgccggccccacggagtccccagccagcaagggagtgactgccagcctcctggccatcccccatacaccagagtcctcatccctccctgttgcactgcagacacccacacctggcatggtgtcaggtgccatggagacaacaagggtgactgtgatctttgcaggaagccctaacatcacagtctcctcccggtcgccccctgcccctcgcttcccgctcatgaccaaggctgtgacagtccgaggccatggctccttgcctgttaggacgacacccccacagccctccttgacagcaagtccctcctccagacctgtggcttcccctggagccatctccaggtcccccacctcctcgggatcccacaaggctgtgctgacacctgcagtaactaaggtcataagcaggacaggggtcccccagcccacccaggcccagagtgcttcaagtcccagcacccctctaactgtggctggaacagcagcagaacaggttcctgtcagtccccttgcaaccaggagcttggagatagtgctatccacagagaagggcgaagccgggcacagccagcccatgggctcgcctgcctccccacagccacacccactcccctctgcaccaccccgcccagcccagcataccaccatggccaccaggtctccagctctgcccccagagaccccagctgccgccagcctgtcaacagccactgatgggctggcagccacacccttcatgtcccttgagtcaactcgtccctcccagctcctctctggcctgcctcccgacaccagcctgcccctggccaaggtgggcacatctgccccagtggccacacccggccccaaagcctctgtcatcaccactccactccagccacaggccacgactctgcctgctcagacacttagcccagtactgcctttcactccagcagcaatgacccaggcgcacccacccactcacatagcacccccagcagcaggcacagctccaggcctgctgctgggagccacattgccaacctctggagtcctgcctgtggctgagggcacggcctccatggtatctgttgtcccacgaaagagcaccacagggaaggtggccatcctatccaagcaagtgtctctgcccacttccatgtatggttctgcagagggtgggcccacagagctcacgcctgctacgagccaccctctcacgcccttggtggctgagcccgagggagcccaggcaggcacagctctgccagtgcccacatcctatgccctgagccgtgtctcagccaggacggccccccaagacagcatgctggttctgttgcctcagctggctgaggcccatggaacctcggcagggcctcacctggcagcagagccggtggacgaggccaccacagaaccatctgggcgctcagccccagccctgagcatcgtagagggtttggcggaggctttggcaactaccactgaggccaatacatccaccacctgtgttccaatcgccgagcaggactgcgtccgccacatctgcctggagggccagctgattcgcgtgaatcagtcccagcactgtccccagggtgctgctccccctcgctgtgggatcctgggcctcgccgtgcgggtgggtggggaccgctgctgcccactctgggagtgtgcctgccggtgctcaatcttccctgacctgagcttcgtgaccttcgatgggagccacgtagctctgttcaaggaggccatctacatcctcagccagagcccagatgaaatgctcaccgtccatgtactggactgcaaaagtgccaacctggggcacctgaactggcccccgttctgtctggtgatgttgaacatgactcacttggcccatcaggtcactattgatcgcttcaaccgaaaggtgactgtggacttgcagcctgtgtggccaccggtgagcaggtatggattcagaattgaggacacaggccacatgtacatgatcctgactccctcagacatccagatccagtggctccacagctcaggactcatgatcgtggaggccagcaaaaccagcaaggcccagggccatggcctgtgcggtatctgtgatggagatgcagccaatgaccttaccctgaaggatggctcagtggtgggtggggctgaggaccctgctccctttctggacagctggcaggtgcccagctccctgacctcagtgggccagacccgcttccgcccagacagctgcgccacaactgactgctcgccctgccttcgcatggtgtccaaccgcaccttcagtgcctgccaccgctttgtgcctccggagtcattctgtgagctgtggatccgggacaccaagtacgtgcagcagccctgcgtggccctgactgtgtacgtggccatgtgccacaaatttcatgtgtgcatcgagtggcggcgctctgactactgccccttcctgtgctccagcgactccacataccaggcatgtgtgacagcctgtgagccacccaagacatgccaggatgggatactagggcctctggacccagagcactgccaggtgctgggcgagggctgcgtctgctccgagggcaccatcttacaccggcgccactctgcactctgcatcccggaggccaagtgcgcctgtggtgactgtccagactccatccccgaatgtcaagaaggggaggcgctcactgtgcacaggaataccacggaactctgctgccctctgtaccagtgtgtgtgtgagaacttccgctgtccccaagtgcagtgtggcctgggcactgccctggtggaggtgtggagccccgaccgctgctgcccctacaaatcctgtggataaaagaaggaaaaagcaagtttcccattccaaagagggtttccgtcttaaaaagtccttactgcggccgggcacggtggctcacacctgtaatcccagcactttgagaggccaaggcgggtggatcatgaggtcaggagttcaagaccagcctggccaagacggtgaaaccctgtgtctactg

SEQ ID NO: 111183 - DNA, 4527 bp, Artificial Sequence
  derived and/or modified sequence
atgttccccgctagaggggttcctctgcacttggaaggcgaaggggtgttcccctggggacccggagatgtctccctaccttatttgtccacgagcgatgtctccttttccgtcatcgtggagaatgtcaactgctatagcagcggcatgatttgccggaagttcatcagcattaatgtaggcaactcgctcatagtctttgacgacgattccggcaacccctctccagaatcattcctcgacgataagcaggaggtgcacacctggagggtaggtttttttactctagttcactttccgcaagagcacatcactttgctctgggaccagcgcacaacggtgcacgtccaggcaggtccccaatggcagggacagctcgcaggactatgcggcaatttcgatctaaaaacaatcaacgagatgagaacccctgagaacctggagctgacaaatcctcaggagttcggctcgagttgggcagctgtcgaatgtcccgatacattggatccaagggacatgtgcgttctcaaccccctaagagagcccttcgcaaaaaaggagtgctccatcttgctctccgaggtcttcgaaatctgtcatcctgtggtggatgtgacctggttctacagcaactgcttaactgatacttgcggatgcagccagggcggagactgcgagtgtttctgtgccagcgtctcagcgtacgcacaccagtgctgccaacacggcgtggcagtcgattggcgtactcccaggttgtgcctgttaggcaaggggccataccagctgagctcgctcgctgctgggggagcccttgttgggatgaaggctgtgggagacgacatcgttctcgtgcggaccgaagatgtcgccccagcagacatcgtcagtttcctgcttaccgccgcactttataaggctaaagctcatgacccagatgttgtaagcctagaggctgcggatcggccaaacttcttcctgcacgtgactgccaatggctctctagagctggcaaagtggcagggaagggacacgttccaacagcacgcgagcttcctcctgcataggggtaccagacaggccggactcgtggctctcgagtcacttgctaaaccaagttcttttctgtatgtttctggagctgtgctggcgctgcggctgtatgaacacactgaggttttccgcagggggacactgttccgtctgttggacgccaagccatcaggggctgcctaccccatctgtgagtggagatacgacgcctgtgctagcccatgttttcagacatgtcgcgaccccagggccgctagctgcagggacgtccccagggtcgaaggctgcgtgccagtgtgccccacaccacaagtactcgacgaggtgacacagcgctgcgtgtatctggaggactgtgtggaaccggcagtttgggtgcccacagaggcactaggtaatgagactctaccaccaagccaggggttgcccacaccctctgacgaggagcctcagctgtctcaggagagcccacgcactccaacccatcgtcctgccctgactcccgcagcgccactgaccacagccttgaatccaccagttactgcgacggaagaacccgtggtgtctccaggaccaactcagacaaccctgcagcagccattggaactgaccgccagtcagctcccagctgggcctaccgaaagtcccgcttcaaaaggggtcactgccagtctcctcgccattcctcatacccctgagagcagctcactgcccgttgccctgcagacaccaacacctgggatggtgtctggagccatggagaccacacgcgtcacggtgatattcgctggctctccaaatataaccgtctccagccgttcccccccagccccaagattcccgcttatgaccaaggccgtcaccgtacgtggccatggcagcttgcctgtgcgaaccacgccaccacagccgagtcttactgccagcccttcttcgcgtccggtggcttcacccggagctattagccggtcgcccaccagcagcggaagccacaaggctgtgctgaccccggctgtgacgaaagttatttcaagaactggagtcccgcagccgacacaggcacagagcgccagctcaccctcgacccctctaaccgtggccggtaccgctgccgaacaggtgccagtttctcccctagcaaccagatcgttggagatcgtgctgagtacagaaaagggggaggccggtcatagtcagcccatggggagccctgctagtccacagccacatcctctccccagcgcacctccgagacccgctcagcataccacaatggcgactcgctcacctgctctccccccagaaacgcctgccgcagcctcactgtccacagccaccgacggcctggccgctacacccttcatgagtctagaatcgactcgcccatcacagcttttgtctggcttaccacccgacaccagccttcccctggcgaaggtaggcacttccgcacccgttgccacacctggacctaaggcttccgttataactaccccactgcagccacaggccacaaccctcccagcccagaccctttcaccagttctgccattcactccggctgctatgacacaggcccaccccccaacacacattgccccacccgcagccggtacagcgcctgggctcctgttgggggcaaccttacctacgtcaggagtcttgcccgtcgcagaaggcaccgccagtatggtcagcgtggttccacgtaaatcaactaccggcaaggtggccattctgagtaagcaggtcagcctcccaacctcaatgtacggttccgctgagggcggtccaaccgaactgacgcccgctacaagtcaccccttaactccactggttgcggagccagaaggagctcaggcgggtacagctctaccggtacccaccagctatgcactatctcgggtgagtgccagaactgctcctcaagacagtatgttagttctgttgcctcagctcgccgaggcccatgggacctccgcagggccacacctggccgctgaacctgtggatgaagcaaccacagagccatctggccgaagcgctccggcattaagtatcgtggaggggttggccgaggccctggcaacaaccactgaggccaacacctcaacgacctgcgtccctattgccgaacaggactgcgtgcgccatatttgtttggaaggtcaactcataagggtcaaccaaagtcagcattgccctcagggcgctgccccacctcgctgcggcattcttggcttggcagttcgcgtaggtggagaccggtgttgcccgctctgggagtgtgcctgcagatgttcaatctttccagacctgtcatttgtcacgttcgatggtagccatgtcgccctctttaaggaggccatttatattcttagtcagtcccccgatgagatgttaactgttcacgtcctcgattgtaagtctgcgaacctagggcatctgaattggcccccattctgcttagttatgttgaacatgacccacttggctcaccaggtgaccatcgacagatttaatagaaaggtcacagtggatctacagcctgtttggccaccagtctctaggtatggatttagaattgaagataccgggcacatgtatatgatcctgaccccctccgacattcagatccagtggctgcactcctctggcctcatgattgtggaggcctcaaaaaccagtaaggcacaggggcatggcctgtgtgggatctgcgacggggacgccgcaaacgatttgactttgaaggacggttccgtggtaggtggcgctgaagatcccgcaccttttctggacagctggcaagtgccctcttccctcacatctgtgggccagacacgctttcgcccagattcctgtgcgacaactgattgctctccctgtttaaggatggtatctaatcgcactttttctgcgtgtcaccggtttgtccctcccgagagcttttgcgagctttggataagggataccaaatacgtccagcagccatgcgtggccctgaccgtctatgtggccatgtgtcataagttccatgtctgtatcgagtggcgtaggtctgactactgtccatttctgtgctcaagcgactccacctaccaagcatgcgtgactgcctgtgaacccccaaagacttgtcaggacggcatcctggggccactggatccagaacactgccaggtcctaggggaaggctgcgtctgctcagaaggcactatcctccaccgacggcacagcgctctttgtatacccgaagcgaagtgcgcttgtggcgactgtccggatagcattcctgagtgtcaagagggagaggccttaaccgtgcatcgaaatacgactgagttatgttgccctctgtaccagtgtgtgtgcgaaaactttcgctgtcctcaggtccagtgtggcctcgggacagctcttgtggaagtatggtctcctgaccgatgctgcccgtataagagttgcggctag

SEQ ID NO: 111184 - DNA, 4527 bp, Artificial Sequence
  derived and/or modified sequence
atgttccccgccagaggcgtgcccctgcacctggagggcgagggcgtgttcccctggggccccggcgacgtgagcctgccctacctgagcaccagcgacgtgagcttcagcgtgatcgtggagaacgtgaactgctacagcagcggcatgatctgcagaaagttcatcagcatcaacgtgggcaacagcctgatcgtgttcgacgacgacagcggcaaccccagccccgagagcttcctggacgacaagcaggaggtgcacacctggagagtgggcttcttcaccctggtgcacttcccccaggagcacatcaccctgctgtgggaccagagaaccaccgtgcacgtgcaggccggcccccagtggcagggccagctggccggcctgtgcggcaacttcgacctgaagaccatcaacgagatgagaacccccgagaacctggagctgaccaacccccaggagttcggcagcagctgggccgccgtggagtgccccgacaccctggaccccagagacatgtgcgtgctgaaccccctgagagagcccttcgccaagaaggagtgcagcatcctgctgagcgaggtgttcgagatctgccaccccgtggtggacgtgacctggttctacagcaactgcctgaccgacacctgcggctgcagccagggcggcgactgcgagtgcttctgcgccagcgtgagcgcctacgcccaccagtgctgccagcacggcgtggccgtggactggagaacccccagactgtgcctgctgggcaagggcccctaccagctgagcagcctggccgccggcggcgccctggtgggcatgaaggccgtgggcgacgacatcgtgctggtgagaaccgaggacgtggcccccgccgacatcgtgagcttcctgctgaccgccgccctgtacaaggccaaggcccacgaccccgacgtggtgagcctggaggccgccgacagacccaacttcttcctgcacgtgaccgccaacggcagcctggagctggccaagtggcagggcagagacaccttccagcagcacgccagcttcctgctgcacagaggcaccagacaggccggcctggtggccctggagagcctggccaagcccagcagcttcctgtacgtgagcggcgccgtgctggccctgagactgtacgagcacaccgaggtgttcagaagaggcaccctgttcagactgctggacgccaagcccagcggcgccgcctaccccatctgcgagtggagatacgacgcctgcgccagcccctgcttccagacctgcagagaccccagagccgccagctgcagagacgtgcccagagtggagggctgcgtgcccgtgtgccccaccccccaggtgctggacgaggtgacccagagatgcgtgtacctggaggactgcgtggagcccgccgtgtgggtgcccaccgaggccctgggcaacgagaccctgccccccagccagggcctgcccacccccagcgacgaggagccccagctgagccaggagagccccagaacccccacccacagacccgccctgacccccgccgcccccctgaccaccgccctgaacccccccgtgaccgccaccgaggagcccgtggtgagccccggccccacccagaccaccctgcagcagcccctggagctgaccgccagccagctgcccgccggccccaccgagagccccgccagcaagggcgtgaccgccagcctgctggccatcccccacacccccgagagcagcagcctgcccgtggccctgcagacccccacccccggcatggtgagcggcgccatggagaccaccagagtgaccgtgatcttcgccggcagccccaacatcaccgtgagcagcagaagcccccccgcccccagattccccctgatgaccaaggccgtgaccgtgagaggccacggcagcctgcccgtgagaaccacccccccccagcccagcctgaccgccagccccagcagcagacccgtggccagccccggcgccatcagcagaagccccaccagcagcggcagccacaaggccgtgctgacccccgccgtgaccaaggtgatcagcagaaccggcgtgccccagcccacccaggcccagagcgccagcagccccagcacccccctgaccgtggccggcaccgccgccgagcaggtgcccgtgagccccctggccaccagaagcctggagatcgtgctgagcaccgagaagggcgaggccggccacagccagcccatgggcagccccgccagcccccagccccaccccctgcccagcgccccccccagacccgcccagcacaccaccatggccaccagaagccccgccctgccccccgagacccccgccgccgccagcctgagcaccgccaccgacggcctggccgccacccccttcatgagcctggagagcaccagacccagccagctgctgagcggcctgccccccgacaccagcctgcccctggccaaggtgggcaccagcgcccccgtggccacccccggccccaaggccagcgtgatcaccacccccctgcagccccaggccaccaccctgcccgcccagaccctgagccccgtgctgcccttcacccccgccgccatgacccaggcccacccccccacccacatcgccccccccgccgccggcaccgcccccggcctgctgctgggcgccaccctgcccaccagcggcgtgctgcccgtggccgagggcaccgccagcatggtgagcgtggtgcccagaaagagcaccaccggcaaggtggccatcctgagcaagcaggtgagcctgcccaccagcatgtacggcagcgccgagggcggccccaccgagctgacccccgccaccagccaccccctgacccccctggtggccgagcccgagggcgcccaggccggcaccgccctgcccgtgcccaccagctacgccctgagcagagtgagcgccagaaccgccccccaggacagcatgctggtgctgctgccccagctggccgaggcccacggcaccagcgccggcccccacctggccgccgagcccgtggacgaggccaccaccgagcccagcggcagaagcgcccccgccctgagcatcgtggagggcctggccgaggccctggccaccaccaccgaggccaacaccagcaccacctgcgtgcccatcgccgagcaggactgcgtgagacacatctgcctggagggccagctgatcagagtgaaccagagccagcactgcccccagggcgccgccccccccagatgcggcatcctgggcctggccgtgagagtgggcggcgacagatgctgccccctgtgggagtgcgcctgcagatgcagcatcttccccgacctgagcttcgtgaccttcgacggcagccacgtggccctgttcaaggaggccatctacatcctgagccagagccccgacgagatgctgaccgtgcacgtgctggactgcaagagcgccaacctgggccacctgaactggccccccttctgcctggtgatgctgaacatgacccacctggcccaccaggtgaccatcgacagattcaacagaaaggtgaccgtggacctgcagcccgtgtggccccccgtgagcagatacggcttcagaatcgaggacaccggccacatgtacatgatcctgacccccagcgacatccagatccagtggctgcacagcagcggcctgatgatcgtggaggccagcaagaccagcaaggcccagggccacggcctgtgcggcatctgcgacggcgacgccgccaacgacctgaccctgaaggacggcagcgtggtgggcggcgccgaggaccccgcccccttcctggacagctggcaggtgcccagcagcctgaccagcgtgggccagaccagattcagacccgacagctgcgccaccaccgactgcagcccctgcctgagaatggtgagcaacagaaccttcagcgcctgccacagattcgtgccccccgagagcttctgcgagctgtggatcagagacaccaagtacgtgcagcagccctgcgtggccctgaccgtgtacgtggccatgtgccacaagttccacgtgtgcatcgagtggagaagaagcgactactgccccttcctgtgcagcagcgacagcacctaccaggcctgcgtgaccgcctgcgagccccccaagacctgccaggacggcatcctgggccccctggaccccgagcactgccaggtgctgggcgagggctgcgtgtgcagcgagggcaccatcctgcacagaagacacagcgccctgtgcatccccgaggccaagtgcgcctgcggcgactgccccgacagcatccccgagtgccaggagggcgaggccctgaccgtgcacagaaacaccaccgagctgtgctgccccctgtaccagtgcgtgtgcgagaacttcagatgcccccaggtgcagtgcggcctgggcaccgccctggtggaggtgtggagccccgacagatgctgcccctacaagagctgcggctag

SEQ ID NO: 111185 - protein, 758 aa, Artificial Sequence
  derived and/or modified sequence
SPRSALFRVGHMSSVELDDELLDPDMDPPHPFPKEIPHNEKLLSLKYESLDYDNSENQLFLEEERRINHTAFRTVEIKRWVICALIGILTGLVACFIDIVVENLAGLKYRVIKGNIDKFTEKGGLSFSLLLWATLNAAFVLVGSVIVAFIEPVAAGSGIPQIKCFLNGVKIPHVVRLKTLVIKVSGVILSVVGGLAVGKEGPMIHSGSVIAAGISQGRSTSLKRDFKIFEYFRRDTEKRDFVSAGAAAGVSAAFGAPVGGVLFSLEEGASFWNQFLTWRIFFASMISTFTLNFVLSIYHGNMWDLSSPGLINFGRFDSEKMAYTIHEIPVFIAMGVVGGVLGAVFNALNYWLTMFRIRYIHRPCLQVIEAVLVAAVTATVAFVLIYSSRDCQPLQGGSMSYPLQLFCADGEYNSMAAAFFNTPEKSVVSLFHDPPGSYNPLTLGLFTLVYFFLACWTYGLTVSAGVFIPSLLIGAAWGRLFGISLSYLTGAAIWADPGKYALMGAAAQLGGIVRMTLSLTVIMMEATSNVTYGFPIMLVLMTAKIVGDVFIEGLYDMHIQLQSVPFLHWEAPVTSHSLTAREVMSTPVTCLRRREKVGVIVDVLSDTASNHNGFPVVEHADDTQPARLQGLILRSQLIVLLKHKVFVERSNLGLVQRRLRLKDFRDAYPRFPPIQSIHVSQDERECTMDLSEFMNPSPYTVPQEASLPRVFKLFRALGLRHLVVVDNRNQVVGLVTRKDLARYRLGKRGLEELSLAQT

SEQ ID NO: 111186 - protein, 805 aa, Artificial Sequence
  derived and/or modified sequence
MANVSKKVSWSGRDRDDEEAAPLLRRTARPGGGTPLLNGAGPGAARQSPRSALFRVGHMSSVELDDELLDPDMDPPHPFPKEIPHNEKLLSLKYESLDYDNSENQLFLEEERRINHTAFRTVEIKRWVICALIGILTGLVACFIDIVVENLAGLKYRVIKGNIDKFTEKGGLSFSLLLWATLNAAFVLVGSVIVAFIEPVAAGSGIPQIKCFLNGVKIPHVVRLKTLVIKVSGVILSVVGGLAVGKEGPMIHSGSVIAAGISQGRSTSLKRDFKIFEYFRRDTEKRDFVSAGAAAGVSAAFGAPVGGVLFSLEEGASFWNQFLTWRIFFASMISTFTLNFVLSIYHGNMWDLSSPGLINFGRFDSEKMAYTIHEIPVFIAMGVVGGVLGAVFNALNYWLTMFRIRYIHRPCLQVIEAVLVAAVTATVAFVLIYSSRDCQPLQGGSMSYPLQLFCADGEYNSMAAAFFNTPEKSVVSLFHDPPGSYNPLTLGLFTLVYFFLACWTYGLTVSAGVFIPSLLIGAAWGRLFGISLSYLTGAAIWADPGKYALMGAAAQLGGIVRMTLSLTVIMMEATSNVTYGFPIMLVLMTAKIVGDVFIEGLYDMHIQLQSVPFLHWEAPVTSHSLTAREVMSTPVTCLRRREKVGVIVDVLSDTASNHNGFPVVEHADDTQPARLQGLILRSQLIVLLKHKVFVERSNLGLVQRRLRLKDFRDAYPRFPPIQSIHVSQDERECTMDLSEFMNPSPYTVPQEASLPRVFKLFRALGLRHLVVVDNRNQVVGLVTRKDLARYRLGKRGLEELSLAQT

SEQ ID NO: 111187 - protein, 543 aa, Artificial Sequence [sequence omitted]

SEQ ID NO: 111188 - DNA, 1632 bp, Artificial Sequence
  derived and/or modified sequence
atgacccaaacacaccgggcaaaatccgccagtagttgtcccaacttgttggtccccgagacgtggcctcaccaagtgagcgctagccacgccgggaggagtaagcagccacagggcgggatccttaagataaacgaggaacatcggcggggcgcaatccaggaccttctcgcttcccccgggttcacgttcgggaagcgcgtggtcttcgacagccactgcctgaagcgacaacatacattcgctgacggcctgcacagttcttgtaccagcaacgcagaagagtatcagcccccgatctggaaatcctacctgtatcagcttcagcaggaggctcctagacccaagcgaataatctgtcctcgtgaagtggagaaccgccccaagtactacggccgcgaatttcatggaattatcagtcgggagcaggctgatgagttgctggggggggtggaaggcgcatacatcctgagggagagtcagaggcaaccgggatgttacacattggctctcagatttggtaatcaaactctgaattaccgtttattccatgacgggaaacacttcgtgggagagaaaagattcgagtctattcacgatctcgtgactgacggtctgatcaccctgtatatcgagacaaaggccgcagagtacatctccaaaatgacgactaaccccatctacgagcatattgggtatgctacactgctaagggagaaggtctcccgacgactgagccggagcaaaaacgaaccacgcaagactaacgtgacccatgaagagcacacagccgttgagaagattagttccctagtgagacgtgccgctctaacccataacgataaccactttaattacgagaaaacacataacttcaaagtgcatacttttaggggcccacattggtgcgagtattgcgccaatttcatgtgggggttaattgcccaaggagtgcgctgttcggactgcggcctgaacgttcacaaacagtgctcaaaacacgtccctaacgactgtcaacctgacttgaaacgaattaaaaaggtgtactgttgtgacctgacaacacttgtgaaagcccacaatacgcagagacccatggtggtggacatatgcattcgcgaaatcgaagcgcgcgggctgaaaagcgaaggactctacagggtttccggctttaccgagcatatcgaggacgtaaaaatggcctttgaccgggacggagagaaggcagatatttctgctaacgtgtaccccgatataaatatcattacaggagcactgaagctttactttagggacctgcctattcccgttatcacatacgacacatactccaagtttattgatgccgctaaaatctcaaacgccgatgagaggctggaggccgtgcacgaggtgttaatgctgctgcccccggctcactatgagacccttagatatctgatgatccatttgaagaaagttaccatgaacgagaaagacaactttatgaacgctgaaaatctgggaattgtgttcgggccaacactgatgagacccccagaggattccaccttgacaaccctgcacgacatgcggtatcagaaattaatcgtccagatcctgattgaaaatgaagacgttctcttttag

SEQ ID NO: 111189 - DNA, 1632 bp, Artificial Sequence
  derived and/or modified sequence
atgacccagacccaccgggccaagagcgccagcagctgccccaacctgctggtgcctgagacctggccccaccaggtgtctgccagccatgctggccgcagcaagcagccccagggcggcatcctgaagatcaatgaggagcacagaagaggagccatccaggacctgctggccagccctggcttcaccttcggcaagagggtggtgtttgacagccactgcctgaagaggcagcacacctttgctgatggcctgcacagcagctgcaccagcaatgctgaggagtaccagccccccatctggaagagctacctgtaccagctgcagcaggaggccccccggcccaagaggatcatctgcccccgggaggtggagaaccggcccaagtactacggccgggagttccacggcatcatcagccgggagcaggctgatgagctgctgggcggcgtggagggcgcctacatcctgcgggagagccagaggcagcccggctgctacaccctggccctgcgctttggaaaccagaccctgaactaccgcctcttccatgatggcaagcactttgtgggggagaagagatttgagagcatccatgacctggtgacagatggcctcatcaccctgtacatcgagaccaaggctgctgagtacatcagcaagatgaccaccaaccccatctatgagcacatcggctacgccaccctgctgcgggagaaggtgtcccggcggctgagccgcagcaagaatgagcccaggaagaccaacgtgacccatgaggagcacacagctgtggagaagatcagcagcctggtgagaagagctgccctgacccacaatgacaaccacttcaactatgagaagacccacaacttcaaggtgcacaccttccggggcccccactggtgtgagtactgtgccaacttcatgtggggcctcatcgcccagggcgtgcgctgcagcgactgtggcctgaatgtgcacaagcagtgcagcaagcacgtgcccaatgactgccagcctgacctgaagaggatcaagaaggtgtactgctgtgacctgaccaccctggtgaaggcccacaacacccagaggcccatggtggtggacatctgcatccgggagattgaggcccggggcctgaagtctgagggcctgtacagagtgtctggcttcacagagcacattgaagatgtgaagatggcctttgacagagatggagagaaggctgacatcagcgccaacgtgtacccagacatcaacatcatcaccggggccctgaagctgtacttccgggacctgcccatccctgtgatcacctatgacacctacagcaagttcattgatgctgccaagatcagcaatgctgatgagcggctggaggccgtgcatgaggtgctgatgctgctgcccccagcccactatgagaccctgcgctacctgatgatccacctgaagaaggtgaccatgaatgagaaggacaacttcatgaatgctgagaacctgggcatcgtgtttggccccaccctgatgaggcccccagaggacagcaccctgaccaccctgcatgacatgagataccagaagctgattgtgcagatcctgattgaaaatgaagatgtgctcttctag

SEQ ID NO: 111190 - DNA, 1632 bp, Artificial Sequence
  derived and/or modified sequence
atgacccagacccaccgggccaagagcgccagcagctgccccaaccttttggttccagagacctggccccatcaggtctccgcctcacacgctgggagatctaaacagccgcagggtggcattctaaagatcaatgaggagcatcgtcggggtgccattcaggatctgttagccagtcccgggtttacttttggtaaaagggttgtgttcgattcccactgtctgaaacgccaacacacatttgctgacgggttacattcctcttgtacttctaacgccgaagagtaccagccccccatttggaagagttacctgtaccagctgcagcaagaggctccgaggccgaagaggatcatatgccctagagaggtcgagaaccggccgaagtactatggcagggagtttcacggcattattagccgggagcaagccgatgagctcctcggcggagtagaaggtgcttacatcctccgcgagtcgcagcggcagcctggctgttacactttggctctgcgattcgggaaccagacactaaattaccgcttattccatgacggaaaacatttcgtgggagaaaagcgatttgaatccatccatgatctggtgaccgacggcctcatcacactctacattgagacaaaagccgctgagtatattagcaaaatgaccactaatcctatctatgagcatatcggctacgccacgctgttacgggagaaggtctctcgcagactgtcacgtagcaagaacgagcctcgcaaaactaatgtcacacacgaagaacacacagcagtcgaaaagatatcctcgctggttagaagggcagctctgactcataacgacaaccactttaattacgaaaagacacacaactttaaagtccatacattccggggcccacattggtgtgagtattgtgctaatttcatgtggggattgatcgcccagggcgttcgttgctcagactgcggcttgaatgtgcacaagcagtgtagcaagcacgttccgaatgattgtcagcctgacctgaagcgcataaaaaaggtgtattgttgtgatctgaccactctggtgaaagcccataacacccaacgccctatggtggtcgatatttgcattagggaaatcgaagcaaggggtctaaaatccgagggcttataccgggtgagtggtttcacagagcatatcgaggacgtcaagatggcattcgaccgcgacggtgaaaaggcggacattagtgctaacgtgtacccagacatcaacattattacgggggccctaaaactctatttccgggacctgccgatacctgtgatcacttacgacacctacagcaagtttatcgacgccgccaaaatcagcaatgcggacgagcgcctggaagccgtgcacgaagtcctcatgctactaccaccagcccattatgagacactcaggtacttgatgattcacttgaaaaaggtgactatgaacgagaaagataattttatgaatgcagagaatcttggtatcgtttttggaccaacactgatgaggccccctgaagattccacgctcaccactttgcacgatatgcggtatcagaaactaatagtgcagattctgattgaaaatgaggatgtgctgttttag

SEQ ID NO: 111191 - DNA, 1632 bp, Artificial Sequence
  derived and/or modified sequence
atgacccagacgcatcgggctaagtcagccagcagctgccccaatctgctcgtccctgagacatggcctcaccaggtcagcgcctcccatgcagggaggtccaaacaaccacagggcggtattttgaagatcaatgaagaacacagaagaggcgcaatacaagaccttctggcatcccccggtttcacctttggcaaacgggtggtgttcgactctcactgcctaaagcggcaacataccttcgctgatggcctccattctagctgcacgtcaaacgcggaagagtaccagccgcctatttggaagagttatctgtatcaactgcaacaagaagcacctcggcctaaaaggataatctgtccccgagaagtcgagaaccgcccaaaatattatggtagagagtttcacggaatcatctcacgcgaacaggccgatgagctgcttgggggagtggagggggcatacattctgagagaatcccagcggcagcctggttgttacaccctcgccctccgctttggcaaccagaccctcaattatcgcctcttccacgacggcaagcactttgtgggggaaaagaggttcgagtctatccacgacctcgtgaccgatggcctgatcacactatatattgaaaccaaagctgccgaatatatctcgaaaatgaccacaaaccccatttatgagcacattggctacgccaccttgttacgcgagaaggtgtcgcgtcgcctgagcagaagtaaaaatgagccaagaaaaacaaatgtgacccacgaagaacacaccgcagtggaaaaaatcagcagcctggtgcgaagggccgctctaacccacaatgataatcatttcaattacgaaaagacccacaacttcaaggtacatacattccgtggaccacactggtgcgagtattgtgcgaacttcatgtggggtctaattgcacagggtgttaggtgctccgattgtgggctcaacgtccataaacagtgttccaagcacgtaccaaacgattgtcagccagacctcaaacgcatcaagaaggtctactgctgcgatcttaccactctcgtgaaagcacacaatactcagaggccgatggtggtggatatatgtattcgagagatcgaagccagggggctgaagtcggaaggactgtatcgtgtatctggcttcactgaacacatcgaagacgtcaaaatggcttttgatcgtgacggtgaaaaggcagatatcagcgcgaatgtctatccagacattaatattatcaccggagcgctgaagctgtatttcagagacctaccgataccggtgatcacgtatgacacttacagcaaatttatcgatgccgctaagatttccaatgcagatgaaagactcgaggccgtccacgaagtccttatgttactccctccagctcattatgaaaccctccgttatctgatgattcacctcaaaaaagtgacaatgaacgagaaggataacttcatgaatgccgaaaacctgggtattgtgttcggacctacactgatgcggccacctgaagattcaaccctgaccacactccacgacatgagataccagaaactgattgtccagattcttatcgagaacgaggacgtgctgttttag

SEQ ID NO: 111192 - DNA, 1632 bp, Artificial Sequence
  derived and/or modified sequence
atgacccagacccacagggcaaaaagtgcgtcgtcgtgtcccaacctcctggtcccagaaacctggccgcatcaagtcagcgcttcccatgctggaagaagcaagcagccccagggtggaatcttaaaaattaatgaagagcatcggcggggtgccattcaggacttacttgcaagcccaggatttacatttggaaagcgagtggtgtttgattcccactgtttaaaaaggcaacacacgttcgctgatggtctacattccagctgcactagcaatgctgaagaataccagcctcctatatggaaatcatacttatatcagttacagcaagaggcacctcgtcccaagagaatcatttgtcctcgggaggtggaaaacagaccaaaatattatggaagagagtttcatgggatcatctctcgggagcaggcggatgagcttcttggaggcgtggagggtgcctacatccttagagaaagccagcggcaaccaggatgctacacgctggctctcaggtttggaaaccagaccttaaactacaggctcttccacgacgggaaacactttgtgggtgagaagaggtttgagtcgattcatgatctggtgacagatggcttgataacactgtacatagaaacaaaagctgccgagtacatttcaaaaatgacaactaaccccatctatgaacacattggatatgccaccctactcagagaaaaagtatccagaaggctgagcaggtctaaaaatgaaccaagaaaaacaaacgtcacacatgaagaacacacagcggtggaaaagatctcctccctggttcgaagggctgccctcacacacaacgacaaccacttcaattatgagaagacacacaactttaaggtccacacgttccgaggcccacactggtgtgaatattgtgccaatttcatgtgggggctcatcgcccaaggggtccggtgctcagactgtggattgaacgtacacaaacagtgttccaagcacgttcccaatgactgccaacctgatctcaagaggatcaagaaagtgtactgttgtgacctcacaacacttgtgaaggctcacaacactcagagacccatggtggtagacatatgcattcgggaaattgaagcaagaggattaaaatcggaaggcctttacagagtctctgggttcactgaacacattgaagatgtcaaaatggcatttgacagagatggtgaaaaggccgatatatctgccaatgtctatccagacataaacatcatcactggagcccttaaactgtatttcagagacttacccatccctgtcatcacatatgatacctattccaaatttatagatgcagcaaaaatctccaatgcagatgagaggctggaagccgtccatgaagtgctgatgctgctgcctcctgcccactatgaaaccctccggtacctaatgatccacctcaaaaaggttactatgaatgaaaaagacaatttcatgaatgcagaaaatctggggatcgtgtttgggcccactctgatgaggccccctgaggacagcaccctgaccaccctgcatgatatgcggtaccaaaagctgattgtgcagattttaatagaaaacgaagacgttttattctaa

SEQ ID NO: 111193 - DNA, 1632 bp, Artificial Sequence
  derived and/or modified sequence
atgacccagacccacagagccaagagcgccagcagctgccccaacctgctggtgcccgagacctggccccaccaggtgagcgccagccacgccggcagaagcaagcagccccagggcggcatcctgaagatcaacgaggagcacagaagaggcgccatccaggacctgctggccagccccggcttcaccttcggcaagagagtggtgttcgacagccactgcctgaagagacagcacaccttcgccgacggcctgcacagcagctgcaccagcaacgccgaggagtaccagccccccatctggaagagctacctgtaccagctgcagcaggaggcccccagacccaagagaatcatctgccccagagaggtggagaacagacccaagtactacggcagagagttccacggcatcatcagcagagagcaggccgacgagctgctgggcggcgtggagggcgcctacatcctgagagagagccagagacagcccggctgctacaccctggccctgagattcggcaaccagaccctgaactacagactgttccacgacggcaagcacttcgtgggcgagaagagattcgagagcatccacgacctggtgaccgacggcctgatcaccctgtacatcgagaccaaggccgccgagtacatcagcaagatgaccaccaaccccatctacgagcacatcggctacgccaccctgctgagagagaaggtgagcagaagactgagcagaagcaagaacgagcccagaaagaccaacgtgacccacgaggagcacaccgccgtggagaagatcagcagcctggtgagaagagccgccctgacccacaacgacaaccacttcaactacgagaagacccacaacttcaaggtgcacaccttcagaggcccccactggtgcgagtactgcgccaacttcatgtggggcctgatcgcccagggcgtgagatgcagcgactgcggcctgaacgtgcacaagcagtgcagcaagcacgtgcccaacgactgccagcccgacctgaagagaatcaagaaggtgtactgctgcgacctgaccaccctggtgaaggcccacaacacccagagacccatggtggtggacatctgcatcagagagatcgaggccagaggcctgaagagcgagggcctgtacagagtgagcggcttcaccgagcacatcgaggacgtgaagatggccttcgacagagacggcgagaaggccgacatcagcgccaacgtgtaccccgacatcaacatcatcaccggcgccctgaagctgtacttcagagacctgcccatccccgtgatcacctacgacacctacagcaagttcatcgacgccgccaagatcagcaacgccgacgagagactggaggccgtgcacgaggtgctgatgctgctgccccccgcccactacgagaccctgagatacctgatgatccacctgaagaaggtgaccatgaacgagaaggacaacttcatgaacgccgagaacctgggcatcgtgttcggccccaccctgatgagaccccccgaggacagcaccctgaccaccctgcacgacatgagataccagaagctgatcgtgcagatcctgatcgagaacgaggacgtgctgttctag

SEQ ID NO: 111194 - protein, 174 aa, Artificial Sequence
  derived and/or modified sequence
MAASSNSSLSGSSVSSVYSEPRSPRELPKYAEEYQPPIWKSYLYQLQQEAPRPKRIICPREVENRPKYYGREFHGIISREQADELLGGVEGAYILRESQRQPGCYTLALRFGNQTLNYRLFHDGKHFVGEKRFESIHDLVTDGLITLYIETKAAEYISKMTTNPIYEHIGYATL

SEQ ID NO: 111195 - protein, 481 aa, Artificial Sequence
  derived and/or modified sequence
MAASSNSSLSGSSVSSVYSEPRSPRELPKYAEEYQPPIWKSYLYQLQQEAPRPKRIICPREVENRPKYYGREFHGIISREQADELLGGVEGAYILRESQRQPGCYTLALRFGNQTLNYRLFHDGKHFVGEKRFESIHDLVTDGLITLYIETKAAEYISKMTTNPIYEHIGYATLLREKVSRRLSRSKNEPRKTNVTHEEHTAVEKISSLVRRAALTHNDNHFNYEKTHNFKVHTFRGPHWCEYCANFMWGLIAQGVRCSDCGLNVHKQCSKHVPNDCQPDLKRIKKVYCCDLTTLVKAHNTQRPMVVDICIREIEARGLKSEGLYRVSGFTEHIEDVKMAFDRDGEKADISANVYPDINIITGALKLYFRDLPIPVITYDTYSKFIDAAKISNADERLEAVHEVLMLLPPAHYETLRYLMIHLKKVTMNEKDNFMNAENLGIVFGPTLMRPPEDSTLTTLHDMRYQKLIVQILIENEDVLF

SEQ ID NO: 111196 - DNA, 525 bp, Artificial Sequence
  derived and/or modified sequence
atggctgcctcctccaactcaagcctaagcgggtcctctgtgtcaagcgtttactccgagcctcggagtccgagagaactgcctaagtatgctgaggaatatcagccgcccatctggaagagctatctctatcaacttcagcaggaagccccaaggcccaagagaattatctgcccccgagaggtggaaaaccgacccaaatactacggccgtgaattccacggcatcatctctcgtgaacaagctgatgagttactgggcggggtagaaggagcatacatactcagggagtctcagagacaacccgggtgctacacactcgctttgcggttcggaaaccagaccctcaattaccgactttttcacgatgggaagcattttgtcggtgaaaagagattcgaatctatacatgacctggtgactgacgggctcattaccctctatattgagaccaaggcagcagagtatatatctaagatgacaacaaatcccatctacgaacacattggctacgcaacgctgtag

SEQ ID NO: 111197 - DNA, 525 bp, Artificial Sequence
  derived and/or modified sequence
atggccgccagcagcaacagcagcctgagcggcagctctgtgtcctctgtgtacagcgagcccaggagcccccgggagctgcccaagtatgcagaggagtaccagccccccatctggaagagctacctgtaccagctgcagcaggaggccccccggcccaagaggatcatctgcccccgggaggtggagaaccggcccaagtactacggccgggagttccacggcatcatcagccgggagcaggctgatgagctgctgggcggcgtggagggcgcctacatcctgcgggagagccagaggcagcccggctgctacaccctggccctgcgctttggaaaccagaccctgaactaccgcctcttccatgatggcaagcactttgtgggggagaagagatttgagagcatccatgacctggtgacagatggcctcatcaccctgtacatcgagaccaaggctgctgagtacatcagcaagatgaccaccaaccccatctatgagcacatcggctacgccaccctgtag

SEQ ID NO: 111198 - DNA, 525 bp, Artificial Sequence
  derived and/or modified sequence
atggccgccagcagcaacagcagcctgagcggcagcagcgtgagcagcgtctatagcgagccgaggagtccaagagaacttccaaagtatgcagaagaataccaaccccccatatggaagtcatacctttaccagctccaacaggaagctcctcggcctaaacgcatcatctgtcccagagaggtggagaaccgccccaagtactacggccgggagttccatggaatcatcagccgagaacaggcagacgagctactgggcggcgtagaaggcgcttatatattgcgcgagtcccagcggcaaccgggatgttacacactggcgctgagattcggaaaccagactttaaattataggctcttccacgatgggaagcattttgtgggagagaagcggttcgaatctatccatgaccttgtaacagatgggctaatcaccctgtacattgagacaaaggcagccgagtacataagtaaaatgacgaccaatccaatctatgagcacattggctacgctaccctgtag

SEQ ID NO: 111199 - DNA, 525 bp, Artificial Sequence
  derived and/or modified sequence
atggccgcttccagcaattcctctctcagcggcagtagcgtcagctctgtttattcggagccgaggtccccaagagagctccctaagtacgccgaagagtaccagccacctatatggaagagttacttgtatcaactccagcaggaagccccaagaccgaaacggataatctgcccgagggaggtggagaaccgcccaaagtattacggccgagagtttcacgggatcatctctagagaacaggccgacgaactgctgggaggggtggaaggcgcttacatccttcgcgagtcacagcggcagcccggttgctacactctggccctccgatttggcaatcagactctgaattataggctgtttcatgacgggaaacattttgtcggtgaaaagcgctttgagagtattcatgatctcgttactgacgggttgataacattgtacatcgagactaaggctgcagaatatatttccaagatgacaactaatccaatttatgagcacatcggatatgcaactctttag

SEQ ID NO: 111200 - DNA, 539 bp, Artificial Sequence
  derived and/or modified sequence
gcgaggggcgcgcggagatggcagcgtccagcaactccagcctgtccggctcgtcggtgtcctccgtctattctgaacccagaagcccgagagagcttccaaaatatgctgaagaataccagcctcctatatggaaatcatacttatatcagttacagcaagaggcacctcgtcccaagagaatcatttgtcctcgggaggtggaaaacagaccaaaatattatggaagagagtttcatgggatcatctctcgggagcaggcggatgagcttcttggaggcgtggagggtgcctacatccttagagaaagccagcggcaaccaggatgctacacgctggctctcaggtttggaaaccagaccttaaactacaggctcttccacgacgggaaacactttgtgggtgagaagaggtttgagtcgattcatgatctggtgacagatggcttgataacactgtacatagaaacaaaagctgccgagtacatttcaaaaatgacaactaaccccatctatgaacacattggatatgccacccta

SEQ ID NO: 111201 - DNA, 525 bp, Artificial Sequence
  derived and/or modified sequence
atggccgccagcagcaacagcagcctgagcggcagcagcgtgagcagcgtgtacagcgagcccagaagccccagagagctgcccaagtacgccgaggagtaccagccccccatctggaagagctacctgtaccagctgcagcaggaggcccccagacccaagagaatcatctgccccagagaggtggagaacagacccaagtactacggcagagagttccacggcatcatcagcagagagcaggccgacgagctgctgggcggcgtggagggcgcctacatcctgagagagagccagagacagcccggctgctacaccctggccctgagattcggcaaccagaccctgaactacagactgttccacgacggcaagcacttcgtgggcgagaagagattcgagagcatccacgacctggtgaccgacggcctgatcaccctgtacatcgagaccaaggccgccgagtacatcagcaagatgaccaccaaccccatctacgagcacatcggctacgccaccctgtag

SEQ ID NO: 111202 - protein, 241 aa, Artificial Sequence
  derived and/or modified sequence
MAEEQPQVELFVKAGSDGAKIGNCPFSQRLFMVLWLKGVTFNVTTVDTKRRTETVQKLCPGGQLPFLLYGTEVHTDTNKIEEFLEAVLCPPRYPKLAALNPESNTAGLDIFAKFSAYIKNSNPALNDNLEKGLLKALKVLDNYLTSPLPEEVDETSAEDEGVSQRKFLDGNELTLADCNLLPKLHIVQVVCKKYRGFTIPEAFRGVHRYLSNAYAREEFASTCPDDEEIELAYEQVAKALK

SEQ ID NO: 111203 - DNA, 1362 bp, Artificial Sequence
  derived and/or modified sequence
atggatgctgaggagtatcagccacccatctggaaatcctatctctatcaactgcagcaggaggcccctcgcccgaaacgcataatctgccctcgcgaggttgagaaccgcccaaaatactacggccgggaatttcacggcataatcagcagggagcaggcagatgagctcttaggcggggttgagggcgcgtacatcttgcgagagtctcagcgtcagcctggctgctacactttagctctacggtttggtaaccagacacttaactaccgcttatttcacgatggcaaacatttcgtaggggagaagaggttcgagtctattcacgacctggtcacagacgggttaatcacattgtatatagaaaccaaggccgccgaatacatttctaaaatgaccactaatcctatttacgaacacattggttacgccaccctactcagggagaaagtttccaggaggttgtccagatcaaagaacgaacctagaaagacaaacgtaactcatgaagaacacaccgccgtggagaagatatcaagcctggttagaagagcagccctaacccacaatgataatcatttcaattatgagaagacccataatttcaaggtccacacatttagaggaccacactggtgcgagtattgtgctaatttcatgtggggattgattgcccagggggtgaggtgctctgactgcggtcttaacgtgcacaagcagtgcagcaagcatgtgcccaatgactgtcagccagatctgaagcgcattaagaaagtgtattgttgtgatttgacaacccttgttaaggcacacaatacccagcgtcctatggtcgtggacatttgtatcagagagatagaagctaggggcctgaagagcgaaggcctgtacagagtgtctggttttaccgaacacatcgaagacgtcaagatggccttcgatagggacggtgagaaggcggacatctctgcgaacgtctaccccgacatcaacatcattactggggcgcttaagctgtactttcgcgacctgcctattccagtaatcacctatgatacatattccaagttcattgatgctgccaagataagtaatgccgatgaacggctcgaggcagttcatgaagtgctgatgttgctaccgccagcacactatgagactttgcgctacctgatgatccacctcaagaaagtaacaatgaatgagaaagacaattttatgaacgcagagaacctgggtattgtgttcggacccactctcatgcgaccaccagaggattccactctcactaccctgcatgacatgcgataccaaaagcttattgtacagatattaattgaaaatgaggacgtgctgttctag

SEQ ID NO: 111204 - DNA, 1362 bp, Artificial Sequence
  derived and/or modified sequence
atggatgctgaggagtaccagccccccatctggaagagctacctgtaccagctgcagcaggaggccccccggcccaagaggatcatctgcccccgggaggtggagaaccggcccaagtactacggccgggagttccacggcatcatcagccgggagcaggctgatgagctgctgggcggcgtggagggcgcctacatcctgcgggagagccagaggcagcccggctgctacaccctggccctgcgctttggaaaccagaccctgaactaccgcctcttccatgatggcaagcactttgtgggggagaagagatttgagagcatccatgacctggtgacagatggcctcatcaccctgtacatcgagaccaaggctgctgagtacatcagcaagatgaccaccaaccccatctatgagcacatcggctacgccaccctgctgcgggagaaggtgtcccggcggctgagccgcagcaagaatgagcccaggaagaccaacgtgacccatgaggagcacacagctgtggagaagatcagcagcctggtgagaagagctgccctgacccacaatgacaaccacttcaactatgagaagacccacaacttcaaggtgcacaccttccggggcccccactggtgtgagtactgtgccaacttcatgtggggcctcatcgcccagggcgtgcgctgcagcgactgtggcctgaatgtgcacaagcagtgcagcaagcacgtgcccaatgactgccagcctgacctgaagaggatcaagaaggtgtactgctgtgacctgaccaccctggtgaaggcccacaacacccagaggcccatggtggtggacatctgcatccgggagattgaggcccggggcctgaagtctgagggcctgtacagagtgtctggcttcacagagcacattgaagatgtgaagatggcctttgacagagatggagagaaggctgacatcagcgccaacgtgtacccagacatcaacatcatcaccggggccctgaagctgtacttccgggacctgcccatccctgtgatcacctatgacacctacagcaagttcattgatgctgccaagatcagcaatgctgatgagcggctggaggccgtgcatgaggtgctgatgctgctgcccccagcccactatgagaccctgcgctacctgatgatccacctgaagaaggtgaccatgaatgagaaggacaacttcatgaatgctgagaacctgggcatcgtgtttggccccaccctgatgaggcccccagaggacagcaccctgaccaccctgcatgacatgagataccagaagctgattgtgcagatcctgattgaaaatgaagatgtgctcttctag

SEQ ID NO: 111205 - DNA, 1362 bp, Artificial Sequence
  derived and/or modified sequence
atggacgccgaggagtaccagccccccatctggaagagctacctgtaccagctgcagcaagaggccccccggcccaaacgcatcatctgcccgagggaggtcgaaaacaggcctaaatactatggccgagaattccatggcataataagcagggaacaggccgacgagctgctagggggagtcgaaggagcatacatcctgagggaatcacagaggcaacctgggtgctacacactggccctccgctttggaaaccagacccttaattaccggctctttcacgacggcaaacacttcgtcggggagaagcgattcgagtctatccacgatctggttactgatggtttaatcaccctgtacatcgaaactaaggccgcagaatatatttccaagatgacgaccaacccgatctacgaacacatcggctacgcaacattacttcgcgagaaagtttccaggcgcctctcccgatccaagaacgaaccacgaaagacgaatgtgactcatgaggaacataccgcagtggagaaaatcagtagtctggtgcgccgcgctgccctcactcacaacgataatcactttaactacgagaagacccacaactttaaagtgcacacgtttcgaggtccgcactggtgcgagtactgtgccaacttcatgtgggggctgatcgctcagggcgtacggtgctcagactgtggacttaacgtgcacaagcagtgctccaagcatgtccccaatgattgtcaacccgatctcaagaggataaagaaggtctattgctgtgatttaaccaccctagtgaaagcccacaatacccagcggcctatggtcgtggacatctgtattcgtgaaattgaggcccggggcctcaagagcgagggcctctaccgtgtctcaggatttaccgaacatattgaggatgtgaaaatggccttcgacagggatggcgaaaaagcggatatctcagctaacgtctatcctgacattaacatcatcaccggtgccctcaaactgtattttcgggacctgcccatcccggttattacatacgatacctattctaaattcattgatgccgcaaagatctcaaatgctgatgaaagactcgaggccgtgcacgaagtcctcatgctgctccccccggcccactacgagacactaagatacctgatgattcaccttaagaaggtgactatgaatgaaaaagacaactttatgaatgccgaaaacttggggatcgtgttcgggcccacactgatgcgaccccccgaagacagtacgctcacaactcttcacgacatgcgttaccagaagctgattgtgcagattctgatcgagaacgaagatgttttgttctag

SEQ ID NO: 111206 - DNA, 1362 bp, Artificial Sequence
  derived and/or modified sequence
atggatgccgaggagtaccagcccccaatctggaaaagttacctatatcagcttcagcaggaggctcccaggccgaaacggataatctgtccaagggaggtagagaacaggccaaagtactacggtagggaattccacggcattatcagtcgcgagcaggccgatgaattgttaggcggagtggagggcgcatatatcctcagggaatcccagcgccagcctggatgttacaccctggccctgcggttcgggaaccagaccctgaactacagactctttcatgatggaaaacattttgtgggagagaagaggttcgaaagcatacatgatttagtgacggatgggttgattacactctacattgagactaaggctgccgaatacatttcaaagatgactacaaatcctatctatgaacacatcgggtatgccactctgttgagggagaaagtttccaggcgactgagtaggtccaagaacgaaccgagaaagacgaatgtgacgcacgaagagcacaccgctgtagagaaaatctcttccctggttcgtagagctgcactgacccacaatgataatcactttaattacgaaaagacccacaattttaaagtccataccttcaggggaccccattggtgcgagtattgcgctaattttatgtggggacttatcgcacagggagtcaggtgctcagattgtggcctcaatgtgcacaaacagtgttccaagcacgttccaaacgactgtcaacctgacttgaagaggatcaagaaggtgtattgctgtgacttaacaaccctagtgaaagctcacaatacacagcgtcccatggtcgtagacatctgtatacgggagatagaagcgagaggactgaagtccgagggtctgtaccgcgtgagcgggtttacagaacacattgaggatgtcaagatggcgttcgacagagatggagagaaggctgatatctctgctaatgtttacccagatattaatatcatcaccggggctttaaaattatatttcagggacctgcccattcccgtaatcacatacgacacctacagtaagttcatagacgcagccaagatttctaatgctgatgaacgattggaggctgtgcacgaggtgctgatgctgctcccccctgcccattacgaaactctacggtatctgatgatccatctcaaaaaagtgacaatgaacgagaaagacaattttatgaatgccgaaaacttgggaattgtctttggccctacactgatgagaccaccagaggattccacactgacaacgttgcacgatatgcggtatcaaaagctgatcgtacaaattcttatcgagaatgaagatgtccttttctag

SEQ ID NO: 111207 - DNA, 1362 bp, Artificial Sequence
  derived and/or modified sequence
atggacgccgaggagtaccagccccccatctggaagagctacctgtaccagctgcagcaggaggcccccagacccaagagaatcatctgccccagagaggtggagaacagacccaagtactacggcagagagttccacggcatcatcagcagagagcaggccgacgagctgctgggcggcgtggagggcgcctacatcctgagagagagccagagacagcccggctgctacaccctggccctgagattcggcaaccagaccctgaactacagactgttccacgacggcaagcacttcgtgggcgagaagagattcgagagcatccacgacctggtgaccgacggcctgatcaccctgtacatcgagaccaaggccgccgagtacatcagcaagatgaccaccaaccccatctacgagcacatcggctacgccaccctgctgagagagaaggtgagcagaagactgagcagaagcaagaacgagcccagaaagaccaacgtgacccacgaggagcacaccgccgtggagaagatcagcagcctggtgagaagagccgccctgacccacaacgacaaccacttcaactacgagaagacccacaacttcaaggtgcacaccttcagaggcccccactggtgcgagtactgcgccaacttcatgtggggcctgatcgcccagggcgtgagatgcagcgactgcggcctgaacgtgcacaagcagtgcagcaagcacgtgcccaacgactgccagcccgacctgaagagaatcaagaaggtgtactgctgcgacctgaccaccctggtgaaggcccacaacacccagagacccatggtggtggacatctgcatcagagagatcgaggccagaggcctgaagagcgagggcctgtacagagtgagcggcttcaccgagcacatcgaggacgtgaagatggccttcgacagagacggcgagaaggccgacatcagcgccaacgtgtaccccgacatcaacatcatcaccggcgccctgaagctgtacttcagagacctgcccatccccgtgatcacctacgacacctacagcaagttcatcgacgccgccaagatcagcaacgccgacgagagactggaggccgtgcacgaggtgctgatgctgctgccccccgcccactacgagaccctgagatacctgatgatccacctgaagaaggtgaccatgaacgagaaggacaacttcatgaacgccgagaacctgggcatcgtgttcggccccaccctgatgagaccccccgaggacagcaccctgaccaccctgcacgacatgagataccagaagctgatcgtgcagatcctgatcgagaacgaggacgtgctgttctag

SEQ ID NO: 111208 - protein, 287 aa, Artificial Sequence
  derived and/or modified sequence
MFSEELWLENEKKCAVVRKSKQGRKRQELLAVAFGVKVHTFRGPHWCEYCANFMWGLIAQGVRCSDCGLNVHKQCSKHVPNDCQPDLKRIKKVYCCDLTTLVKAHNTQRPMVVDICIREIEARGLKSEGLYRVSGFTEHIEDVKMAFDRDGEKADISANVYPDINIITGALKLYFRDLPIPVITYDTYSKFIDAAKISNADERLEAVHEVLMLLPPAHYETLRYLMIHLKKVTMNEKDNFMNAENLGIVFGPTLMRPPEDSTLTTLHDMRYQKLIVQILIENEDVLF

SEQ ID NO: 111209 - protein, 192 aa, Artificial Sequence
  derived and/or modified sequence
MAASSNSSLSGSSVSSDAEEYQPPIWKSYLYQLQQEAPRPKRIICPREVENRPKYYGREFHGIISREQADELLGGVEGAYILRESQRQPGCYTLALRNPTKISNADERLEAVHEVLMLLPPAHYETLRYLMIHLKKVTMNEKDNFMNAENLGIVFGPTLMRPPEDSTLTTLHDMRYQKLIVQILIENEDVLF

SEQ ID NO: 111210 - DNA, 864 bp, Artificial Sequence
  derived and/or modified sequence
atgttctctgaggagctttggctggaaaacgaaaagaagtgtgcggttgtccgcaaatctaagcagggtcgaaaacggcaggagctactggccgtagccttcggggtgaaggtgcataccttccgcggaccgcactggtgcgaatattgtgccaattttatgtggggcctcattgctcagggagttcgatgtagcgactgcgggctcaacgtgcataaacagtgtagcaagcacgtgccgaatgattgccagccagacctgaagcgcattaagaaggtgtactgctgcgacctgactaccttagtaaaggcgcataacacacagcggcccatggtggtcgacatttgtatccgtgaaatcgaggctcgaggcctgaaatccgagggactgtatagagtttccggatttaccgaacacattgaagacgtgaagatggcctttgacagggacggcgagaaggcagacatctcagccaatgtctatcccgatattaatatcattactggcgcacttaagctctattttagagacttgcctattccggtgattacatatgacacatatagcaaatttatagacgccgcaaagatatcaaatgccgacgagaggctggaggccgtccacgaggtgttgatgctgctccccccagcgcactacgaaacactgcgctatctgatgatacatctgaagaaagtgaccatgaacgagaaggacaattttatgaatgctgaaaacctgggaatagtatttgggcccacgctgatgaggccccctgaggactccacgctgacaacactacatgacatgaggtatcagaagctgattgtgcagatcctgattgaaaacgaggacgttctgttctag

SEQ ID NO: 111211 - DNA, 864 bp, Artificial Sequence
  derived and/or modified sequence
atgttttctgaggagctgtggctggagaatgagaagaagtgtgctgtggtgaggaagagcaagcagggcaggaagaggcaggagctgctggccgtggccttcggcgtgaaggtgcacaccttccggggcccccactggtgtgagtactgtgccaacttcatgtggggcctcatcgcccagggcgtgcgctgcagcgactgtggcctgaatgtgcacaagcagtgcagcaagcacgtgcccaatgactgccagcctgacctgaagaggatcaagaaggtgtactgctgtgacctgaccaccctggtgaaggcccacaacacccagaggcccatggtggtggacatctgcatccgggagattgaggcccggggcctgaagtctgagggcctgtacagagtgtctggcttcacagagcacattgaagatgtgaagatggcctttgacagagatggagagaaggctgacatcagcgccaacgtgtacccagacatcaacatcatcaccggggccctgaagctgtacttccgggacctgcccatccctgtgatcacctatgacacctacagcaagttcattgatgctgccaagatcagcaatgctgatgagcggctggaggccgtgcatgaggtgctgatgctgctgcccccagcccactatgagaccctgcgctacctgatgatccacctgaagaaggtgaccatgaatgagaaggacaacttcatgaatgctgagaacctgggcatcgtgtttggccccaccctgatgaggcccccagaggacagcaccctgaccaccctgcatgacatgagataccagaagctgattgtgcagatcctgattgaaaatgaagatgtgctcttctag

SEQ ID NO: 111212 - DNA, 864 bp, Artificial Sequence
  derived and/or modified sequence
atgttcagcgaggagctgtggctggagaacgagaagaagtgcgccgttgtccgcaaatcgaagcagggacggaagagacaggaactgctcgctgttgccttcggcgtcaaggttcatacttttcgcggaccacattggtgcgagtactgcgctaatttcatgtggggcctgattgcccagggagtgcggtgctcagattgtgggctgaatgtacacaaacaatgtagcaagcacgttcccaacgattgccagccagacctaaaacgcataaaaaaggtgtactgctgtgaccttaccactttggttaaagcccacaatacccaaagacccatggtggtagacatttgtatccgggaaatcgaggcaagaggtttaaagagtgagggcctttatcgtgttagtggattcaccgagcatatagaggatgtaaagatggcttttgatcgagatggcgaaaaggccgatatcagtgcaaacgtctatcctgacattaacataattactggcgcacttaagctatacttccgggatctgccaatccccgtgattacgtacgatacatattctaagtttattgatgccgcaaagatctccaacgccgacgaacgacttgaggccgttcatgaagtgcttatgctgctccctcccgcacactatgagaccttaaggtatttgatgatccacctcaagaaagttacaatgaacgaaaaggataactttatgaacgcggagaacctgggaatcgtcttcggacctactctaatgaggccgcctgaagattctacactgactaccctgcacgatatgagatatcaaaagttaatcgtgcagatactgatcgagaacgaagacgtgctcttttag

SEQ ID NO: 111213 - DNA, 864 bp, Artificial Sequence
  derived and/or modified sequence
atgtttagcgaggaattgtggcttgaaaatgagaagaagtgtgctgtagtgaggaaaagcaaacaggggagaaagagacaagagctgctcgcagtagcctttggtgtgaaggttcacacattccgaggacctcattggtgcgagtactgcgcaaatttcatgtggggactgattgcacagggggttagatgcagcgactgcggcctaaacgtccacaaacagtgcagcaagcatgttcctaacgactgtcagccagatctgaaacggatcaagaaggtgtattgctgcgatctgacaactcttgtgaaagcacataacactcaaaggcctatggtagttgatatctgcatccgggagatcgaggctcgtggactgaaatctgaagggctgtacagagtatccgggttcaccgagcacattgaggacgtcaagatggctttcgaccgggatggagaaaaggccgacatttctgcaaatgtgtaccctgatattaatatcattactggggctctgaagctgtactttcgggatctgccgatccctgtgatcacttatgatacatactctaagttcatcgacgcagccaagataagtaacgctgatgagcgtctcgaggccgttcacgaggttttaatgttgttgcctccagctcattatgagactctcaggtatctgatgatccaccttaaaaaagtcactatgaatgagaaggacaatttcatgaacgccgaaaacctgggcattgtatttgggcctactctaatgcgtccacccgaagactcaacactgacaactctgcacgacatgcgttatcagaagctcatcgttcaaatactgatagaaaacgaagacgtgctcttctag

SEQ ID NO: 111214 - DNA, 1195 bp, Artificial Sequence
  derived and/or modified sequence
agcacagggcttcctgggctctgcagagcaaactggaaagagctgggatccaggcactatgttctctgaagaactgtggctggaaaatgagaaaaagtgtgctgtggttcggaagtctaagcagggcaggaaacgccaagaactgctggccgtagccttcggggtgaaggtccacacgttccgaggcccacactggtgtgaatattgtgccaatttcatgtgggggctcatcgcccaaggggtccggtgctcagactgtggattgaacgtacacaaacagtgttccaagcacgttcccaatgactgccaacctgatctcaagaggatcaagaaagtgtactgttgtgacctcacaacacttgtgaaggctcacaacactcagagacccatggtggtagacatatgcattcgggaaattgaagcaagaggattaaaatcggaaggcctttacagagtctctgggttcactgaacacattgaagatgtcaaaatggcatttgacagagatggtgaaaaggccgatatatctgccaatgtctatccagacataaacatcatcactggagcccttaaactgtatttcagagacttacccatccctgtcatcacatatgatacctattccaaatttatagatgcagcaaaaatctccaatgcagatgagaggctggaagccgtccatgaagtgctgatgctgctgcctcctgcccactatgaaaccctccggtacctaatgatccacctcaaaaaggttactatgaatgaaaaagacaatttcatgaatgcagaaaatctggggatcgtgtttgggcccactctgatgaggccccctgaggacagcaccctgaccaccctgcatgatatgcggtaccaaaagctgattgtgcagattttaatagaaaacgaagacgttttattctaatccatcagggaaatgagctgaatggccccagcaccatccaagttgacacagctaaaggaataaaaacatttcttaccacttgatttgttttccaagcaagtgctagaatttcctggactgcagaggatcgctgagtggggtactgtgtctcatagacatgcgccacctccacgtgagaacaagggtgaaggtgagggaagcccctcaccttgggtcttttgctgtgcctcctatgtatgtctggtttgctggaagagtgattaatacatcttt

SEQ ID NO: 111215 - DNA, 864 bp, Artificial Sequence
  derived and/or modified sequence
atgttcagcgaggagctgtggctggagaacgagaagaagtgcgccgtggtgagaaagagcaagcagggcagaaagagacaggagctgctggccgtggccttcggcgtgaaggtgcacaccttcagaggcccccactggtgcgagtactgcgccaacttcatgtggggcctgatcgcccagggcgtgagatgcagcgactgcggcctgaacgtgcacaagcagtgcagcaagcacgtgcccaacgactgccagcccgacctgaagagaatcaagaaggtgtactgctgcgacctgaccaccctggtgaaggcccacaacacccagagacccatggtggtggacatctgcatcagagagatcgaggccagaggcctgaagagcgagggcctgtacagagtgagcggcttcaccgagcacatcgaggacgtgaagatggccttcgacagagacggcgagaaggccgacatcagcgccaacgtgtaccccgacatcaacatcatcaccggcgccctgaagctgtacttcagagacctgcccatccccgtgatcacctacgacacctacagcaagttcatcgacgccgccaagatcagcaacgccgacgagagactggaggccgtgcacgaggtgctgatgctgctgccccccgcccactacgagaccctgagatacctgatgatccacctgaagaaggtgaccatgaacgagaaggacaacttcatgaacgccgagaacctgggcatcgtgttcggccccaccctgatgagaccccccgaggacagcaccctgaccaccctgcacgacatgagataccagaagctgatcgtgcagatcctgatcgagaacgaggacgtgctgttctag

SEQ ID NO: 111216 - protein, 274 aa, Artificial Sequence
  derived and/or modified sequence
MFSEELWLENEKKCAVVRKSKQGRKRQELLAVAFGVKVGVKGGFLWPPLKLFACSQISSLVRRAALTHNDNHFNYEKTHNFKVHTFRGPHWCEYCANFMWGLIAQGVRCSGLKSEGLYRVSGFTEHIEDVKMAFDRDGEKADISANVYPDINIITGALKLYFRDLPIPVITYDTYSKFIDAAKISNADERLEAVHEVLMLLPPAHYETLRYLMIHLKKVTMNEKDNFMNAENLGIVFGPTLMRPPEDSTLTTLHDMRYQKLIVQILIENEDVLF

SEQ ID NO: 111217 - DNA, 825 bp, Artificial Sequence
  derived and/or modified sequence
atgttcagtgaggagctttggctcgagaatgagaagaagtgcgccgtcgtgcggaaatctaagcagggcaggaaacgccaggagttactggcggtagctttcggtgtgaaggtgggggttaaaggggggttcctctggccccccctcaagttgttcgcctgctctcagatcagtagtctcgttcgtagagctgccttgacccataacgacaatcacttcaattacgagaagacacacaacttcaaagtccacactttcagaggccctcactggtgcgaatactgcgctaatttcatgtggggcctgattgcacagggtgtccggtgtagcggcctcaaatccgagggcttgtatcgggtatccggcttcaccgagcacatcgaggatgtaaaaatggcatttgacagagacggagagaaggccgatatatcagccaatgtttacccagacattaatattattacaggtgccttgaagttgtacttcagagaccttcctataccagtcattacatatgatacatactccaagttcattgacgcagcgaagatttccaacgcggacgaacgtctcgaggctgtgcacgaggtgctgatgctgctcccacctgcgcattatgaaacactgcggtatctgatgatacacctgaagaaagtgaccatgaacgaaaaggacaattttatgaatgctgaaaacctgggaatcgtgttcggccccaccctcatgaggccccccgaggactccactttgaccaccttgcacgacatgagataccagaagttgatcgtgcagattcttatcgagaacgaggatgtgttgttttag

SEQ ID NO: 111218 - DNA, 825 bp, Artificial Sequence
  derived and/or modified sequence
atgttttctgaggagctgtggctggagaatgagaagaagtgtgctgtggtgaggaagagcaagcagggcaggaagaggcaggagctgctggccgtggccttcggcgtgaaggtgggcgtgaagggcggcttcctgtggccacccctgaagctgtttgcctgcagccagatcagcagcctggtgcggcgggccgccctgacccacaatgacaaccacttcaactatgagaagacccacaacttcaaggtgcacaccttccggggcccccactggtgtgagtactgtgccaacttcatgtggggcctgattgcccagggcgtgcgctgcagcggcctgaagtctgagggcctgtacagagtgtctggcttcacagagcacattgaagatgtgaagatggcctttgacagagatggagagaaggctgacatcagcgccaacgtgtacccagacatcaacatcatcactggagccctgaagctgtacttccgggacctgcccatccctgtgatcacctatgacacctacagcaagttcattgatgctgccaagatcagcaatgctgatgagcggctggaggccgtgcatgaggtgctgatgctgctgcccccagcccactatgagaccctgcgctacctgatgatccacctgaagaaggtgaccatgaatgagaaggacaacttcatgaatgctgagaacctgggcatcgtgtttggccccaccctgatgaggcctcctgaggacagcaccctgaccaccctgcatgacatgagataccagaagctgattgtgcagatcctgattgaaaatgaagatgtgctcttctag

SEQ ID NO: 111219 - DNA, 825 bp, Artificial Sequence
  derived and/or modified sequence
atgttcagcgaggagctgtggctggagaacgagaagaagtgcgccgttgttagaaagtctaagcagggacggaagaggcaagagctgcttgctgttgccttcggcgtgaaagtcggcgtcaaaggcggttttctctggccccccctgaaattgtttgcatgctcccaaattagctctctggttagacgggctgcgctgacacataatgacaatcattttaactacgagaaaacacacaatttcaaagtgcacactttccgcggaccgcactggtgcgagtattgtgccaatttcatgtggggtctgattgcacagggggttcgatgctccggcttaaagtccgagggcctttatagggtttcaggattcacagagcacatagaggatgtcaaaatggccttcgacagggatggagagaaggccgatatcagcgccaacgtctaccctgatataaatatcatcaccggcgcgctgaaactgtattttcgggacctgccgattcctgttatcacttacgacacatatagtaaattcattgatgcagctaaaataagcaatgccgacgagaggctggaggcggttcatgaagttcttatgctgttgccacccgctcattatgaaaccctccggtatctcatgattcacttaaagaaagtcacaatgaacgaaaaggacaatttcatgaacgcggaaaatttggggatcgtattcgggccaaccttgatgcggccacctgaagacagtacactcaccactttacacgatatgagatatcagaagctcatagtgcaaatcctgattgaaaatgaagacgttctcttctag

SEQ ID NO: 111220 - DNA, 825 bp, Artificial Sequence
  derived and/or modified sequence
atgttttccgaggagctttggctcgagaacgaaaagaagtgtgcagtcgtgcgaaagagcaaacagggacgcaaacgccaggagctgctcgccgtggcttttggcgtcaaagtgggtgtgaaaggaggctttctgtggcctcccctcaagttgttcgcttgctcccaaatctcaagtttagtccggagggctgcactgactcacaatgataatcatttcaattacgaaaagacacacaatttcaaagttcacaccttccgcggaccacattggtgtgagtactgcgccaacttcatgtggggtcttattgcacagggcgtgaggtgtagtggcctgaaaagcgagggattgtaccgcgtcagcggtttcaccgagcatatcgaagatgtcaagatggcttttgatcgggacggtgagaaggccgacattagcgccaacgtgtacccagacatcaacataatcacgggcgcattaaaattgtattttagagacctcccgatccctgtgatcacgtacgatacgtattcgaagtttatcgacgcagccaaaatttctaacgcagacgagagactcgaagctgtgcacgaggtgcttatgctgctgcctcctgcccactacgaaaccctccgatacctgatgatccacctgaaaaaggtcactatgaacgagaaagacaattttatgaacgctgagaacctcggtattgtttttggacctacactgatgagacccccagaggactctacgctaactacactgcacgatatgcggtatcaaaaactgatagtccagatccttattgagaatgaggacgtcctgttctag

SEQ ID NO: 111221 - DNA, 825 bp, Artificial Sequence
  derived and/or modified sequence
atgttctctgaagaactgtggctggaaaatgagaaaaagtgtgctgtggttcggaagtctaagcagggcaggaaacgccaagaactgctggccgtagccttcggggtgaaggtgggtgtcaaaggcggctttctttggccccctctcaaactctttgcctgttcacagatctcctccctggttcgaagggctgccctcacacacaacgacaaccacttcaattatgagaagacacacaactttaaggtccacacgttccgaggcccacactggtgtgaatattgtgccaatttcatgtgggggctcatcgcccaaggggtccggtgctcaggattaaaatcggaaggcctttacagagtctctgggttcactgaacacattgaagatgtcaaaatggcatttgacagagatggtgaaaaggccgatatatctgccaatgtctatccagacataaacatcatcactggagcccttaaactgtatttcagagacttacccatccctgtcatcacatatgatacctattccaaatttatagatgcagcaaaaatctccaatgcagatgagaggctggaagccgtccatgaagtgctgatgctgctgcctcctgcccactatgaaaccctccggtacctaatgatccacctcaaaaaggttactatgaatgaaaaagacaatttcatgaatgcagaaaatctggggatcgtgtttgggcccactctgatgaggccccctgaggacagcaccctgaccaccctgcatgatatgcggtaccaaaagctgattgtgcagattttaatagaaaacgaagacgttttattctaa

SEQ ID NO: 111222 - DNA, 825 bp, Artificial Sequence
  derived and/or modified sequence
atgttcagcgaggagctgtggctggagaacgagaagaagtgcgccgtggtgagaaagagcaagcagggcagaaagagacaggagctgctggccgtggccttcggcgtgaaggtgggcgtgaagggcggcttcctgtggccccccctgaagctgttcgcctgcagccagatcagcagcctggtgagaagagccgccctgacccacaacgacaaccacttcaactacgagaagacccacaacttcaaggtgcacaccttcagaggcccccactggtgcgagtactgcgccaacttcatgtggggcctgatcgcccagggcgtgagatgcagcggcctgaagagcgagggcctgtacagagtgagcggcttcaccgagcacatcgaggacgtgaagatggccttcgacagagacggcgagaaggccgacatcagcgccaacgtgtaccccgacatcaacatcatcaccggcgccctgaagctgtacttcagagacctgcccatccccgtgatcacctacgacacctacagcaagttcatcgacgccgccaagatcagcaacgccgacgagagactggaggccgtgcacgaggtgctgatgctgctgccccccgcccactacgagaccctgagatacctgatgatccacctgaagaaggtgaccatgaacgagaaggacaacttcatgaacgccgagaacctgggcatcgtgttcggccccaccctgatgagaccccccgaggacagcaccctgaccaccctgcacgacatgagataccagaagctgatcgtgcagatcctgatcgagaacgaggacgtgctgttctag

SEQ ID NO: 111223 - protein, 286 aa, Artificial Sequence
  derived and/or modified sequence
MFSEELWLENEKKCAVVRKSKQGRKRQELLAVAFGVKVGVKGGFLWPPLKLFACSQISSLVRRAALTHNDNHFNYEKTHNFKVHTFRGPHWCEYCANFMWGLIAQGVRCSDCGLNVHKQCSKHVPNDCQPDLKRIKKVYCCDLTTLVKAHNTQRPMVVDICIREIEARGLKSEGLYRVSGFTEHIEDVKMAFDREISNADERLEAVHEVLMLLPPAHYETLRYLMIHLKKVTMNEKDNFMNAENLGIVFGPTLMRPPEDSTLTTLHDMRYQKLIVQILIENEDVLF

SEQ ID NO: 111224 - DNA, 861 bp, Artificial Sequence
  derived and/or modified sequence
atgttttctgaggagctttggctggagaatgagaagaagtgtgccgtggtgaggaaatcaaagcagggaaggaagcgccaagaactgctggccgtggccttcggcgtgaaggtgggcgttaaaggcgggttcctgtggccccccctaaaactgttcgcctgcagccagatcagcagcctggtgagacgcgctgctctgactcacaatgacaaccacttcaactacgagaagacacataacttcaaagtacacaccttccgagggcctcattggtgcgagtactgtgcaaacttcatgtggggcctgatcgcacagggggtcaggtgttctgactgtggcctgaacgtgcataaacagtgttctaagcacgtgcctaatgactgtcagccagatttgaagcggatcaagaaggtgtattgttgcgacctaacgaccctagttaaagcgcacaacacccaaaggcctatggtcgtggacatctgcattagagagatcgaagcaagggggctgaagagtgagggcctgtacagagtctccggattcactgaacatatagaagacgtgaaaatggcattcgatcgcgaaatctcaaatgccgatgaaaggctcgaggcggtgcatgaggtgctcatgcttctgccaccggcccactacgagactctacggtacctgatgatccacctcaaaaaagtgaccatgaatgaaaaggacaactttatgaacgctgagaacctcgggatagtatttggaccgaccctaatgcgaccacccgaggattccactctcaccacactgcacgacatgagataccagaagctcattgttcagatcctaatcgagaatgaggacgtcctgttctag

SEQ ID NO: 111225 - DNA, 861 bp, Artificial Sequence
  derived and/or modified sequence
atgttttctgaggagctgtggctggagaatgagaagaagtgtgctgtggtgaggaagagcaagcagggcaggaagaggcaggagctgctggccgtggccttcggcgtgaaggtgggcgtgaagggcggcttcctgtggccacccctgaagctgtttgcctgcagccagatcagcagcctggtgcggcgggccgccctgacccacaatgacaaccacttcaactatgagaagacccacaacttcaaggtgcacaccttccggggcccccactggtgtgagtactgtgccaacttcatgtggggcctgattgcccagggcgtgcgctgcagcgactgtggcctgaatgtgcacaagcagtgcagcaagcacgtgcccaatgactgccagcctgacctgaagaggatcaagaaggtgtactgctgtgacctgaccaccctggtgaaggcccacaacacccagaggcccatggtggtggacatctgcatccgggagattgaggcccggggcctgaagtctgagggcctgtacagagtgtctggcttcacagagcacattgaagatgtgaagatggcctttgaccgggagatcagcaatgctgatgagcggctggaggccgtgcatgaggtgctgatgctgctgcccccagcccactatgagaccctgcgctacctgatgatccacctgaagaaggtgaccatgaatgagaaggacaacttcatgaatgctgagaacctgggcatcgtgtttggccccaccctgatgaggcctcctgaggacagcaccctgaccaccctgcatgacatgagataccagaagctgattgtgcagatcctgattgaaaatgaagatgtgctcttctag

SEQ ID NO: 111226 - DNA, 861 bp, Artificial Sequence
  derived and/or modified sequence
atgttcagcgaggagctgtggctggagaacgagaagaagtgcgccgtcgtgaggaagagcaagcagggtcgcaaaagacaggaactcctggccgttgcgtttggcgtgaaggtgggtgtcaaagggggcttcttgtggccccctctgaagctcttcgcatgctcccagatttccagcctcgtgcgccgtgcagcactgacgcataacgacaaccacttcaattacgaaaagacccacaacttcaaggtgcacacatttaggggcccgcattggtgcgaatactgtgctaatttcatgtggggcctgattgcacagggcgtgcgatgcagtgactgtggcctgaatgtacataaacagtgcagcaaacatgttcctaatgactgccaacccgacctaaaacgaataaagaaagtctactgttgcgatctcaccaccctggtcaaagcccacaatacacaacgacctatggtggttgacatttgcatcagggagatcgaggccagaggattgaagagtgagggactgtacagggtgagcggcttcaccgagcacattgaagatgtgaaaatggctttcgacagagaaatctctaatgcggatgaaaggctggaagctgttcacgaagtgctgatgctgctacctccagctcactacgagaccttgcggtatctgatgatccatttaaaaaaggtgactatgaatgagaaagacaactttatgaacgccgaaaatctggggattgtctttggacccaccctgatgcggccgcctgaggactccacactcaccacgttgcatgacatgaggtatcagaagttgattgtccagattctgattgaaaacgaagatgttctcttctag

SEQ ID NO: 111227 - DNA, 861 bp, Artificial Sequence
  derived and/or modified sequence
atgttcagcgaggagttgtggctggaaaacgaaaagaagtgtgccgtggtgcgcaagtcaaagcaggggagaaagagacaggagctcctcgccgtggcctttggagttaaggtgggggtaaagggcggttttctgtggccacctttgaaactgtttgcctgttcacaaattagctctttagtgaggcgggctgccctgacccacaacgacaatcactttaactacgagaaaactcacaattttaaagtgcataccttccgaggtcctcactggtgcgagtactgcgccaattttatgtggggactgattgcccagggtgtacggtgctcagactgtgggctgaacgtacacaagcagtgcagcaagcacgtgcccaacgactgccagccggatctcaagagaatcaaaaaggtttactgttgcgatctcacaacactcgtgaaggcccacaacacccagaggcctatggtcgtggacatttgcattagggagatcgaggcaagaggcctcaagtccgagggcttataccgggtgtccggcttcaccgaacatatagaagatgtcaagatggccttcgatcgagagatcagtaatgccgatgaaaggctggaggccgtccatgaggtgctcatgctactgccacccgctcactatgaaactctgcgatacctgatgatccatttaaaaaaagttaccatgaatgaaaaggacaactttatgaatgctgaaaatcttggaatcgtattcgggcctacattgatgagaccaccggaagatagtactttgaccacactacatgacatgcgctatcagaagctgattgtgcagatcctaatcgagaatgaggatgtgctgttctag

SEQ ID NO: 111228 - DNA, 861 bp, Artificial Sequence
  derived and/or modified sequence
atgttctctgaagaactgtggctggaaaatgagaaaaagtgtgctgtggttcggaagtctaagcagggcaggaaacgccaagaactgctggccgtagccttcggggtgaaggtgggtgtcaaaggcggctttctttggccccctctcaaactctttgcctgttcacagatctcctccctggttcgaagggctgccctcacacacaacgacaaccacttcaattatgagaagacacacaactttaaggtccacacgttccgaggcccacactggtgtgaatattgtgccaatttcatgtgggggctcatcgcccaaggggtccggtgctcagactgtggattgaacgtacacaaacagtgttccaagcacgttcccaatgactgccaacctgatctcaagaggatcaagaaagtgtactgttgtgacctcacaacacttgtgaaggctcacaacactcagagacccatggtggtagacatatgcattcgggaaattgaagcaagaggattaaaatcggaaggcctttacagagtctctgggttcactgaacacattgaagatgtcaaaatggcatttgacagagaaatctccaatgcagatgagaggctggaagccgtccatgaagtgctgatgctgctgcctcctgcccactatgaaaccctccggtacctaatgatccacctcaaaaaggttactatgaatgaaaaagacaatttcatgaatgcagaaaatctggggatcgtgtttgggcccactctgatgaggccccctgaggacagcaccctgaccaccctgcatgatatgcggtaccaaaagctgattgtgcagattttaatagaaaacgaagacgttttattctaa

SEQ ID NO: 111229 - DNA, 861 bp, Artificial Sequence
  derived and/or modified sequence
atgttcagcgaggagctgtggctggagaacgagaagaagtgcgccgtggtgagaaagagcaagcagggcagaaagagacaggagctgctggccgtggccttcggcgtgaaggtgggcgtgaagggcggcttcctgtggccccccctgaagctgttcgcctgcagccagatcagcagcctggtgagaagagccgccctgacccacaacgacaaccacttcaactacgagaagacccacaacttcaaggtgcacaccttcagaggcccccactggtgcgagtactgcgccaacttcatgtggggcctgatcgcccagggcgtgagatgcagcgactgcggcctgaacgtgcacaagcagtgcagcaagcacgtgcccaacgactgccagcccgacctgaagagaatcaagaaggtgtactgctgcgacctgaccaccctggtgaaggcccacaacacccagagacccatggtggtggacatctgcatcagagagatcgaggccagaggcctgaagagcgagggcctgtacagagtgagcggcttcaccgagcacatcgaggacgtgaagatggccttcgacagagagatcagcaacgccgacgagagactggaggccgtgcacgaggtgctgatgctgctgccccccgcccactacgagaccctgagatacctgatgatccacctgaagaaggtgaccatgaacgagaaggacaacttcatgaacgccgagaacctgggcatcgtgttcggccccaccctgatgagaccccccgaggacagcaccctgaccaccctgcacgacatgagataccagaagctgatcgtgcagatcctgatcgagaacgaggacgtgctgttctag

SEQ ID NO: 111230 - DNA, 579 bp, Artificial Sequence
  derived and/or modified sequence
atggctgctagttctaattcctcactcagtggatctagcgtttcaagtgacgcggaagagtaccagccccctatttggaagagttacctgtatcagcttcagcaagaggccccgcgcccaaagagaattatctgtcctagagaggtagagaacagacccaagtattacgggcgggagtttcatggcattatcagccgagaacaagccgacgagctgctggggggtgtggaaggagcctacattctgagggaatcccagaggcaacctggctgttatacgctagccctccgcaatccgaccaaaatttcaaacgccgatgagcgcctggaggccgtgcacgaggttctcatgttactgccaccggcacactacgagacactgagatacctgatgatccaccttaaaaaagtaaccatgaatgaaaaggataacttcatgaatgctgagaaccttggaattgtgtttggccccaccctgatgaggccgccggaagactccactcttaccacccttcacgacatgcggtaccagaagcttatcgtgcagattctgattgagaatgaggatgtacttttctag

SEQ ID NO: 111231 - DNA, 579 bp, Artificial Sequence
  derived and/or modified sequence
atggccgccagcagcaacagcagcctgagcggcagctctgtgtccagtgatgctgaggagtaccagccccccatctggaagagctacctgtaccagctgcagcaggaggccccccggcccaagaggatcatctgcccccgggaggtggagaaccggcccaagtactacggccgggagttccacggcatcatcagccgggagcaggctgatgagctgctgggcggcgtggagggcgcctacatcctgcgggagagccagaggcagcccggctgctacaccctggccctgaggaaccccaccaagatcagcaatgctgatgagcggctggaggccgtgcatgaggtgctgatgctgctgcccccagcccactatgagaccctgcgctacctgatgatccacctgaagaaggtgaccatgaatgagaaggacaacttcatgaatgctgagaacctgggcatcgtgtttggccccaccctgatgaggcctcctgaggacagcaccctgaccaccctgcatgacatgagataccagaagctgattgtgcagatcctgattgaaaatgaagatgtgctcttctag

SEQ ID NO: 111232 - DNA, 579 bp, Artificial Sequence
  derived and/or modified sequence
atggccgccagcagcaacagcagcctgagcggcagcagcgtgagctctgacgccgaggagtatcagcctcccatatggaagagctacttgtaccaactacaacaggaagctcctaggcctaaaagaatcatatgccccagagaagtcgaaaataggccgaagtactacggaagggagttccatgggatcatttctagggagcaggcagacgaactgctcggaggagtggaaggagcatacattctccgtgaaagccagcggcaacccgggtgctacaccctggctctccgaaatcccacaaagatttcaaatgctgatgagaggctggaggccgtccacgaggttcttatgctgctcccaccggctcattatgagacattgagatacctgatgattcaccttaaaaaagtgactatgaacgagaaggacaacttcatgaacgcggagaaccttggaattgtgttcggacccactttaatgaggcccccagaagactctactttgacaaccctgcacgacatgaggtaccagaagctcattgtgcaaatcttgattgagaacgaggatgtccttttttag

SEQ ID NO: 111233 - DNA, 579 bp, Artificial Sequence
  derived and/or modified sequence
atggccgctagcagcaactcttctttgagtggttccagtgtctcaagtgacgccgaagaatatcagccaccaatttggaagtcttacctctatcagctccagcaagaagcgcctcgacccaaacgtatcatctgccccagagaggtagagaatagacccaaatactatggccgagagtttcatgggattatcagccgggaacaggctgacgagttactgggaggcgttgaaggagcttatatcctgagggaatcccagcggcaacctggatgctacaccctggcgcttcgcaaccccacaaagatatcaaatgccgatgagaggcttgaggcagtgcacgaagtcctcatgctcctgccgcctgctcattacgagactctacgctacctaatgattcacctcaaaaaagttacaatgaatgaaaaagataacttcatgaatgcagagaatctaggcatcgtctttgggcctacccttatgaggcccccagaagactcaacattgacaactctacacgacatgcgttatcagaagctgatcgtacagattctaatcgagaacgaagatgtcttattctag

SEQ ID NO: 111234 - DNA, 2608 bp, Artificial Sequence
  derived and/or modified sequence
actcgaagtgcggcgggagaggcgggagcccaggagagggtgcgggagctggcggggcggctcggagctgccaggacgccctggtcccagccgcgcacaggggagcgtggacggcagaggggctcggcgggagccgagatccgcccgtcccggctgcccctcggcctccctctgctcccacctaccccctgacacccatagaaaagcgtgcaaaggcgcggagcgggacggaaaccacaaataaatagcggcggcggcagcgcgtcatctggtggagcaggaagtgcaggcagagtccggaggctggtgctttctgcgcgtccccaggactttgccatgggctgggggccgcggaggctgcgagcggccgggcgagggcagcggcggcggcgtccgcaccggggctgagcgagcagcgacgcgaggggcgcgcggagatggcagcgtccagcaactccagcctgtccggctcgtcggtgtcctccgatgctgaagaataccagcctcctatatggaaatcatacttatatcagttacagcaagaggcacctcgtcccaagagaatcatttgtcctcgggaggtggaaaacagaccaaaatattatggaagagagtttcatgggatcatctctcgggagcaggcggatgagcttcttggaggcgtggagggtgcctacatccttagagaaagccagcggcaaccaggatgctacacgctggctctcagaaatcccaccaaaatctccaatgcagatgagaggctggaagccgtccatgaagtgctgatgctgctgcctcctgcccactatgaaaccctccggtacctaatgatccacctcaaaaaggttactatgaatgaaaaagacaatttcatgaatgcagaaaatctggggatcgtgtttgggcccactctgatgaggccccctgaggacagcaccctgaccaccctgcatgatatgcggtaccaaaagctgattgtgcagattttaatagaaaacgaagacgttttattctaatccatcagggaaatgagctgaatggccccagcaccatccaagttgacacagctaaaggaataaaaacatttcttaccacttgatttgttttccaagcaagtgctagaatttcctggactgcagaggatcgctgagtggggtactgtgtctcatagacatgcgccacctccacgtgagaacaagggtgaaggtgagggaagcccctcaccttgggtcttttgctgtgcctcctatgtatgtctggtttgctggaagagtgattaatacatctttaatttattaaaaaacaatgtagacctttaaacttcagtcttattggtaataaaagggaacttaattcatacaggtacttgatacagttatacattttccacttacaaaaagaagacaattctgttaaatgaaacgtgtatcgtaaaatgtatttttattttacccacgagaatgttgttatttttagcaaatagaactcaatgcagtgcattggttattaccctgtgtaccttgtccctcattttgctgtgacaccctgaaaaagctgaccacaaatgcagtattatcttgacatacctctgtcctcctcagtgctttttaatgaaatttcacctgccccttgtgttcctgctttggatagtttttgctcttaagcattggcattcttctattgtatggtatgtatttatagcaattgtaggatggtctgaaatgtccacacactttctatgcatacaaattttgtgaattcccaaagtatgctttggaattggtcatagtcttttcgtatcatgagtgtgtatcccagaagatacagaatgcggtcattttacctgaaattatttgagaacactggatgtatctggtctgtgtaaaaagttagcacttaccctcttttcttcctggccaagccctctgaattcatctgttaatatcaaattgtatttttgccacatttctgtattggtgaaaagcgaatctgcagaataactgtcaacgtttttcattcttgttttacaaacctattttttaaagtgagaataaggttggtttttaccaaatatttgttcctccttgacaaaagtagctctgtgtggataatatgattttattactacagttccagtcacttggttatatttatcttagcatgagcctttcacaccaagatttctatattttgtaacataggtgaaatatttaaaacatcaaaaactgtaaatctagatttttaaaaaatccaactgcaatgtcttttcctttgattgagatgatttgtgtaaactcaccagtcttgctttggagtgagcagaagagaatgactattttacgtggagcatcattgtgtgactgttgacctggacagtcccaagggctatgcagatggactccattggcacagggaggtttgacctcttccctgctattatccctcctcccaactgtacagatttgtttgttgtagtttatgtacttcttgatactgtcaaaaaattatctggaaatggttttattttgtgaagtgaacaatactttgtaatttatgatagtgtaaatggaaggcaaagcatcacatgtattaaattcttctgtctatt

SEQ ID NO: 111235 - DNA, 579 bp, Artificial Sequence
  derived and/or modified sequence
atggccgccagcagcaacagcagcctgagcggcagcagcgtgagcagcgacgccgaggagtaccagccccccatctggaagagctacctgtaccagctgcagcaggaggcccccagacccaagagaatcatctgccccagagaggtggagaacagacccaagtactacggcagagagttccacggcatcatcagcagagagcaggccgacgagctgctgggcggcgtggagggcgcctacatcctgagagagagccagagacagcccggctgctacaccctggccctgagaaaccccaccaagatcagcaacgccgacgagagactggaggccgtgcacgaggtgctgatgctgctgccccccgcccactacgagaccctgagatacctgatgatccacctgaagaaggtgaccatgaacgagaaggacaacttcatgaacgccgagaacctgggcatcgtgttcggccccaccctgatgagaccccccgaggacagcaccctgaccaccctgcacgacatgagataccagaagctgatcgtgcagatcctgatcgagaacgaggacgtgctgttctag

SEQ ID NO: 111236 - protein, 259 aa, Artificial Sequence
  derived and/or modified sequence
MSKYKLIMLRHGEGAWNKENRFCSWVDQKLNSEGMEEARNCGKQLKALNFEFDLVFTSVLNRSIHTAWLILEELGQEWVPVESSWRLNERHYGALIGLNREQMALNHGEEQVRLWRRSYNVTPPPIEESHPYYQEIYNDRRYKVCDVPLDQLPRSESLKDVLERLLPYWNERIAPEVLRGKTILISAHGNSSRALLKHLEGISDEDIINITLPTGVPILLELDENLRAVGPHQFLGDQEAIQAAIKKVEDQGKVKQAKK

SEQ ID NO: 111237 - protein, 78 aa, Artificial Sequence
  derived and/or modified sequence
MSKYKLIMLRHGEGAWNKENRFCSWVDQKLNSEGMEEARNCGKQLKALNFEFDLVFTSVLNRSIHTAWLILEELGQEW

SEQ ID NO: 111238 - DNA, 780 bp, Artificial Sequence
  derived and/or modified sequence
atgtctaagtataagcttatcatgctgagacacggagagggagcttggaacaaagagaatagattctgctcttgggtggaccaaaaattgaatagcgaggggatggaggaggcccggaattgcggtaagcagttgaaggctcttaacttcgaatttgacctcgtttttacttctgtgttgaaccgaagcattcatacggcctggctgatccttgaggagttaggccaggagtgggtaccagtcgaaagcagttggcgccttaacgaacgacattacggtgccttgatcggattaaacagggagcagatggctctgaaccacggagaggaacaggtgcgcctgtggcggcgttcctacaacgtgacacctccacctattgaagaaagccatccatactatcaagaaatctataatgacagaaggtacaaggtgtgcgacgtccccctggaccagttaccaaggagcgaaagcttaaaggatgtgctggaaaggctgctgccgtactggaacgagaggatagccccagaagttctaagggggaaaacaattctgatctccgcccacggtaacagttctagggcactgctgaaacatctcgagggtatcagtgatgaggacataatcaatatcaccctgcctactggcgtccctattcttctggagctggatgaaaacctgcgtgcggtggggcctcatcagttcctcggcgatcaggaagcaattcaggcggccatcaagaaagtggaggaccagggcaaggtcaaacaggcgaaaaaatag

SEQ ID NO: 111239 - DNA, 780 bp, Artificial Sequence
  derived and/or modified sequence
atgtccaaatacaaactaattatgcttcgccacggagagggggcatggaataaggagaaccgcttctgtagctgggtcgaccagaaattgaactctgaaggaatggaagaggcaaggaactgcggcaagcagcttaaagcactaaatttcgagttcgacttagtgtttacatctgtcctgaaccgatctatacacactgcctggttgatcctcgaagaactgggccaggagtgggtaccagtggaatcaagttggcgactgaacgaacggcattatggtgctctgattggccttaaccgtgaacagatggccctgaaccacggggaggaacaggtgcgactctggcgccgaagctacaatgttactccccctccaatcgaggagagtcatccatattaccaggaaatttacaacgacaggagatataaggtatgcgacgtaccactggatcagctacccagaagcgagtctctgaaggacgtgcttgagaggcttctgccatactggaacgagaggatcgctcccgaggtgttgagaggcaagactattttaattagcgcccatggcaattcctctcgtgccctactgaagcacttagagggtatcagtgacgaggacatcatcaatataactctgcccacaggagtacctattctgcttgagttggatgagaatctccgtgccgtcggacctcaccagtttttaggggatcaggaggccatccaggccgccatcaaaaaagtagaagatcaaggaaaagtcaaacaggcaaaaaaatag

SEQ ID NO: 111240 - DNA, 780 bp, Artificial Sequence
  derived and/or modified sequence
atgtctaagtacaagctgattatgctgcgccacggcgagggggcatggaataaagaaaatcgcttctgttcatgggtggatcagaaactgaactctgaagggatggaagaggccagaaattgcggaaaacagctgaaagctctcaatttcgagtttgatctagtttttacttctgtcctcaacagaagtatacacacagcatggctgattctcgaggagctgggccaggaatgggtacccgtcgaatcatcttggaggctgaatgaaaggcattatggcgctctgataggattaaacagggagcagatggccctgaatcacggggaggagcaggtgcgcctgtggagaaggtcatacaatgttacaccgcctcccatcgaggagagccacccttactatcaagagatatataacgatcggagatataaggtatgtgatgttccattggatcagctcccacgaagtgagtccctaaaggacgtcctggagcgcctgctgccatactggaacgagaggatagcaccagaggtgttaagaggtaagaccattctgataagcgcccatggaaactctagtcgagcactgttgaaacatctagagggtatcagtgacgaagatatcattaacatcaccctgccaaccggcgtgcctattctgctggaactcgacgaaaatttacgcgctgtagggccacaccagttcctgggtgaccaggaggccatacaagctgctataaaaaaggtggaggaccagggcaaggtaaaacaagctaagaagtag

SEQ ID NO: 111241 - DNA, 237 bp, Artificial Sequence
  derived and/or modified sequence
atgtctaagtacaagcttattatgctgcgacatggcgaaggagcttggaacaaggaaaaccggttctgttcatgggtggatcagaaactgaactcagagggtatggaggaggcgcgcaattgcggaaaacagctgaaagcgctcaattttgagttcgatctcgtttttacaagtgtcctgaatcggagcatacacaccgcatggctgattcttgaagaacttggtcaagaatggtag

SEQ ID NO: 111242 - DNA, 780 bp, Artificial Sequence
  derived and/or modified sequence
atgagcaagtacaagctgatcatgctgcggcatggagagggcgcctggaacaaggaaaatcgcttctgctcctgggtggaccagaagctgaacagcgagggcatggaggaggccaggaactgtgggaagcagctgaaggccctgaactttgaatttgacctggtgttcacctctgtgctgaacagaagcatccacacagcctggctgatcctggaggagctgggccaggagtgggtgcctgtggagagctcctggaggctgaatgaaagacactacggggccctgattggcctgaaccgggagcagatggccctgaaccacggggaggagcaggtgcggctgtggaggaggagctacaacgtgaccccaccacccatcgaggagagccacccctactaccaggagatctacaatgaccggcgctacaaggtgtgtgatgtgcccctggaccagctgcccaggtctgagagcctgaaggatgtgctggagcggctgctgccctactggaatgaaagaattgcccctgaggtgctgcggggcaagaccatcctgatcagcgcccacggcaacagcagccgggccctgctgaagcacctggagggcatcagtgatgaggacatcatcaacatcaccctgcccaccggggtgcccatcctgctggagctggatgagaacctgcgggctgtgggcccccaccagttcctgggggaccaggaggccatccaggccgccatcaagaaggtggaggaccagggcaaggtgaagcaggccaagaagtag

SEQ ID NO: 111243 - DNA, 237 bp, Artificial Sequence
  derived and/or modified sequence
atgagcaagtacaagctgatcatgctgcggcatggagagggcgcctggaacaaggaaaatcgcttctgctcctgggtggaccagaagctgaacagcgagggcatggaggaggccaggaactgtgggaagcagctgaaggccctgaactttgaatttgacctggtgttcacctctgtgctgaacagaagcatccacacagcctggctgatcctggaggagctgggccaggagtggtag

SEQ ID NO: 111244 - DNA, 780 bp, Artificial Sequence
  derived and/or modified sequence
atgagcaagtacaagctgatcatgctgcggcacggcgagggcgcctggaataaggagaaccggttctgctcttgggtagatcagaagcttaactctgagggaatggaagaagccaggaattgtggtaaacaactgaaagctctgaatttcgagttcgaccttgttttcacgtcggtactgaataggtcaattcataccgcatggctgatcttggaggagttgggccaggagtgggtaccagtcgagagcagctggaggttgaatgagcgccattatggggcattgataggcctgaacagagagcagatggctttgaatcacggcgaggagcaggtacgactgtggagaagatcgtataacgtcacacccccaccaattgaagaaagtcacccctactatcaggaaatctacaacgaccggcgatataaggtgtgtgacgtgcccctcgatcaactacctcggtctgagtccctgaaggatgttcttgaaaggctcctgccgtattggaatgaaaggattgcccccgaagtgctgaggggtaagacaatcctcatctccgcacacggaaattcctccagggcactcctgaagcacctcgagggtatcagcgatgaggatattatcaacatcaccctgcctacgggagtgccaatcttactcgagctggacgagaacctgcgggcagttggaccccatcagtttcttggggatcaagaagctatccaagcagccatcaagaaggtggaggatcagggtaaagtaaagcaggccaagaaatag

SEQ ID NO: 111245 - DNA, 780 bp, Artificial Sequence
  derived and/or modified sequence
atgagcaagtacaagctgatcatgctgcggcacggcgagggcgcctggaacaaagagaacagattctgttcttgggtggatcagaaacttaatagcgagggtatggaggaggccaggaattgcggaaaacaactcaaagcgcttaacttcgagttcgacctcgtgtttacctctgtactaaaccgaagcatccacacagcttggctgatcctagaagagctggggcaggagtgggtgccagtcgaatcctcctggcggctgaatgagaggcattacggagcactgataggtttgaatagagagcagatggctctgaaccatggcgaggagcaggtgcgcttgtggaggagaagctataacgtgactccgcctccgatcgaagagtcacacccatactatcaggagatatataacgaccggcgctataaggtttgtgatgttccgttggaccagttgccaaggtctgagagtctcaaagatgtcctcgagagactactgccttactggaatgagaggattgccccagaagtgcttagaggcaaaaccattctcatcagtgcccacggcaatagcagccgggctctcttaaagcacctggaaggaatttctgacgaagacattattaacatcaccttacctacaggcgtgccaatactgctcgagctggatgaaaatttgagagcagtgggtccacatcaattcctgggcgatcaggaagcgattcaggccgccatcaaaaaagttgaggatcaaggcaaagttaagcaggccaaaaagtag

SEQ ID NO: 111246 - DNA, 780 bp, Artificial Sequence
  derived and/or modified sequence
atgagcaagtacaagctgatcatgctgcggcacggcgagggcgcctggaataaagagaaccgcttctgctcgtgggtggaccagaaacttaactccgaaggaatggaggaagctcggaactgcggcaagcagctgaaagctctgaatttcgagttcgatctcgtgttcacttcagtcttaaatagatctattcatacggcctggctaattcttgaagaacttggccaggaatgggttcccgtcgagtcaagttggaggttaaacgagcgtcactacggcgccctcattggcctcaatcgtgaacagatggccctaaaccacggcgaggagcaggtaaggttatggcgtaggtcttacaacgttacccctccccctattgaggagagccacccctactaccaggaaatttataatgataggaggtacaaagtgtgcgatgtgcccctcgaccagctgccccggagcgagtccctgaaagatgtgctggaacgactgctcccatattggaatgagcggatcgcacctgaagtcctccggggaaaaaccatattgatttctgcccacggaaattcttctcgggccctgctcaagcaccttgaggggatttccgacgaagacattattaacatcaccctgcctacaggtgttcccatcttgctggagctggacgagaacctccgagcagtgggcccccaccagtttctgggagaccaggaggccattcaagccgcaataaagaaggtagaagaccaggggaaagtgaaacaagcgaagaagtag

SEQ ID NO: 111247 - DNA, 237 bp, Artificial Sequence
  derived and/or modified sequence
atgagcaagtacaagctgatcatgctgcggcacggcgagggcgcctggaataaggagaatagattctgttcttgggtggatcagaagttaaacagcgaagggatggaggaggctcgcaactgcgggaagcagttgaaggccctcaatttcgagtttgatttagtattcacctccgtgttgaacaggtctatccacaccgcctggctcatcctcgaggaattgggccaggagtggtag

SEQ ID NO: 111248 - DNA, 780 bp, Artificial Sequence
  derived and/or modified sequence
atgtccaagtataaactcattatgctgaggcacggcgagggagcttggaacaaggaaaacagattctgctcatgggtcgatcagaaactcaatagcgagggtatggaagaagcccgaaattgcgggaagcagctcaaggccttaaacttcgagttcgatcttgtgttcacctcagtgttaaacaggtcaatacatacggcatggctgattttggaggaactgggccaggagtgggtccccgtagagtcttcctggagactcaatgagcgccactacggcgcactcattggactcaaccgcgaacagatggcccttaatcatggcgaggaacaggtgcggctctggcgccgatcatacaatgtgacgccacccccaatagaggagtcacatccatattatcaggaaatctacaatgatcggagatacaaagtgtgcgacgttccccttgaccagctaccaagaagcgaatccctgaaagatgtgctggaacgtctgctgccttactggaacgaacgcatagcacccgaagtgctccggggtaagaccatactgatttctgcacacgggaacagcagtcgtgctcttttaaagcaccttgaggggatatcagacgaagacatcattaatatcacgcttccaactggtgtccctattcttctggaattggacgaaaaccttcgcgctgtgggccctcatcaatttctcggcgatcaggaggcgattcaggccgcaattaagaaggtggaggaccaggggaaagtaaaacaagcaaaaaaatag

SEQ ID NO: 111249 - DNA, 780 bp, Artificial Sequence
  derived and/or modified sequence
atgagtaagtacaaactaatcatgctgaggcacggcgagggcgcttggaataaggagaatcgtttctgcagctgggttgatcagaagctcaacagtgaaggtatggaagaggcccgtaactgcggaaagcaacttaaggcgttaaatttcgaatttgatctggttttcaccagtgtcctcaatcggtccattcacactgcatggttgatcttagaagaacttggacaggagtgggtacccgttgaaagttcgtggagactgaatgagagacactacggcgcacttattggactgaacagagaacaaatggccttgaatcacggggaagagcaagtcaggctgtggcggagaagctataatgtgacgccacctccaatcgaagaaagtcatccatactaccaggaaatctacaacgaccggagatataaggtgtgcgatgtcccccttgatcaactgcccaggagcgagagcctgaaagatgtgttggaacggcttctgccctactggaatgagcggatcgcacccgaggtccttcgaggtaagactatcctgatttcggcgcatggtaattcatccagagctctcttgaagcacctcgaagggatctccgacgaggacatcatcaatataacactccctaccggagtgcctattttgctggagttggatgagaacttgcgagccgttgggcctcatcagtttcttggggaccaagaggcaatacaggcagcaatcaaaaaggtggaggaccaaggaaaagtgaagcaggccaaaaagtag

SEQ ID NO: 111250 - DNA, 780 bp, Artificial Sequence
  derived and/or modified sequence
atgtcgaagtacaagcttattatgttgcgccacggggagggcgcatggaacaaagagaatcgcttctgctcctgggtagaccagaagctgaacagcgagggcatggaggaagcacgcaactgcgggaagcagctcaaagccctgaacttcgaattcgacttagtgttcacgagcgtcctgaacagatctattcatacggcatggttgatactcgaagagctggggcaggagtgggtcccagttgaaagttcttggcgcctgaacgaacggcattatggcgcattgatcggtcttaacagagagcagatggctttgaaccatggtgaggaacaggtcagattatggcggagaagttacaatgtcacccccccaccaatcgaagaatcacacccttattatcaggagatatataatgataggaggtataaagtatgcgacgtgcccctggaccagctgcctcgcagtgagtcactcaaggatgttctggagaggctactgccatactggaatgaaagaatcgcccctgaagtgttgagaggtaaaacaatccttattagcgcccacggtaattccagtagggccctgctgaagcatcttgaaggtatcagcgatgaagacattattaacatcaccctccctacaggggtgcccattttgctagaactggacgaaaatttgagggctgtgggcccacatcaattcctgggggatcaagaagccatccaagcagcaataaaaaaggtcgaagaccagggaaaggtcaagcaggccaagaaatag

SEQ ID NO: 111251 - DNA, 237 bp, Artificial Sequence
  derived and/or modified sequence
atgagcaagtataaactcatcatgctgagacacggggaaggagcctggaacaaagagaaccgcttttgttcctgggttgatcagaagctgaatagcgaaggcatggaggaagctaggaattgcggcaagcagctgaaggctctcaactttgagttcgacctagtattcacctcagtcctgaaccgctcgatccataccgcttggctcatcctagaggagctgggccaggagtggtag

SEQ ID NO: 111252 - DNA, 1753 bp, Artificial Sequence
  derived and/or modified sequence
cgtctggttcaggggctagaaaagagcgtcgatgccggcggcagtgatgagtcctaggaggcgctggctctttggcggctcggaggagcggctgctgctgctgctgctgctgctggtggcccctttgcagatgtattgctgtccttgaatattagcccatttgaaaacgcctgggaagttcagccatcagtatgtccaagtacaaacttattatgttaagacatggagagggtgcttggaataaggagaaccgtttttgtagctgggtggatcagaaactcaacagcgaaggaatggaggaagctcggaactgtgggaagcaactcaaagcgttaaactttgagtttgatcttgtattcacatctgtccttaatcggtccattcacacagcctggctgatcctggaagagctaggccaggaatgggtgcctgtggaaagctcctggcgtctaaatgagcgtcactatggggccttgatcggtctcaacagggagcagatggctttgaatcatggtgaagaacaagtgaggctctggagaagaagctacaatgtaaccccgcctcccattgaggagtctcatccttactaccaagaaatctacaacgaccggaggtataaagtatgcgatgtgcccttggatcaactgccacggtcggaaagcttaaaggatgttctggagagactccttccctattggaatgaaaggattgctcccgaagtattacgtggcaaaaccattctgatatctgctcatggaaatagcagtagggcactcctaaaacacctggaaggtatctcagatgaagacatcatcaacattactcttcctactggagtccccattcttctggaattggatgaaaacctgcgtgctgttgggcctcatcagttcctgggtgaccaagaggcgatccaagcagccattaagaaagtagaagatcaaggaaaagtgaaacaagctaaaaaatagtctttctcaactgttggctaagaagaaatgcaaaagaagtggcataggagtgtgttatgggtgctgaactctctctctttttccccgattttccagagctaggctgtggagtagagtttgtataggtaactaggtaacttattgtggcccagataaggctttaggatgcctcagtgcttatgtcatagccttatgagttagctttcttgctagccccctagtcggtcaccaaactagtaactagtggggcttaatgaaggtcataagtttctgagatgggagagcaacaagtagagatgaagttaaaggtatttatcattcaagaaatcattattgagtcaccattgacaggcactattctaatcagtagttcactttaatatttaataagattttctgggataacagtaagggatattagataatataccgtatgtatttattactagtcttttcctctaggaaaagggatactttgataattaaggccagaggcccattagttgagaaagtcacagatatatttctccaagaaagccaacaaccaccaccacaatgacagaaatgacaacaaggccctttaacttgtcttctagtttagagacatccttcatttgacatttagtagaattcctctttggccacaagaataagcagcaaataaacaactatggctgttgaggttctcattttggtttgttttaattttttgaactttgggtacctgtaattagtttaaaaataaagttcctgataataaagtgactgaaaatggcatcccc

SEQ ID NO: 111253 - DNA, 2051 bp, Artificial Sequence
  derived and/or modified sequence
gagcgtcgatgccggcggcagtgatgagtcctaggaggcgctggctctttggcggctcggaggagcggctgctgctgctgctgctgctgctggtggcccctttgcagaaaagttctaagaacagtgctgttggctcagtgagatgaggttatcggaaaactttctgtttacacaagagttgcctccttcaaagaagcatgcatggtccttgcaggtcactgtgcccatcactctgcatagtccagctgcactctgcttcacacagctgcctgcccattgcaggcatttgagtttgcaatccatgccttaaactttaaatcacactggctacagcgttgtgtgtttcttggtaaacactgggtaaatcagctcctgtggatgttgactgaagtttctatgtttgcaagctaatcctcagcagtttctttatgtattgctgtccttgaatattagcccatttgaaaacgcctgggaagttcagccatcagtatgtccaagtacaaacttattatgttaagacatggagagggtgcttggaataaggagaaccgtttttgtagctgggtggatcagaaactcaacagcgaaggaatggaggaagctcggaactgtgggaagcaactcaaagcgttaaactttgagtttgatcttgtattcacatctgtccttaatcggtccattcacacagcctggctgatcctggaagagctaggccaggaatgggtgcctgtggaaagctcctggcgtctaaatgagcgtcactatggggccttgatcggtctcaacagggagcagatggctttgaatcatggtgaagaacaagtgaggctctggagaagaagctacaatgtaaccccgcctcccattgaggagtctcatccttactaccaagaaatctacaacgaccggaggtataaagtatgcgatgtgcccttggatcaactgccacggtcggaaagcttaaaggatgttctggagagactccttccctattggaatgaaaggattgctcccgaagtattacgtggcaaaaccattctgatatctgctcatggaaatagcagtagggcactcctaaaacacctggaaggtatctcagatgaagacatcatcaacattactcttcctactggagtccccattcttctggaattggatgaaaacctgcgtgctgttgggcctcatcagttcctgggtgaccaagaggcgatccaagcagccattaagaaagtagaagatcaaggaaaagtgaaacaagctaaaaaatagtctttctcaactgttggctaagaagaaatgcaaaagaagtggcataggagtgtgttatgggtgctgaactctctctctttttccccgattttccagagctaggctgtggagtagagtttgtataggtaactaggtaacttattgtggcccagataaggctttaggatgcctcagtgcttatgtcatagccttatgagttagctttcttgctagccccctagtcggtcaccaaactagtaactagtggggcttaatgaaggtcataagtttctgagatgggagagcaacaagtagagatgaagttaaaggtatttatcattcaagaaatcattattgagtcaccattgacaggcactattctaatcagtagttcactttaatatttaataagattttctgggataacagtaagggatattagataatataccgtatgtatttattactagtcttttcctctaggaaaagggatactttgataattaaggccagaggcccattagttgagaaagtcacagatatatttctccaagaaagccaacaaccaccaccacaatgacagaaatgacaacaaggccctttaacttgtcttctagtttagagacatccttcatttgacatttagtagaattcctctttggccacaagaataagcagcaaataaacaactatggctgttgaggttctcattttggtttgttttaattttttgaactttgggtacctgtaattagtttaaaaataaagttcctgataataaagtgactgaaaatggcatcccc

SEQ ID NO: 111254 - DNA, 1870 bp, Artificial Sequence
  derived and/or modified sequence
ctggttcaggggctagaaaagagcgtcgatgccggcggcagtgatgagtcctaggaggcgctggctctttggcggctcggaggagcggctgctgctgctgctgctgctgctggtggcccctttgcagaatgagcctcgcaggcagtcaccgttctgtcaactgagaggaggagcccgctttggtagtgctgtccttatggcaagaatatatagaagttggagggaagataaactctcttctggatgtctgagatgtattgctgtccttgaatattagcccatttgaaaacgcctgggaagttcagccatcagtatgtccaagtacaaacttattatgttaagacatggagagggtgcttggaataaggagaaccgtttttgtagctgggtggatcagaaactcaacagcgaaggaatggaggaagctcggaactgtgggaagcaactcaaagcgttaaactttgagtttgatcttgtattcacatctgtccttaatcggtccattcacacagcctggctgatcctggaagagctaggccaggaatgggtgcctgtggaaagctcctggcgtctaaatgagcgtcactatggggccttgatcggtctcaacagggagcagatggctttgaatcatggtgaagaacaagtgaggctctggagaagaagctacaatgtaaccccgcctcccattgaggagtctcatccttactaccaagaaatctacaacgaccggaggtataaagtatgcgatgtgcccttggatcaactgccacggtcggaaagcttaaaggatgttctggagagactccttccctattggaatgaaaggattgctcccgaagtattacgtggcaaaaccattctgatatctgctcatggaaatagcagtagggcactcctaaaacacctggaaggtatctcagatgaagacatcatcaacattactcttcctactggagtccccattcttctggaattggatgaaaacctgcgtgctgttgggcctcatcagttcctgggtgaccaagaggcgatccaagcagccattaagaaagtagaagatcaaggaaaagtgaaacaagctaaaaaatagtctttctcaactgttggctaagaagaaatgcaaaagaagtggcataggagtgtgttatgggtgctgaactctctctctttttccccgattttccagagctaggctgtggagtagagtttgtataggtaactaggtaacttattgtggcccagataaggctttaggatgcctcagtgcttatgtcatagccttatgagttagctttcttgctagccccctagtcggtcaccaaactagtaactagtggggcttaatgaaggtcataagtttctgagatgggagagcaacaagtagagatgaagttaaaggtatttatcattcaagaaatcattattgagtcaccattgacaggcactattctaatcagtagttcactttaatatttaataagattttctgggataacagtaagggatattagataatataccgtatgtatttattactagtcttttcctctaggaaaagggatactttgataattaaggccagaggcccattagttgagaaagtcacagatatatttctccaagaaagccaacaaccaccaccacaatgacagaaatgacaacaaggccctttaacttgtcttctagtttagagacatccttcatttgacatttagtagaattcctctttggccacaagaataagcagcaaataaacaactatggctgttgaggttctcattttggtttgttttaattttttgaactttgggtacctgtaattagtttaaaaataaagttcctgataataaagtgactgaaaatggca

SEQ ID NO: 111255 - DNA, 635 bp, Artificial Sequence
  derived and/or modified sequence
acaaggagagagagaggcgggctgagcagccatgtcagcagattctccgaggatggagtgggcccagcagatcttcaggccagcagcttaaatgtaaggagttcagcatagcttgagagttgctggtctccctttactagattctccccctgctaagacgtagctggtgtgtgtaggatatctggagggctggggaggaggaggtggggcctctttatcagtgtggttcctctcactcctgcctaccagatctgtttgtacaggcagcatccctcagctgcttgcatttgatagcttattttgcatctggatttattcctgctgaaaactctatcttgagatgtattgctgtccttgaatattagcccatttgaaaacgcctgggaagttcagccatcagtatgtccaagtacaaacttattatgttaagacatggagagggtgcttggaataaggagaaccgtttttgtagctgggtggatcagaaactcaacagcgaaggaatggaggaagctcggaactgtgggaagcaactcaaagcgttaaactttgagtttgatcttgtattcacatctgtccttaatcggtccattcacacagcctggctgatcctggaagagctaggccaggaatgg

SEQ ID NO: 111256 - DNA, 780 bp, Artificial Sequence
  derived and/or modified sequence
atgagcaagtacaagctgatcatgctgagacacggcgagggcgcctggaacaaggagaacagattctgcagctgggtggaccagaagctgaacagcgagggcatggaggaggccagaaactgcggcaagcagctgaaggccctgaacttcgagttcgacctggtgttcaccagcgtgctgaacagaagcatccacaccgcctggctgatcctggaggagctgggccaggagtgggtgcccgtggagagcagctggagactgaacgagagacactacggcgccctgatcggcctgaacagagagcagatggccctgaaccacggcgaggagcaggtgagactgtggagaagaagctacaacgtgacccccccccccatcgaggagagccacccctactaccaggagatctacaacgacagaagatacaaggtgtgcgacgtgcccctggaccagctgcccagaagcgagagcctgaaggacgtgctggagagactgctgccctactggaacgagagaatcgcccccgaggtgctgagaggcaagaccatcctgatcagcgcccacggcaacagcagcagagccctgctgaagcacctggagggcatcagcgacgaggacatcatcaacatcaccctgcccaccggcgtgcccatcctgctggagctggacgagaacctgagagccgtgggcccccaccagttcctgggcgaccaggaggccatccaggccgccatcaagaaggtggaggaccagggcaaggtgaagcaggccaagaagtag

SEQ ID NO: 111257 - DNA, 237 bp, Artificial Sequence
  derived and/or modified sequence
atgagcaagtacaagctgatcatgctgagacacggcgagggcgcctggaacaaggagaacagattctgcagctgggtggaccagaagctgaacagcgagggcatggaggaggccagaaactgcggcaagcagctgaaggccctgaacttcgagttcgacctggtgttcaccagcgtgctgaacagaagcatccacaccgcctggctgatcctggaggagctgggccaggagtggtag

SEQ ID NO: 111258 - protein, 823 aa, Artificial Sequence
  derived and/or modified sequence
MTVLQEPVQAAIWQALNHYAYRDAVFLAERLYAEVHSEEALFLLATCYYRSGKAYKAYRLLKGHSCTTPQCKYLLAKCCVDLSKLAEGEQILSGGVFNKQKSHDDIVTEFGDSACFTLSLLGHVYCKTDRLAKGSECYQKSLSLNPFLWSPFESLCEIGEKPDPDQTFKFTSLQNFSNCLPNSCTTQVPNHSLSHRQPETVLTETPQDTIELNRLNLESSNSKYSLNTDSSVSYIDSAVISPDTVPLGTGTSILSKQVQNKPKTGRSLLGGPAALSPLTPSFGILPLETPSPGDGSYLQNYTNTPPVIDVPSTGAPSKKSVARIGQTGTKSVFSQSGNSREVTPILAQTQSSGPQTSTTPQVLSPTITSPPNALPRRSSRLFTSDSSTTKENSKKLKMKFPPKIPNRKTKSKTNKGGITQPNINDSLEITKLDSSIISEGKISTITPQIQAFNLQKAAAGLMSLLREMGKGYLALCSYNCKEAINILSHLPSHHYNTGWVLCQIGRAYFELSEYMQAERIFSEVRRIENYRVEGMEIYSTTLWHLQKDVALSVLSKDLTDMDKNSPEAWCAAGNCFSLQREHDIAIKFFQRAIQVDPNYAYAYTLLGHEFVLTEELDKALACFRNAIRVNPRHYNAWYGLGMIYYKQEKFSLAEMHFQKALDINPQSSVLLCHIGVVQHALKKSEKALDTLNKAIVIDPKNPLCKFHRASVLFANEKYKSALQELEELKQIVPKESLVYFLIGKVYKKLGQTHLALMNFSWAMDLDPKGANNQIKEAIDKRYLPDDEEPITQEEQIMGTDESQESSMTDADDTQLHAAESDEF

SEQ ID NO: 111259 - DNA, 2472 bp, Artificial Sequence
  derived and/or modified sequence
atgacagtgctccaggaacctgttcaggcagccatctggcaggcccttaatcattatgcctacagggacgccgtgtttctcgccgaaaggctatatgctgaagtgcactcagaagaggctctctttctacttgctacctgttattacaggtctgggaaagcttacaaggcctataggctgctaaaaggacactcgtgcactacccctcaatgcaaatacctgctggccaaatgctgtgtggatctttcaaagctagcggaaggggaacaaatcttgtccggaggggtgttcaacaagcaaaagagccacgacgacatcgtgactgagttcggtgacagcgcctgctttactctctccttacttggtcacgtctattgcaaaacagacagacttgcaaaaggtagtgagtgctatcagaaaagtttaagtctcaacccctttctgtggagcccatttgaaagcctctgtgagatcggggaaaagccggaccccgaccaaacatttaagtttacttcactccagaacttctctaactgcctacctaacagctgcacgactcaggtgcctaatcactccctctcccaccgccaacctgagacagtgttaaccgagactccgcaggataccattgaattgaatcgtctgaacctggaatccagcaactccaaatacagtctgaataccgactcctcagtgtcctacatcgactcggctgtaattagccctgatactgtgccactggggacgggaaccagcatactctctaagcaggtccagaacaagcctaagactgggagaagcctgttaggaggaccggcggctctgtctcctcttactccatcgtttggcatactgccgctggagaccccgtcaccgggtgatgggagttacctgcagaactacacgaacaccccccctgtgatcgatgtacccagtaccggggcacccagcaagaagtcggtggcaaggatcgggcagaccgggaccaagagcgtgtttagtcaaagcggtaattcgagggaggtaaccccgatccttgcgcaaacgcagtcatcaggcccccagacgagtacaactccacaagtcctgagtccaactattacttctccgccgaatgccctcccccgccggtcatcccggctgttcacatccgacagctctactacgaaggagaactccaaaaagctgaagatgaaatttccgcctaagattcctaatagaaagactaagtcaaaaacaaataagggtgggataacacagcctaacatcaacgacagtctcgagatcacaaaactcgacagctccatcatctctgagggtaaaatcagcactatcacaccccagatccaagctttcaatcttcagaaggccgcggccgggttgatgtccctgctgcgcgagatgggcaaaggctacttggccctgtgttcctacaattgcaaggaggccatcaacattcttagccatcttccctcccatcactacaataccggatgggttttatgccaaattgggagagcatattttgaactgtctgaatacatgcaagcagaaagaattttctcagaagttagacggattgaaaattatcgggtggaagggatggaaatttactcaaccacactgtggcacttacagaaggacgtggctctcagtgtgctgtctaaagatctcacagacatggataaaaatagcccagaagcctggtgcgcagcagggaattgcttcagcctccagagagaacacgatatcgcaatcaagttttttcagcgagcaatacaggttgatccaaactacgcatatgcgtacaccctgctaggtcatgagttcgtgctgactgaggagctcgacaaggcacttgcatgcttccgaaatgccatccgggttaatcctaggcactacaacgcttggtacgggctgggaatgatatattacaagcaggaaaagttcagtctcgctgaaatgcattttcagaaggccctggacattaatccccagagctctgtcctcctttgccacataggcgttgtacaacatgctctgaagaaaagcgaaaaagcccttgatactctgaataaagcaattgtgatcgatcccaagaaccctctctgcaagtttcatagggccagtgtcttgttcgccaacgaaaagtataagtctgccttgcaggaactcgaagagttaaaacagattgtgcctaaggagagtctagtttacttcctgattggcaaagtgtataaaaaactgggtcagacacacctggcacttatgaattttagctgggcaatggacctggaccctaaaggcgccaacaaccaaattaaggaagctatcgataagagatacctgccagacgacgaggaaccaatcactcaagaggaacaaataatgggcactgatgagtctcaggagtcttccatgactgacgctgatgacacacagctccacgccgccgagtccgacgaattttag

SEQ ID NO: 111260 - DNA, 2472 bp, Artificial Sequence
  derived and/or modified sequence
atgacagtgctgcaggagcctgtgcaggccgccatctggcaggccctgaaccactacgcctacagagatgctgtgttcctggccgagcggctgtatgcagaggtgcacagcgaggaggccctcttcctgctggccacctgctactacagaagtggcaaggcctacaaggcctaccgcctgctgaagggccacagctgcaccaccccccagtgcaagtacctgctggccaagtgctgcgtggacctgagcaagctggccgagggggagcagatcctgtctggaggagtcttcaacaagcagaagagccatgatgacatcgtgacagaatttggagacagcgcctgcttcaccctgagcctgctgggccacgtgtactgcaagacagaccggctggccaagggcagcgagtgctaccagaagagcctgagcctgaaccccttcctgtggagcccctttgagagcctgtgtgagatcggggagaagccagaccctgaccagaccttcaagttcaccagcctgcagaacttcagcaactgcctgcccaacagctgcaccacccaggtgcccaaccacagcctgagccaccggcagcctgagaccgtgctgacagagaccccccaggacaccatcgagctgaaccggctgaacctggagagcagcaacagcaagtacagcctgaacacagacagctctgtgtcctacattgattctgctgtgatcagcccagacacagtgcccctgggcaccggcaccagcatcctgagcaagcaggtgcagaacaagcccaagacaggccgcagcctgctgggcggccctgctgccctgagccccctgacccccagctttggcatcctgcccctggagacccccagccctggagatggcagctacctgcagaactacaccaacaccccacctgtgattgatgtgcccagcactggagcccccagcaagaagtctgtggcccgcatcggccagacaggcaccaagtctgtgttcagccagagcggcaacagccgggaggtgacccccatcctggcccagacccagagcagcggcccccagaccagcaccaccccccaggtgctgagccccaccatcaccagccccccaaatgccctgccccggcgcagcagccgcctcttcaccagtgacagcagcaccaccaaggagaacagcaagaagctgaagatgaagtttcctcccaagatccccaacaggaagaccaagagcaagaccaacaagggcggcatcacccagcccaacatcaatgacagcctggagatcaccaagctggacagcagcatcatcagcgagggcaagatcagcaccatcaccccccagatccaggccttcaacctgcagaaggctgctgctggcctgatgagcctgctgcgggagatgggcaagggctacctggccctgtgcagctacaactgcaaggaggccatcaacatcctgagccacctgcccagccaccactacaacacaggctgggtgctgtgccagatcggccgggcctactttgagctgtctgagtacatgcaggccgagcgcatcttcagcgaggtgagaagaattgagaactacagagtggagggcatggagatctacagcaccaccctgtggcacctgcagaaggatgtggccctgtctgtgctgagcaaggacctgacagacatggacaagaacagccctgaggcctggtgtgccgccggcaactgcttcagcctgcagcgggagcatgacatcgccatcaagttcttccagagggccatccaggtggaccccaactatgcctatgcctacaccctgctgggccacgagtttgtgctgacagaggagctggacaaggccctggcctgcttcagaaatgccatccgggtgaaccccaggcactacaatgcctggtacggcctgggcatgatctactacaagcaggagaagttcagcctggccgagatgcacttccagaaggccctggacatcaacccccagagctctgtgctgctgtgccacatcggcgtggtgcagcacgccctgaagaagtctgagaaggccctggacaccctgaacaaggccatcgtgattgaccccaagaaccccctgtgcaagttccaccgggcctctgtgctgtttgccaatgagaagtacaagagcgccctgcaggagctggaggagctgaagcagatcgtgcccaaggagagcctggtgtacttcctgattggcaaggtgtacaagaagctgggccagacccacctggccctgatgaacttctcctgggccatggacctggaccccaagggggccaacaaccagatcaaggaggccatcgacaagcgctacctgcctgatgatgaggagcccatcacccaggaggagcagatcatgggcacagatgagagccaggagagctccatgacagatgctgatgacacccagctgcatgctgctgagagtgatgagttctag

SEQ ID NO: 111261 - DNA, 2472 bp, Artificial Sequence
  derived and/or modified sequence
atgaccgtgctgcaggagcccgtgcaggccgccatctggcaggccctgaaccactacgcctatagggatgccgttttcctggccgaaagattatatgcagaagtgcatagcgaagaggccttgttcctgctggcaacatgttattacaggtccggaaaagcatataaagcataccggctgctgaagggccattcatgtactactccccaatgtaagtacctgctcgcgaagtgctgtgtggacctgtccaaactcgcagagggagaacaaatactatcgggcggggtgtttaataagcaaaagagtcacgatgatatcgtaactgaattcggcgactccgcctgcttcaccctctccctactgggccatgtctactgcaagacagataggctggccaaagggtccgaatgctaccagaaaagcttaagtttaaatccatttttgtggtcgccattcgagtcgttatgtgagataggagaaaaaccggaccccgaccagaccttcaaatttactagcctgcaaaattttagcaactgtctgccaaattcctgtaccacgcaggttcccaatcactcacttagtcaccgccagcccgaaactgtgctcactgaaactccacaggacacaatcgagctcaacagactcaatctggaatcctcaaactctaagtattccttgaacaccgatagcagcgttagctacattgactccgctgtcatttctccagacactgtcccacttggaactggaacctctattctgtccaagcaagtgcagaacaagcccaagaccggacgcagcctcttgggaggacctgccgctttgtcacccctcacccccagtttcggtattctccccctggaaacacctagtcctggagacggaagttacttgcagaattataccaacacccctccggtcatcgacgtaccttcaacgggggcgccatccaagaagtctgtggcacgaattggccagaccggaacaaaaagtgtcttcagtcagtccggtaactcgagagaggttacgcctatcttagcacagacacaatcatctgggcctcagactagtactactccccaggtgctgtctcctactattacctcacccccgaatgcccttcccaggcggagttcacggttatttacctcggacagtagcacgacgaaggagaattccaaaaagctcaaaatgaagttccccccgaagattcccaaccggaaaacaaagtctaaaactaacaaaggagggattactcaaccaaatataaacgattcccttgaaataaccaaactcgactcaagcatcatcagcgagggtaagatctcgacaataacccctcaaattcaggcttttaatcttcagaaggccgccgccggactgatgtcactgctgcgcgaaatggggaagggttatctggccttatgtagctacaattgtaaggaagccatcaatattctgtctcatcttccctctcaccattacaatactggctgggtcctatgccagatcggacgcgcttatttcgaactttcggaatatatgcaggcggagaggattttcagcgaagtgcggagaatcgagaactacagggtcgaagggatggaaatctattccactactctgtggcacctccaaaaggacgttgccctcagtgtgctgtctaaggacctcacagacatggacaaaaatagtcctgaggcatggtgcgccgccggaaactgtttttccctgcaacgggaacatgatattgcaatcaagttcttccaaagggccatccaggtggatccgaattacgcttacgcttacactctgctgggccatgaatttgtgcttactgaggaactggacaaggccttggcctgtttccggaacgcaatccgcgtaaacccacggcattacaatgcatggtacggattaggcatgatttactataagcaagagaagttcagccttgcagagatgcactttcagaaggctctggacatcaatccacagtccagcgtcttgctgtgccatattggcgtcgtccagcacgcactcaagaaaagcgagaaggcgctcgataccctgaataaagccattgtaatcgacccgaaaaacccactttgtaaatttcaccgggcttctgttctgttcgctaatgagaaatataaatccgcactccaggaactggaggagttgaaacagatcgttcccaaagaatccctggtctacttcctgattggaaaggtctataaaaagttgggtcaaacacacttagcattaatgaatttcagctgggcgatggatttggatcctaagggggctaataaccaaatcaaagaggctatcgacaaacggtatttgcccgacgatgaggagcccatcactcaggaggagcagatcatggggacagacgaaagtcaggagagttctatgaccgacgctgatgatacacagctccatgctgccgaaagtgacgaattctag

SEQ ID NO: 111262 - DNA, 2472 bp, Artificial Sequence
  derived and/or modified sequence
atgacagtactgcaggagccagtacaagcggcaatttggcaagccctgaaccattatgcttatagagatgctgtgttcctagccgagcgactgtacgccgaggtgcattctgaggaggctcttttcctgttagccacttgctactatcgctccggtaaggcttataaagcgtacaggttactgaaaggacactcctgtactacaccccagtgtaaatatctgttggctaaatgctgcgtagacctgtcgaaactggctgagggagagcagattctatcaggtggggtgttcaataaacagaagtcgcacgatgacattgtgactgagttcggagatagcgcctgtttcaccctctccctgctcgggcatgtctactgcaagacagacagattagctaaaggaagtgaatgttaccaaaaatccttgtcactgaatccttttctttggagtccattcgagtcactgtgtgagatcggtgagaaacctgacccagaccaaacattcaaattcacatccttgcagaacttctcaaattgtttgcccaactcttgtactacgcaggtgccaaaccactctctgtcacatcggcagcccgagaccgtcctaacagagaccccccaggacactatcgagttgaacagactcaatctggagtcatcaaattccaagtactctctgaataccgacagcagtgtgagctatattgactcagccgtgatctcccctgacactgtgcctcttggaaccggcacgtccattctgtctaagcaagtccagaacaagcctaaaaccggacgatcactgctcggaggtcctgcggctctgtctccactgactccaagctttggaatcctgccattggaaacaccgtcaccaggggatggctcatatctgcagaactacaccaacacaccgcctgtcattgatgttcctagcaccggcgcaccatctaaaaagtccgtcgctagaataggccaaaccggcactaagagcgtttttagccaaagcgggaactcccgggaggtcaccccaattctggcgcagacccagtcctcaggccctcagactagcacaacaccacaggtgctgagccctaccatcaccagcccaccaaacgcccttccacggaggagctcgcgtctgttcacctctgatagctctacaaccaaagaaaattccaagaagctgaaaatgaagtttccaccgaagatccctaaccgtaaaacgaagagcaagactaacaagggtggcatcacccagcccaatattaatgattcattggaaattacaaagctggactcatcaatcataagcgagggaaagattagtaccataaccccccagatccaggcttttaacctgcagaaggcggctgcaggtctaatgtccctgttacgggagatggggaagggttacctggctctatgcagttataattgcaaggaagctattaacatcctgagtcacctgccttctcaccactataacacgggttgggtcctgtgccaaattggacgggcttactttgagctgtcagagtacatgcaggcagaaagaattttttccgaggtgcgacggatcgaaaactacagagtagagggaatggaaatttatagcactacactgtggcacctccagaaagacgtggcactgagcgtgctgtctaaagacttgactgatatggataaaaactccccagaggcttggtgcgctgctggcaactgtttcagtctgcagcgcgagcatgacattgccatcaagttcttccagcgagccattcaagtggacccaaattacgcttatgcctacacattgttaggtcatgagtttgtactgaccgaggaactcgacaaggccctggcatgcttccgcaacgccatacgggtgaatcctcggcactataatgcttggtatgggctgggcatgatttactacaagcaggaaaaattctctctggctgaaatgcatttccagaaggctcttgatataaacccccaaagttccgtgctgttgtgccacataggcgtggtgcagcacgctctgaaaaagtcagagaaagccctcgacaccctaaacaaagccatagttatagatccaaagaatcccctctgcaaattccaccgggcttcagtcctctttgcaaacgaaaaatacaagtctgcccttcaagagctggaggaactcaagcaaattgttccaaaagagtctcttgtgtattttctcattggcaaggtgtacaaaaagctgggccagactcaccttgctctaatgaacttttcctgggctatggatctggatccgaagggtgctaataatcagattaaagaggccattgacaaaagatacctgccggacgatgaagaacctataacccaggaggagcagattatggggactgacgagtcacaagagagctcaatgacagacgctgatgacacacagctgcacgcagccgaaagcgatgagttttag

SEQ ID NO: 111263 - DNA, 2579 bp, Artificial Sequence
  derived and/or modified sequence
ccgctacagggggggcctgaggcactgcagaaagtgggcctgagcctcgaggatgacggtgctgcaggaacccgtccaggctgctatatggcaagcactaaaccactatgcttaccgagatgcggttttcctcgcagaacgcctttatgcagaagtacactcagaagaagccttgtttttactggcaacctgttattaccgctcaggaaaggcatataaagcatatagactcttgaaaggacacagttgtactacaccgcaatgcaaatacctgcttgcaaaatgttgtgttgatctcagcaagcttgcagaaggggaacaaatcttatctggtggagtgtttaataagcagaaaagccatgatgatattgttactgagtttggtgattcagcttgctttactctttcattgttgggacatgtatattgcaagacagatcggcttgccaaaggatcagaatgttaccaaaagagccttagtttaaatcctttcctctggtctccctttgaatcattatgtgaaataggtgaaaagccagatcctgaccaaacatttaaattcacatctttacagaactttagcaactgtctgcccaactcttgcacaacacaagtacctaatcatagtttatctcacagacagcctgagacagttcttacggaaacaccccaggacacaattgaattaaacagattgaatttagaatcttccaattcaaagtactccttgaatacagattcctcagtgtcttatattgattcagctgtaatttcacctgatactgtcccactgggaacaggaacttccatattatctaaacaggttcaaaataaaccaaaaactggtcgaagtttattaggaggaccagcagctcttagtccattaaccccaagttttgggattttgccattagaaaccccaagtcctggagatggatcctatttacaaaactacactaatacacctcctgtaattgatgtgccatccaccggagccccttcaaaaaagtctgttgccagaatcggccaaactggaacaaagtctgtcttctcacagagtggaaatagccgagaggtaactccaattcttgcacaaacacaaagttctggtccacaaacaagtacaacacctcaggtattgagccccactattacatctcccccaaacgcactgcctcgaagaagttcacgactctttactagtgacagctccacaaccaaggagaatagcaaaaaattaaaaatgaagtttccacctaaaatcccaaacagaaaaacaaaaagtaaaactaataaaggaggaataactcaacctaacataaatgatagcctggaaattacaaaattggactcttccatcatttcagaagggaaaatatccacaatcacacctcagattcaggcctttaatctacaaaaagcagcagcaggtttgatgagccttcttcgtgaaatggggaaaggttatttagctttgtgttcatacaactgcaaagaagctataaatattttgagccatctaccttctcaccactacaatactggttgggtactgtgccaaattggaagggcctattttgaactttcagagtacatgcaagctgaaagaatattctcagaggttagaaggattgagaattatagagttgaaggcatggagatctactctacaacactttggcatcttcaaaaagatgttgctctttcagttctgtcaaaagacttaacagacatggataaaaattcgccagaggcctggtgtgctgcagggaactgtttcagtctgcaacgggaacatgatattgcaattaaattcttccagagagctatccaagttgatccaaattacgcttatgcctatactctattagggcatgagtttgtcttaactgaagaattggacaaagcattagcttgttttcgaaatgctatcagagtcaatcctagacattataatgcatggtatggtttaggaatgatttattacaagcaagaaaaattcagccttgcagaaatgcatttccaaaaagcgcttgatatcaaccctcaaagttcagttttactttgccacattggagtagttcaacatgcactgaaaaaatcagagaaggctttggataccctaaacaaagccattgtcattgatcccaagaaccctctatgcaaatttcacagagcctcagttttatttgcaaatgaaaaatataagtctgctttacaagaacttgaagaattgaaacaaattgttcccaaagaatccctcgtttacttcttaataggaaaggtttacaagaagttaggtcaaacgcacctcgccctgatgaatttctcttgggctatggatttagatcctaaaggagccaataaccagattaaagaggcaattgataagcgttatcttccagatgatgaggagccaataacccaagaagaacagatcatgggaacagatgaatcccaggagagcagcatgacagatgcggatgacacacaacttcatgcagctgaaagtgatgaattttaacttctggaaatcagacttttacaactggatgtgtgactagtgctgacgtgtttct

SEQ ID NO: 111264 - DNA, 2472 bp, Artificial Sequence
  derived and/or modified sequence
atgaccgtgctgcaggagcccgtgcaggccgccatctggcaggccctgaaccactacgcctacagagacgccgtgttcctggccgagagactgtacgccgaggtgcacagcgaggaggccctgttcctgctggccacctgctactacagaagcggcaaggcctacaaggcctacagactgctgaagggccacagctgcaccaccccccagtgcaagtacctgctggccaagtgctgcgtggacctgagcaagctggccgagggcgagcagatcctgagcggcggcgtgttcaacaagcagaagagccacgacgacatcgtgaccgagttcggcgacagcgcctgcttcaccctgagcctgctgggccacgtgtactgcaagaccgacagactggccaagggcagcgagtgctaccagaagagcctgagcctgaaccccttcctgtggagccccttcgagagcctgtgcgagatcggcgagaagcccgaccccgaccagaccttcaagttcaccagcctgcagaacttcagcaactgcctgcccaacagctgcaccacccaggtgcccaaccacagcctgagccacagacagcccgagaccgtgctgaccgagaccccccaggacaccatcgagctgaacagactgaacctggagagcagcaacagcaagtacagcctgaacaccgacagcagcgtgagctacatcgacagcgccgtgatcagccccgacaccgtgcccctgggcaccggcaccagcatcctgagcaagcaggtgcagaacaagcccaagaccggcagaagcctgctgggcggccccgccgccctgagccccctgacccccagcttcggcatcctgcccctggagacccccagccccggcgacggcagctacctgcagaactacaccaacaccccccccgtgatcgacgtgcccagcaccggcgcccccagcaagaagagcgtggccagaatcggccagaccggcaccaagagcgtgttcagccagagcggcaacagcagagaggtgacccccatcctggcccagacccagagcagcggcccccagaccagcaccaccccccaggtgctgagccccaccatcaccagcccccccaacgccctgcccagaagaagcagcagactgttcaccagcgacagcagcaccaccaaggagaacagcaagaagctgaagatgaagttcccccccaagatccccaacagaaagaccaagagcaagaccaacaagggcggcatcacccagcccaacatcaacgacagcctggagatcaccaagctggacagcagcatcatcagcgagggcaagatcagcaccatcaccccccagatccaggccttcaacctgcagaaggccgccgccggcctgatgagcctgctgagagagatgggcaagggctacctggccctgtgcagctacaactgcaaggaggccatcaacatcctgagccacctgcccagccaccactacaacaccggctgggtgctgtgccagatcggcagagcctacttcgagctgagcgagtacatgcaggccgagagaatcttcagcgaggtgagaagaatcgagaactacagagtggagggcatggagatctacagcaccaccctgtggcacctgcagaaggacgtggccctgagcgtgctgagcaaggacctgaccgacatggacaagaacagccccgaggcctggtgcgccgccggcaactgcttcagcctgcagagagagcacgacatcgccatcaagttcttccagagagccatccaggtggaccccaactacgcctacgcctacaccctgctgggccacgagttcgtgctgaccgaggagctggacaaggccctggcctgcttcagaaacgccatcagagtgaaccccagacactacaacgcctggtacggcctgggcatgatctactacaagcaggagaagttcagcctggccgagatgcacttccagaaggccctggacatcaacccccagagcagcgtgctgctgtgccacatcggcgtggtgcagcacgccctgaagaagagcgagaaggccctggacaccctgaacaaggccatcgtgatcgaccccaagaaccccctgtgcaagttccacagagccagcgtgctgttcgccaacgagaagtacaagagcgccctgcaggagctggaggagctgaagcagatcgtgcccaaggagagcctggtgtacttcctgatcggcaaggtgtacaagaagctgggccagacccacctggccctgatgaacttcagctgggccatggacctggaccccaagggcgccaacaaccagatcaaggaggccatcgacaagagatacctgcccgacgacgaggagcccatcacccaggaggagcagatcatgggcaccgacgagagccaggagagcagcatgaccgacgccgacgacacccagctgcacgccgccgagagcgacgagttctag

SEQ ID NO: 111265 - protein, 763 aa, Artificial Sequence
  derived and/or modified sequence
MASTKPLCLPRCGFPRRTPLCRRLAEGEQILSGGVFNKQKSHDDIVTEFGDSACFTLSLLGHVYCKTDRLAKGSECYQKSLSLNPFLWSPFESLCEIGEKPDPDQTFKFTSLQNFSNCLPNSCTTQVPNHSLSHRQPETVLTETPQDTIELNRLNLESSNSKYSLNTDSSVSYIDSAVISPDTVPLGTGTSILSKQVQNKPKTGRSLLGGPAALSPLTPSFGILPLETPSPGDGSYLQNYTNTPPVIDVPSTGAPSKKSVARIGQTGTKSVFSQSGNSREVTPILAQTQSSGPQTSTTPQVLSPTITSPPNALPRRSSRLFTSDSSTTKENSKKLKMKFPPKIPNRKTKSKTNKGGITQPNINDSLEITKLDSSIISEGKISTITPQIQAFNLQKAAAEGLMSLLREMGKGYLALCSYNCKEAINILSHLPSHHYNTGWVLCQIGRAYFELSEYMQAERIFSEVRRIENYRVEGMEIYSTTLWHLQKDVALSVLSKDLTDMDKNSPEAWCAAGNCFSLQREHDIAIKFFQRAIQVDPNYAYAYTLLGHEFVLTEELDKALACFRNAIRVNPRHYNAWYGLGMIYYKQEKFSLAEMHFQKALDINPQSSVLLCHIGVVQHALKKSEKALDTLNKAIVIDPKNPLCKFHRASVLFANEKYKSALQELEELKQIVPKESLVYFLIGKVYKKLGQTHLALMNFSWAMDLDPKGANNQIKEAIDKRYLPDDEEPITQEEQIMGTDESQESSMTDADDTQLHAAESDEF

SEQ ID NO: 111266 - DNA, 2292 bp, Artificial Sequence
  derived and/or modified sequence
atggctagtacgaagccactgtgtctcccccgttgtggcttcccccgacgtacacccctatgtcgaagacttgctgaaggtgagcaaatcctgtccggcggggtcttcaataagcagaaatcccacgacgacattgtgactgagttcggcgattccgcttgttttacactgtctctgctggggcacgtgtactgcaaaacagatcggctggcaaaaggtagtgagtgctatcaaaagtcgttgtccctgaacccttttctttggtccccatttgagagtctatgtgaaatcggcgagaaacccgatccggaccaaacttttaagttcacctcactccagaacttttctaattgcctcccaaactcctgtaccacccaagtgccaaaccacagcctgtcacatcgccagcccgagaccgtgctcacagagacgccccaagatacaattgagctaaaccgacttaatttggagtccagcaatagcaagtattccctcaatactgatagctcagtttcatacattgattccgccgttatatcgccagacaccgtgcccctgggaaccggcacctctatcctgtccaagcaagttcagaataaacccaagacaggacgctctctgctgggcggtcccgccgctctcagtccattgactccttctttcgggatcctgcctttggagacgccatctccgggcgacggatcttacctgcagaactatactaacacacccccagtgatcgacgtgccctcaactggggcgccctccaaaaagtctgtggcaagaattggacaaactggcaccaaaagtgtctttagtcaaagtggaaatagtcgggaggtgacgcctatcctggcgcaaacccagtcctccggtccacaaacatccacgactcctcaggtactttcacctactattacaagcccccccaatgctctcccacggaggtcttctcgtttgttcacctcagattcatctacaactaaagaaaattcgaaaaaactaaaaatgaagtttccaccgaagatcccaaatcgtaaaaccaagtccaagacgaacaaaggtggcatcacacaacctaacattaatgatagcctggaaatcacgaagctggactcttcgattatttccgagggaaagatatcgacaatcacaccgcagatccaggcgttcaacttgcagaaagctgcagcagagggtcttatgtctctgctgagggagatggggaaggggtatctggctctgtgcagttataactgtaaagaggccattaacatcctctcacaccttccttcacaccactacaacacaggttgggttctgtgtcagattggtcgcgcctacttcgagctctccgaatacatgcaggcagaaagaattttttccgaagtacggagaatcgaaaactatcgagtggaagggatggagatctattccacaacactctggcatctgcaaaaagacgtggctctgtctgtcctgtctaaggacctgaccgacatggacaaaaactcccccgaagcctggtgcgcagctggaaattgttttagccttcagagagagcacgatattgctatcaaattcttccagcgcgcgatccaggttgacccaaattatgcctacgcctatacgttgctggggcacgaattcgtgctcacagaagagttggataaagctctcgcgtgtttccgaaacgctatcagggttaaccctagacactacaacgcgtggtacgggctgggaatgatctactacaaacaggagaaattctctttggcagaaatgcactttcagaaagcgttagacattaacccgcagtcctcagtgctgctctgccacataggggtggtgcagcacgctctgaaaaaaagtgagaaggccctggacacgttaaacaaagctattgttatcgaccccaaaaatccactgtgcaaattccaccgggcatcagtgctctttgctaatgaaaaatacaagtccgctttgcaggagctggaagagttaaaacaaatcgtgcccaaggaatcattagtgtactttcttataggtaaagtgtataaaaaactaggacagactcatctcgctctgatgaatttctcctgggctatggacctcgacccgaaaggcgctaataaccaaataaaagaggccattgacaaacggtacctgcctgatgatgaagagcccattacccaggaggagcagatcatgggaaccgacgagtcccaggaaagttctatgaccgacgcggacgatacacaactccacgccgcagaaagtgatgaattttag

SEQ ID NO: 111267 - DNA, 2292 bp, Artificial Sequence
  derived and/or modified sequence
atggccagcaccaagcccctgtgcctgccccgctgtggcttccccaggaggacccccctgtgccggcggctggccgagggggagcagatcctgagcggcggcgtcttcaacaagcagaagagccatgatgacatcgtgacagaatttggagacagcgcctgcttcaccctgagcctgctgggccacgtgtactgcaagacagaccggctggccaagggcagcgagtgctaccagaagagcctgagcctgaaccccttcctgtggagcccctttgagagcctgtgtgaaattggagagaagccagaccctgaccagaccttcaagttcaccagcctgcagaacttcagcaactgcctgcccaacagctgcaccacccaggtgcccaaccacagcctgagccaccggcagcctgagaccgtgctgacagagaccccccaggacaccatcgagctgaaccggctgaacctggagagcagcaacagcaagtacagcctgaacacagacagctctgtgtcctacatcgacagcgctgtgatcagcccagacacagtgcccctgggcaccggcaccagcatcctgagcaagcaggtgcagaacaagcccaagacaggccgcagcctgctgggcggccctgctgccctgagccccctgacccccagctttggcatcctgcccctggagacccccagccctggagatggcagctacctgcagaactacaccaacaccccacctgtgattgatgtgcccagcactggagcccccagcaagaagtctgtggccagaattggccagacaggcaccaagagcgtcttcagccagagcggcaacagccgggaggtgacccccatcctggcccagacccagagcagcggcccccagaccagcaccaccccccaggtgctgagccccaccatcaccagccccccaaatgccctgcccaggaggagcagccgcctcttcaccagtgacagcagcaccaccaaggagaacagcaagaagctgaagatgaagttcccccccaagatccccaacaggaagaccaagagcaagaccaacaagggcggcatcacccagcccaacatcaatgacagcctggagatcaccaagctggacagcagcatcatcagcgagggcaagatcagcaccatcaccccccagatccaggccttcaacctgcagaaggctgctgctgagggcctgatgagcctgctgcgggagatgggcaagggctacctggccctgtgcagctacaactgcaaggaggccatcaacatcctgagccacctgcccagccaccactacaacacaggctgggtgctgtgccagatcggccgggcctactttgagctgtctgagtacatgcaggccgagcgcatcttcagcgaggtgagaagaattgagaactacagagtggagggcatggagatctacagcaccaccctgtggcacctgcagaaggatgtggccctgtctgtgctgagcaaggacctgacagacatggacaagaacagccctgaggcctggtgtgccgccggcaactgcttcagcctgcagcgggagcatgacatcgccatcaagttcttccagagggccatccaggtggaccccaactatgcctatgcctacaccctgctgggccacgagtttgtgctgacagaggagctggacaaggccctggcctgcttcagaaatgccatccgggtgaaccccaggcactacaatgcctggtacggcctgggcatgatctactacaagcaggagaagttcagcctggccgagatgcacttccagaaggccctggacatcaacccccagagctctgtgctgctgtgccacatcggcgtggtgcagcacgccctgaagaagtctgagaaggccctggacaccctgaacaaggccatcgtgattgaccccaagaaccccctgtgcaagttccaccgggcctctgtgctgtttgccaatgagaagtacaagagcgccctgcaggagctggaggagctgaagcagatcgtgcccaaggagagcctggtgtacttcctgattggcaaggtgtacaagaagctgggccagacccacctggccctgatgaacttctcctgggccatggacctggaccccaagggggccaacaaccagatcaaggaggccatcgacaagcgctacctgcctgatgatgaggagcccatcacccaggaggagcagatcatgggcacagatgagagccaggagagctccatgacagatgctgatgacacccagctgcatgctgctgagagtgatgagttctag

SEQ ID NO: 111268 - DNA, 2292 bp, Artificial Sequence
  derived and/or modified sequence
atggccagcaccaagcccctgtgcctgccccggtgcggcttcccccgtaggacacccttgtgccggcggttggctgaaggagaacaaattctgtcagggggtgtgttcaataaacagaagtcgcacgatgatatcgtgacagaatttggcgactctgcttgctttactttgtctctcctggggcacgtgtattgtaaaaccgatcgactcgctaagggtagcgagtgctaccaaaagagcctgagcctgaatccgtttctttggtcacctttcgaatccctatgcgaaattggagagaagccagatcccgatcagactttcaaattcaccagcctgcagaacttcagcaattgccttccaaactcttgcaccacacaggttccgaaccattctttgtctcaccgacagcctgagacagtgctgactgagacacctcaggataccatcgagctgaatcgccttaatctcgagtcctcaaactctaagtattcactgaacactgactcttctgttagctacatagattcagccgtgatctctccagatacagtacccctgggtaccggaacctccatcttgtctaagcaggttcaaaacaaaccaaagactggtaggtcgctgctgggcggccctgccgcgctgtcgccactgacacctagtttcgggattctccccctggagacacctagccccggagacggatcctatctgcagaactataccaatacccctccagtgatcgacgtgccaagcactggtgcgcctagtaagaagtctgtggcgaggattggtcagacgggaaccaagtccgttttcagccagagcggcaactctagagaggttacccctatcctggcacagactcagtcctccgggccacagacatcaactactcctcaggttctcagtcccacaattacttcccctccaaatgctctcccccgaaggagttccagactattcacatcggatagctccaccacaaaagagaatagcaaaaagctgaagatgaagttcccccctaaaatacctaacaggaagaccaaatctaagacaaataaaggaggcattacacaacccaacatcaatgattccttagagattaccaagttggactcatcaattattagcgaaggcaagatctccaccattaccccccaaatccaggccttcaatttacagaaagccgcagcagaaggactcatgtctcttctcagggagatggggaaaggctacctcgccctatgctcctataattgtaaggaagccattaatattctgagccatcttccctcacatcattataacaccggttgggtgctgtgccagataggccgcgcctatttcgagttatcagagtacatgcaagctgagcgtattttcagcgaagtgaggcggatcgagaattaccgggtagaggggatggagatctactccaccacactttggcatcttcagaaagatgtcgcgctgtcagtactgagtaaagacctcacggatatggataaaaattcacccgaggcatggtgcgcagcgggtaactgcttcagtctgcaacgggagcacgatattgccatcaagtttttccaacgggctatccaggtggatcctaactatgcctatgcatatactttgctcgggcatgagttcgtactgacagaagagctcgacaaggcactcgcctgctttcgcaacgccatcagggtcaacccgcgtcattacaatgcctggtatggcctaggcatgatttattacaagcaggagaaatttagcctggccgagatgcacttccagaaagctctagacataaatccacagtcttccgtgttgttgtgtcacatcggggttgtgcagcatgctctgaagaagtccgagaaagcacttgacacattaaacaaagcgattgtgatagacccaaagaaccccctttgcaaatttcatagagcaagcgtcctgtttgccaatgagaagtataagagcgcactacaggaactagaggaactgaaacagattgttcctaaagaatctcttgtctactttcttataggaaaagtgtataaaaagttggggcagacacacctagccctgatgaattttagctgggcgatggatcttgacccgaagggcgccaacaatcaaatcaaggaggcgatcgataagaggtatctaccagacgacgaagagcccattactcaagaagaacagatcatgggaacagatgaatctcaggagtccagcatgactgatgctgacgacacacagctgcacgccgccgaatcagacgagttctag

SEQ ID NO: 111269 - DNA, 2292 bp, Artificial Sequence
  derived and/or modified sequence
atggcttccactaaaccgctctgtctgcctagatgcgggtttcccagaaggactcctctgtgccgtcgattggccgaaggggaacaaatcctgtccggcggagtatttaataaacagaaaagccacgatgatatcgtaacagaattcggcgattctgcttgctttactctgtcactgctgggtcacgtctattgtaaaacagaccggttggctaaaggctctgaatgctaccagaagtcattaagcctaaacccattcctatggtctccatttgaaagcttgtgtgaaattggcgaaaagccagaccctgatcagacgttcaaattcaccagcctccagaatttttctaactgcctgcctaacagctgcaccacccaagtccccaaccatagtctgtctcaccggcaaccggagacagtgctcaccgaaaccccccaggataccatcgagctgaaccgccttaatcttgaatcatcaaatagtaaatactctctcaatacggactcatctgtctcctacatagactccgctgttatttctccagacaccgtacctctggggaccgggacgagcatcctgtccaagcaggtgcagaacaaacccaaaaccggcagatcactcttgggcggaccagcagccttgtccccattgacgccatcctttggcatattaccgcttgaaaccccctccccaggcgatggaagttatttacagaattataccaacacccccccagtgatcgatgtgcctagtaccggggcaccgtctaaaaagagtgtcgcccgtattggccagacgggaaccaagtccgtcttttctcagagtggcaatagccgggaagtcacccccattttagcccagacccaatcctcagggcctcagacaagcacaacaccccaagtgttgagccccaccatcacatcacccccaaatgctttgccaagacgctcttcaaggctatttacatctgacagctcaactaccaaggagaactctaaaaaattaaaaatgaaattcccccctaagatccctaataggaaaaccaagtcaaaaaccaataagggtggtataacccaacccaacataaatgattctctggagatcaccaagctagacagttccattatcagcgaaggtaaaatctccaccatcaccccccagatacaggcctttaacctgcagaaggccgctgctgaagggctcatgtccttgttaagggagatgggaaagggatacttggccctgtgctcctataactgtaaggaggcaatcaacatactctcacatctgccttcccaccactataatacggggtgggtgttatgtcagatcgggagggcatactttgaactctcagagtatatgcaggcagagaggatattttcagaggtgaggaggatcgagaattatcgtgttgagggtatggagatttactcaacaactctgtggcacctgcaaaaggacgtggctctgagtgtgctctccaaggacctgacagacatggataagaatagccctgaggcatggtgcgctgccggaaactgctttagtctccagagggagcacgacatcgccatcaagttctttcaacgtgctatccaggttgaccctaactacgcgtacgcctacactctcctcggtcatgagttcgtcttgaccgaagagctggataaggcactggcctgctttcggaacgcaattcgcgtgaatcctagacattataacgcgtggtatggacttgggatgatctactataagcaggagaagttttccttagccgaaatgcatttccagaaagccctggatatcaaccctcaaagttctgtgctgctatgccatattggcgttgtgcagcatgcactgaagaaaagtgagaaggccttagacacgctgaacaaggcgatcgtgattgaccctaagaacccactgtgtaagttccatagagcgagcgtgctgttcgcaaatgaaaagtataagtctgctctgcaggagttagaagaactcaagcagatcgttccaaaagaatccctggtgtactttcttatcgggaaggtgtacaagaaactgggacagacccatctcgccctgatgaacttctcgtgggctatggacctggaccctaagggtgccaataaccagataaaagaggctattgataaaaggtatctgccagatgatgaagaaccaatcactcaggaggagcagataatgggtaccgacgagtcccaagagtctagcatgacggatgctgacgacacccaacttcacgccgctgagagtgatgagttctag

SEQ ID NO: 111270 - DNA, 2570 bp, Artificial Sequence
  derived and/or modified sequence
aatgagcaggggctggccgggccggagccgctacagggggggcctgaggcactgcagaaagtgggcctgagcctcgaggatgacggtgctgcaggaacccgtccaggctgctatatggcaagcactaaaccactatgcttaccgagatgcggttttcctcgcagaacgcctttatgcagaaggcttgcagaaggggaacaaatcttatctggtggagtgtttaataagcagaaaagccatgatgatattgttactgagtttggtgattcagcttgctttactctttcattgttgggacatgtatattgcaagacagatcggcttgccaaaggatcagaatgttaccaaaagagccttagtttaaatcctttcctctggtctccctttgaatcattatgtgaaataggtgaaaagccagatcctgaccaaacatttaaattcacatctttacagaactttagcaactgtctgcccaactcttgcacaacacaagtacctaatcatagtttatctcacagacagcctgagacagttcttacggaaacaccccaggacacaattgaattaaacagattgaatttagaatcttccaattcaaagtactccttgaatacagattcctcagtgtcttatattgattcagctgtaatttcacctgatactgtcccactgggaacaggaacttccatattatctaaacaggttcaaaataaaccaaaaactggtcgaagtttattaggaggaccagcagctcttagtccattaaccccaagttttgggattttgccattagaaaccccaagtcctggagatggatcctatttacaaaactacactaatacacctcctgtaattgatgtgccatccaccggagccccttcaaaaaagtctgttgccagaatcggccaaactggaacaaagtctgtcttctcacagagtggaaatagccgagaggtaactccaattcttgcacaaacacaaagttctggtccacaaacaagtacaacacctcaggtattgagccccactattacatctcccccaaacgcactgcctcgaagaagttcacgactctttactagtgacagctccacaaccaaggagaatagcaaaaaattaaaaatgaagtttccacctaaaatcccaaacagaaaaacaaaaagtaaaactaataaaggaggaataactcaacctaacataaatgatagcctggaaattacaaaattggactcttccatcatttcagaagggaaaatatccacaatcacacctcagattcaggcctttaatctacaaaaagcagcagcagaaggtttgatgagccttcttcgtgaaatggggaaaggttatttagctttgtgttcatacaactgcaaagaagctataaatattttgagccatctaccttctcaccactacaatactggttgggtactgtgccaaattggaagggcctattttgaactttcagagtacatgcaagctgaaagaatattctcagaggttagaaggattgagaattatagagttgaaggcatggagatctactctacaacactttggcatcttcaaaaagatgttgctctttcagttctgtcaaaagacttaacagacatggataaaaattcgccagaggcctggtgtgctgcagggaactgtttcagtctgcaacgggaacatgatattgcaattaaattcttccagagagctatccaagttgatccaaattacgcttatgcctatactctattagggcatgagtttgtcttaactgaagaattggacaaagcattagcttgttttcgaaatgctatcagagtcaatcctagacattataatgcatggtatggtttaggaatgatttattacaagcaagaaaaattcagccttgcagaaatgcatttccaaaaagcgcttgatatcaaccctcaaagttcagttttactttgccacattggagtagttcaacatgcactgaaaaaatcagagaaggctttggataccctaaacaaagccattgtcattgatcccaagaaccctctatgcaaatttcacagagcctcagttttatttgcaaatgaaaaatataagtctgctttacaagaacttgaagaattgaaacaaattgttcccaaagaatccctcgtttacttcttaataggaaaggtttacaagaagttaggtcaaacgcacctcgccctgatgaatttctcttgggctatggatttagatcctaaaggagccaataaccagattaaagaggcaattgataagcgttatcttccagatgatgaggagccaataacccaagaagaacagatcatgggaacagatgaatcccaggagagcagcatgacagatgcggatgacacacaacttcatgcagctgaaagtgatgaattttaacttctggaaatcagacttttacaactggatgtgtgactagtgctgacgtgtttcttgtccctctgtatactgagtctttactcttgagctggcggtgtcatcgtccgtcacttataccatgagtgtgccactttcattggaccctgactgtatacagaatgaaa

SEQ ID NO: 111271 - DNA, 2292 bp, Artificial Sequence
  derived and/or modified sequence
atggccagcaccaagcccctgtgcctgcccagatgcggcttccccagaagaacccccctgtgcagaagactggccgagggcgagcagatcctgagcggcggcgtgttcaacaagcagaagagccacgacgacatcgtgaccgagttcggcgacagcgcctgcttcaccctgagcctgctgggccacgtgtactgcaagaccgacagactggccaagggcagcgagtgctaccagaagagcctgagcctgaaccccttcctgtggagccccttcgagagcctgtgcgagatcggcgagaagcccgaccccgaccagaccttcaagttcaccagcctgcagaacttcagcaactgcctgcccaacagctgcaccacccaggtgcccaaccacagcctgagccacagacagcccgagaccgtgctgaccgagaccccccaggacaccatcgagctgaacagactgaacctggagagcagcaacagcaagtacagcctgaacaccgacagcagcgtgagctacatcgacagcgccgtgatcagccccgacaccgtgcccctgggcaccggcaccagcatcctgagcaagcaggtgcagaacaagcccaagaccggcagaagcctgctgggcggccccgccgccctgagccccctgacccccagcttcggcatcctgcccctggagacccccagccccggcgacggcagctacctgcagaactacaccaacaccccccccgtgatcgacgtgcccagcaccggcgcccccagcaagaagagcgtggccagaatcggccagaccggcaccaagagcgtgttcagccagagcggcaacagcagagaggtgacccccatcctggcccagacccagagcagcggcccccagaccagcaccaccccccaggtgctgagccccaccatcaccagcccccccaacgccctgcccagaagaagcagcagactgttcaccagcgacagcagcaccaccaaggagaacagcaagaagctgaagatgaagttcccccccaagatccccaacagaaagaccaagagcaagaccaacaagggcggcatcacccagcccaacatcaacgacagcctggagatcaccaagctggacagcagcatcatcagcgagggcaagatcagcaccatcaccccccagatccaggccttcaacctgcagaaggccgccgccgagggcctgatgagcctgctgagagagatgggcaagggctacctggccctgtgcagctacaactgcaaggaggccatcaacatcctgagccacctgcccagccaccactacaacaccggctgggtgctgtgccagatcggcagagcctacttcgagctgagcgagtacatgcaggccgagagaatcttcagcgaggtgagaagaatcgagaactacagagtggagggcatggagatctacagcaccaccctgtggcacctgcagaaggacgtggccctgagcgtgctgagcaaggacctgaccgacatggacaagaacagccccgaggcctggtgcgccgccggcaactgcttcagcctgcagagagagcacgacatcgccatcaagttcttccagagagccatccaggtggaccccaactacgcctacgcctacaccctgctgggccacgagttcgtgctgaccgaggagctggacaaggccctggcctgcttcagaaacgccatcagagtgaaccccagacactacaacgcctggtacggcctgggcatgatctactacaagcaggagaagttcagcctggccgagatgcacttccagaaggccctggacatcaacccccagagcagcgtgctgctgtgccacatcggcgtggtgcagcacgccctgaagaagagcgagaaggccctggacaccctgaacaaggccatcgtgatcgaccccaagaaccccctgtgcaagttccacagagccagcgtgctgttcgccaacgagaagtacaagagcgccctgcaggagctggaggagctgaagcagatcgtgcccaaggagagcctggtgtacttcctgatcggcaaggtgtacaagaagctgggccagacccacctggccctgatgaacttcagctgggccatggacctggaccccaagggcgccaacaaccagatcaaggaggccatcgacaagagatacctgcccgacgacgaggagcccatcacccaggaggagcagatcatgggcaccgacgagagccaggagagcagcatgaccgacgccgacgacacccagctgcacgccgccgagagcgacgagttctag

SEQ ID NO: 111272 - protein, 288 aa, Artificial Sequence
  derived and/or modified sequence
MRIIHGREFDQKALLEFRDTIFDNILKGSRVLVDARDKLGIPWQYSENEKHGMFLMAFENKAGLPVEPATFQLYVPALSALWRDSGIREAFSRRSEFQLNYFPSKQDILLARKATKGIVEHDFVIKKIPFKMVDVGGQRSQRQKWFQCFDGITSILFMVSSSEYDQVLMEDRRTNRLVESMNIFETIVNNKLFFNVSIILFLNKMDLLVEKVKTVSIKKHFPDFRGDPHRLEDVQRYLVQCFDRKRRNRSKPLFHHFTTAIDTENVRFVFHAVKDTILQENLKDIMLQ

SEQ ID NO: 111273 - DNA, 867 bp, Artificial Sequence
  derived and/or modified sequence
atgcgtattatccacggaagggagtttgatcagaaggctctgctggaatttagagatacaatttttgacaatatcctcaagggcagccgtgtgcttgttgatgcgcgggataaattgggtataccatggcagtactctgagaatgaaaaacacggtatgtttctgatggcctttgagaataaggccgggctgcccgtcgagcccgctacttttcagctgtatgtgccggccctgtcagccctgtggcgggacagtggaattcgggaagccttttcccggcggtcagagttccaactgaattatttcccctcaaaacaggacatactgctggctagaaaggctaccaagggtatcgtggaacacgacttcgtgattaagaaaataccgttcaagatggtggacgtgggggggcaacggagccagcgacagaaatggttccagtgctttgatggcatcacaagcatcctgttcatggtgtcaagcagcgagtacgaccaggttctgatggaagacagacgcacgaacaggctggttgaaagtatgaacattttcgaaaccatagtaaataataagttattcttcaatgtcagcatcattttatttctgaacaagatggatttactagtcgagaaggtgaaaactgtatctattaagaagcatttccctgactttcgtggagaccctcatagactggaggatgtgcagcgttacctggtccaatgttttgacaggaaacgacggaaccgcagtaagcctctctttcatcactttactactgccattgacacagagaacgtgcgtttcgtgtttcacgcggtgaaggacaccatactgcaggaaaacctaaaggacattatgctgcagtag

SEQ ID NO: 111274 - DNA, 1317 bp, Artificial Sequence
  derived and/or modified sequence
gcgagcggcgcgcggtccggcgcctggtgaagatcctgctgctgggcgcgggcgagagcggcaagtccacgttcctcaagcagatgcgcatcatccacggccgcgagttcgaccagaaggcgctgctggagttccgcgacaccatcttcgacaacatcctcaagggctcaagggttcttgttgatgcacgagataagcttggcattccttggcagtattctgaaaatgagaagcatgggatgttcctgatggccttcgagaacaaggcggggctgcctgtggagccggccaccttccagctgtacgtcccggccctgagcgcactctggagggattctggcatcagggaggctttcagccggagaagcgagtttcagctgaattactttcctagtaagcaagatatcctgctggctaggaaagccaccaagggaattgtggagcatgacttcgttattaagaagatcccctttaagatggtggatgtgggcggccagcggtcccagcgccagaagtggttccagtgcttcgacgggatcacgtccatcctgttcatggtctcctccagcgagtacgaccaggtcctcatggaggacaggcgcaccaaccggctggtggagtccatgaacatcttcgagaccatcgtcaacaacaagctcttcttcaacgtctccatcattctcttcctcaacaagatggacctcctggtggagaaggtgaagaccgtgagcatcaagaagcacttcccggacttcaggggcgacccgcacaggctggaggacgtccagcgctacctggtccagtgcttcgacaggaagagacggaaccgcagcaagccactcttccaccacttcaccaccgccatcgacaccgagaacgtccgcttcgtgttccatgctgtgaaagacaccatcctgcaggagaacctgaaggacatcatgctgcagtgagcgaggaagccccggggtttgtcgtcgttgagcagcccccacggctgtcggtcagactcttgggtgtgtgttgtctgtgtggtccttgagtgggtttctcggatccgtgccctggaatacctggctcaggaatgctgtcagaccagccagccagcgagctctaggcaaaaggacatggaaactgtcacgttagctactgaatcctgggggcgagtgaaactactgaaaatccgagtgatgatgttgtgaatacggaacacctaatcacacagcttgctttgcttttacagaaacgttcctctttttctgacgcagtttaattgaggaccgtgttgtgtgtgtatgtgtgtacacacgctctgtcttt

SEQ ID NO: 111275 - DNA, 867 bp, Artificial Sequence
  derived and/or modified sequence
atgaggatcatccacggccgggagtttgaccagaaggccctgctggagttccgggacaccatctttgacaacatcctgaagggcagccgggtgctggtggatgcccgggacaagctgggcatcccctggcagtacagtgaaaatgagaagcacggcatgttcctgatggcctttgagaacaaggccggcctgcctgtggagcccgccaccttccagctgtatgtgcctgccctgagcgccctgtggagggacagcggcatccgggaggccttcagcagaagaagtgagttccagctgaactacttccccagcaagcaggacatcctgctggccaggaaggccaccaagggcatcgtggagcatgactttgtgatcaagaagatccccttcaagatggtggatgtgggcggccagaggagccagaggcagaagtggttccagtgctttgatggcatcaccagcatcctcttcatggtgagcagcagtgaatatgaccaggtgctgatggaggacaggaggaccaaccggctggtggagagcatgaacatctttgagaccatcgtgaacaacaagctgttcttcaacgtgtccatcatcctcttcctgaacaagatggacctgctggtggagaaggtgaagacagtgtccatcaagaagcacttcccagacttccggggggacccccaccggctggaggatgtgcagcgctacctggtgcagtgctttgacaggaagagaagaaacagaagcaagcccctcttccaccacttcaccacagccatcgacacagaaaatgtgcgctttgtgttccacgctgtgaaggacaccatcctgcaggagaacctgaaggacatcatgctgcagtag

SEQ ID NO: 111276 - DNA, 867 bp, Artificial Sequence
  derived and/or modified sequence
atgcggatcatccacggccgggagttcgaccagaaggccctgctggagttccgagataccatttttgataacatcctcaagggctcccgcgtgcttgtagatgcgcgagacaagctgggcatcccttggcaatacagcgagaatgaaaaacacggaatgtttctgatggcctttgagaacaaggcgggactccctgtggaacccgcaacatttcagttgtacgtgccagccctatcggcattgtggagagatagcggtatcagagaagcattttccaggaggagtgaattccagttgaattattttcctagtaaacaggacattctgctagctaggaaggctaccaaaggtattgtcgagcacgactttgtgatcaaaaagatcccatttaaaatggtggacgttgggggccaaaggtcccagaggcaaaagtggttccagtgctttgatggaatcacctccatcttattcatggtgagttctagtgagtacgaccaggtccttatggaggatcgccgcaccaacaggcttgtcgagtcgatgaacatctttgagaccatcgttaacaacaaactgttcttcaacgtcagcattattctgtttttgaataagatggatcttctggtggagaaggttaaaacagttagcattaaaaaacatttcccagattttcgcggcgacccgcacaggcttgaggatgttcagcgctatctggtccagtgttttgatcggaaaagacgtaaccgatccaagccactcttccatcactttacaacagccattgacactgagaatgtgcgcttcgtgtttcatgcagtaaaggatactatactgcaggagaaccttaaagatatcatgctccaatag

SEQ ID NO: 111277 - DNA, 867 bp, Artificial Sequence
  derived and/or modified sequence
atgagaattattcacggtagggaattcgatcagaaggctttgcttgaatttagagacactatattcgacaatatcctgaaagggtctcgcgtgctcgttgatgccagagataagctcggaatcccctggcagtattctgaaaacgaaaagcacggcatgttcctaatggcttttgaaaataaggcaggactaccagttgagcctgctaccttccagctttacgttccagccctgtctgcgctctggcgggactccgggattagagaggccttcagccgcagatccgaattccagctaaattatttccccagtaaacaagacatcctgttggccaggaaggctactaagggtattgtggagcatgactttgtgatcaaaaagattcctttcaagatggtggatgtgggcggacagcgctcccagcgacagaagtggttccaatgcttcgacggtatcacttctatactgtttatggtgtcgtcaagtgagtacgaccaggtcctgatggaggaccgacggactaaccggcttgttgagtccatgaatatctttgagacgattgtcaacaataagctgttctttaacgttagcatcatcttatttctaaacaagatggacctgctcgtggaaaaagtcaagaccgtgtctatcaaaaaacattttcctgactttaggggcgacccccacagattggaggacgtacaacgatatctggtccagtgcttcgatcgaaaaaggcgtaatcggagcaaaccactgttccaccatttcactactgctatagacactgaaaacgtgaggttcgtatttcacgctgtgaaggatacgatcctacaggagaacctgaaggacataatgttacagtag

SEQ ID NO: 111278 - DNA, 867 bp, Artificial Sequence
  derived and/or modified sequence
atgagaatcatccacggcagagagttcgaccagaaggccctgctggagttcagagacaccatcttcgacaacatcctgaagggcagcagagtgctggtggacgccagagacaagctgggcatcccctggcagtacagcgagaacgagaagcacggcatgttcctgatggccttcgagaacaaggccggcctgcccgtggagcccgccaccttccagctgtacgtgcccgccctgagcgccctgtggagagacagcggcatcagagaggccttcagcagaagaagcgagttccagctgaactacttccccagcaagcaggacatcctgctggccagaaaggccaccaagggcatcgtggagcacgacttcgtgatcaagaagatccccttcaagatggtggacgtgggcggccagagaagccagagacagaagtggttccagtgcttcgacggcatcaccagcatcctgttcatggtgagcagcagcgagtacgaccaggtgctgatggaggacagaagaaccaacagactggtggagagcatgaacatcttcgagaccatcgtgaacaacaagctgttcttcaacgtgagcatcatcctgttcctgaacaagatggacctgctggtggagaaggtgaagaccgtgagcatcaagaagcacttccccgacttcagaggcgacccccacagactggaggacgtgcagagatacctggtgcagtgcttcgacagaaagagaagaaacagaagcaagcccctgttccaccacttcaccaccgccatcgacaccgagaacgtgagattcgtgttccacgccgtgaaggacaccatcctgcaggagaacctgaaggacatcatgctgcagtag

SEQ ID NO: 111279 - protein, 522 aa, Artificial Sequence
  derived and/or modified sequence
MEEHGVTQTEHMATIEAHAVAQQVQQVHVATYTEHSMLSADEDSPSSPEDTSYDDSDILNSTAADEVTAHLAAAGPVGMAAAAAVATGKKRKRPHVFESNPSIRKRQQTRLLRKLRATLDEYTTRVGQQAIVLCISPSKPNPVFKVFGAAPLENVVRKYKSMILEDLESALAEHAPAPQEVNSELPPLTIDGIPVSVDKMTQAQLRAFIPEMLKYSTGRGKPGWGKESCKPIWWPEDIPWANVRSDVRTEEQKQRVSWTQALRTIVKNCYKQHGREDLLYAFEDQQTQTQATATHSIAHLVPSQTVVQTFSNPDGTVSLIQVGTGATVATLADASELPTTVTVAQVNYSAVADGEVEQNWATLQGGEMTIQTTQASEATQAVASLAEAAVAASQEMQQGATVTMALNSEAAAHAVATLAEATLQGGGQIVLSGETAAAVGALTGVQDANGLFMADRAGRKWILTDKATGLVQIPVSMYQTVVTSLAQGNGPVQVAMAPVTTRISDSAVTMDGQAVEVVTLEQ

SEQ ID NO: 111280 - protein, 437 aa, Artificial Sequence
  derived and/or modified sequence
MEEHGVTQTEHMATIEAHAVAQQVQQVHVATYTEHSMLSADEDSPSSPEDTSYDDSDILNSTAADEVTAHLAAAGPVGMAAAAAVATGKKRKRPHVFESNPSIRKRQQTRLLRKLRATLDEYTTRVGQQAIVLCISPSKPNPVFKVFGAAPLENVVRKYKSMILEDLESALAEHAPAPQEVNSELPPLTIDGIPVSVDKMTQAQLRAFIPEMLKYSTGRGKPGWGKESCKPIWWPEDIPWANVRSDVRTEEQKQRVGTGATVATLADASELPTTVTVAQVNYSAVADGEVEQNWATLQGGEMTIQTTQASEATQAVASLAEAAVAASQEMQQGATVTMALNSEAAAHAVATLAEATLQGGGQIVLSGETAAAVGALTGVQDANGLVQIPVSMYQTVVTSLAQGNGPVQVAMAPVTTRISDSAVTMDGQAVEVVTLEQ

SEQ ID NO: 111281 - DNA, 1569 bp, Artificial Sequence
  derived and/or modified sequence
atggaagaacacggggttacccagaccgagcatatggcaactatcgaggctcacgccgtcgcacagcaggtccagcaggtgcatgtagctacgtacaccgagcattctatgctgagcgccgacgaggattccccatcaagtcctgaagatacttcttacgacgattctgacatcctgaattctacagctgccgacgaggtaaccgcgcacctcgctgccgcaggcccagtcggcatggcagccgctgccgccgtcgcaacaggcaagaagaggaagaggcctcacgtgttcgaatctaacccctcaattcgtaagcgacagcagacacggctcctgaggaagctccgggctacccttgacgaatacacgactagagtaggccagcaggctatcgtactctgcatcagcccttcgaagcccaatcctgtttttaaggtgttcggcgccgcgcccctggaaaacgtggtccgaaagtataagagtatgatcctggaggacctggagtcagccctcgctgagcacgcccctgcacctcaagaagtaaactcagagctgcctccactcacaattgacggaatcccagtgtccgtggacaaaatgacacaggcccaactgagggctttcataccagagatgctgaaatactctacggggagggggaagcccgggtggggtaaggaatcatgtaaacccatatggtggccggaggatatcccatgggcaaatgttaggtccgacgtgaggaccgaggaacagaaacaaagagtatcatggacacaggccctccgcaccatagtgaaaaactgctataagcagcacggaagggaggatctattatatgcgttcgaggaccagcaaacccagacccaggcaaccgctactcatagcatcgctcatctggtgccgtcgcaaacagtggtacagacttttagtaatcccgacgggaccgtgagtctgatccaagtgggcacaggcgctacagtggcgacgctcgccgacgctagcgagctgcctacgacagttaccgttgcacaagtgaattacagtgccgtggctgatggcgaggtggagcagaactgggccacactccaaggcggcgaaatgacaatccaaactactcaggcgagcgaggctacccaggcagtcgcatctctcgccgaagcagccgtggccgcctctcaggagatgcaacagggtgctacggtcactatggcactcaattccgaggccgcggcacacgccgtggccaccctcgcggaagcaacgctccaaggcggggggcagattgtgttaagtggcgagacagccgctgcagtcggagctttaaccggtgttcaagacgcaaacggcctgtttatggcagacagagctggccgaaaatggattctgacggataaagcgactggactggtgcaaataccagtatcaatgtatcaaactgttgttacatccctcgcgcaggggaatggtcccgtgcaggtggccatggcaccagttaccaccagaataagcgactccgccgtcaccatggatggacaagcagtggaggtcgtaactttggaacagtag

SEQ ID NO: 111282 - DNA, 1569 bp, Artificial Sequence
  derived and/or modified sequence
atggaagaacatggagttacgcagacagagcacatggcaaccatagaagcccatgccgtggctcagcaggtccaacaagtgcatgtagctacatacacagagcactctatgctttctgccgacgaggattctccatcatcacctgaagatacatcatacgatgacagcgacatccttaattcaacggccgcagacgaggtcactgcacacctggccgccgcagggcccgtcgggatggcggcggccgcggctgtggctacaggtaagaagcgcaagaggccccacgtgttcgaaagcaaccctagtattcgcaagaggcagcagacgcgcctgcttcgcaagctccgtgcgacactggacgagtacaccactagggtggggcagcaagctattgtcctctgtatttctccttcaaagcccaacccagtgtttaaggttttcggcgctgctcctttggagaatgtggtgcgcaagtataaatccatgatactggaagacctggagtcagctctggccgagcatgcgcccgcgccccaagaggtgaactcggaactaccaccgttaactatcgatggtatccctgtgagcgttgataagatgacacaggcacaactgcgggcgttcatccctgaaatgttgaagtatagtacaggtcgcggcaagcccggctggggaaaagagtcatgcaagccgatctggtggcctgaggatatcccgtgggctaatgtgcggagcgacgttagaactgaggagcagaagcagagggtcagttggacccaggccctgcgcacaatagttaagaattgttacaaacagcacgggagggaggacctcctatacgccttcgaagaccagcagacccagacacaggccacagctacacatagcattgcccatctggtcccttcccagacagtggtccaaacatttagtaaccccgatggcaccgttagcttgatccaggtgggtactggtgccacagtggccacgttggccgatgcatcggagctcccaactacagtgactgtggctcaggttaactactccgctgtagctgatggggaggtcgaacagaactgggctacattgcagggcggggagatgacaatacagaccacccaagccagcgaggctacgcaggcagtagcgagtctggcggaggccgctgtggccgctagccaggagatgcaacagggagcaaccgtgacgatggcactcaacagcgaagctgccgcccacgcggttgcgaccctggcagaagccacgcttcagggaggcggccaaattgtcttgagcggggaaacggccgctgctgtgggggctctgacaggggtgcaagatgctaatggcctcttcatggccgatcgtgccggaaggaagtggatcctcaccgataaggcaaccggcctagtccaaattcccgtcagcatgtaccagaccgttgtaacctcactggcacaaggcaacggccctgtccaggtagcgatggcacccgttaccacccggatttcagattcggccgtgaccatggatggacaggccgtggaggtggtgacactggagcaatag

SEQ ID NO: 111283 - DNA, 1569 bp, Artificial Sequence
  derived and/or modified sequence
atggaggagcacggcgtgacccagacagagcacatggccaccatcgaggcccatgctgtggcccagcaggtgcagcaggtgcacgtggccacctacacagagcacagcatgctgtctgcagatgaggacagccccagcagccctgaggacaccagctatgatgacagcgacatcctgaacagcacagctgctgatgaggtgacagcccacctggccgccgccggccctgtgggcatggctgctgctgctgctgtggccaccgggaagaagaggaagaggcctcatgtgtttgagagcaaccccagcatcaggaagaggcagcagacccggctgctgaggaagctgcgggccaccctggatgagtacaccaccagggtgggccagcaggccatcgtgctgtgcatcagccccagcaagcccaaccctgtgttcaaggtgtttggagctgcccccctggagaatgtggtgaggaagtacaagtccatgatcctggaggacctggagagcgccctggccgagcacgccccagccccccaggaggtgaacagcgagctgccccccctgaccattgatggcatccctgtgtctgtggacaagatgacccaggcccagctgcgggccttcatccctgagatgctgaagtacagcacaggccggggcaagccaggctggggcaaggagagctgcaagcccatctggtggccagaggacatcccctgggccaacgtgcggagtgatgtgaggacagaggagcagaagcagagggtgtcctggacccaggccctgcggaccatcgtgaagaactgctacaagcagcacggccgggaggacctgctgtatgcctttgaggaccagcagacccagacccaggccacagccacccacagcatcgcccacctggtgcccagccagacagtggtgcagaccttcagcaacccagatggcaccgtgtccctcatccaggtgggcaccggggccaccgtggccaccctggctgatgccagcgagctgcccaccaccgtgacagtggcccaggtgaactacagcgctgtggctgatggagaggtggagcagaactgggccaccctgcagggcggggagatgaccatccagaccacccaggccagcgaggccacccaggccgtggccagcctggccgaggccgctgtggccgccagccaggagatgcagcagggcgccaccgtgaccatggccctgaacagcgaggccgccgcccatgctgtggccaccctggccgaggccaccctgcagggcggcggccagatcgtgctgagcggggagacagctgctgctgtgggcgccctgactggagtgcaggatgccaacggcctcttcatggctgacagagctggcaggaagtggatcctgacagacaaggccaccggcctggtgcagatccctgtgtccatgtaccagacagtggtgaccagcctggcccagggcaatggacctgtgcaggtggccatggcccctgtgaccacccgcatcagtgacagcgctgtgaccatggatggccaggccgtggaggtggtgaccctggagcagtag

SEQ ID NO: 111284 - DNA, 1569 bp, Artificial Sequence
  derived and/or modified sequence
atggaggagcacggcgtgacccagaccgagcacatggccaccatcgaagcccacgcggttgctcaacaggtccagcaagttcatgtggctacctataccgaacatagtatgttaagtgcagatgaagattctccctccagccccgaggacacatcttacgacgatagcgacatcttaaattcgaccgcagctgatgaggttaccgctcacctggctgccgccggtcccgttgggatggccgctgccgcggcggtagccacaggaaaaaagagaaagcgtcctcacgtgttcgagagtaatccttcgatcagaaagaggcagcaaacgaggctgctgcggaagctcagggctacactggacgaatatacaactagagtggggcagcaggcaattgtgctgtgcatttccccttctaagcccaatcccgtgttcaaagtattcggcgcagctcccttggaaaatgttgtcagaaaatataagtccatgattctcgaggacttggagtccgccttagcagagcatgccccggctcctcaggaagttaacagcgagctccccccactgactatcgacggaatacccgtgagcgttgacaaaatgactcaggctcagctgagggcctttattcccgaaatgttgaaatattctacaggtcggggaaagccgggctggggcaaagagtcatgcaaacccatttggtggccagaggatatcccctgggcaaatgttagaagcgatgtgagaacggaagaacaaaagcagagggtcagctggacccaggcactgcggactatcgtcaagaattgctacaagcagcatggtcgcgaagacttgctgtatgctttcgaggatcagcaaacccaaacgcaagctacagcaacacatagcattgcacaccttgttccgagtcagacagttgtgcagacattctctaatccagacgggacggtctccttgatccaggtcgggacgggggcgacagtcgctacgctcgctgatgcctccgagttgccgactaccgtgactgttgctcaggtgaactactctgcagtggcagatggagaagtcgagcagaattgggcgactctgcaaggaggcgaaatgactattcaaacaacccaagcgagcgaagccacccaggcagtggcatccctcgccgaagctgcagtggcagcaagccaggagatgcagcagggcgccactgtaaccatggcactcaactccgaggccgcagcacatgcagtagctaccttggccgaggcgactttacaaggtggaggtcagattgtacttagtggcgagacagctgccgctgtaggggccctaactggagtgcaggacgctaacggacttttcatggctgatagagctggccggaagtggatacttactgacaaggctaccggtttggtgcagattcctgtttcaatgtaccagactgtggttacaagtctagcacagggtaatgggccagtgcaggtggcaatggccccggtgactacaaggatcagtgactctgcggtgaccatggacggtcaagccgtggaggtagtaacattggaacagtag

SEQ ID NO: 111285 - DNA, 1569 bp, Artificial Sequence
  derived and/or modified sequence
atggaggagcacggcgtgacccagaccgagcacatggccaccatcgaagcgcatgccgtagcgcagcaggtgcagcaggtgcacgtagcaacttatacggagcatagcatgttatcagcagatgaggacagccctagctccccagaagacacttcatacgacgattccgacattcttaatagcacagctgccgatgaggttacagcccacctcgcggctgccggaccggtcgggatggctgccgcagccgccgtggctaccggaaaaaagcgcaagcgcccacacgtgttcgaatccaatccttcaatccgcaagcgacaacagactcgactcctgcgcaaactgagagcaacccttgatgagtacaccacgcgtgtcggccaacaggctattgtgctctgcatctcacccagtaagcccaacccagttttcaaagtgttcggggccgcacccttggagaacgtggtgaggaagtataaaagcatgatattagaggatctcgaatctgccctcgcggagcatgcccccgcacctcaggaagtgaactctgaactgcctccactcaccattgacggcatcccggtgagtgtggacaaaatgacacaggcgcagctgagggcattcattccagagatgttaaaatactctaccgggcgaggaaagccggggtgggggaaggagagctgcaaacctatctggtggcccgaggatatcccatgggccaatgtacggtccgacgtgcgcacagaagagcaaaaacagagagtgtcatggacgcaggctctccgtacgattgtgaagaactgctataaacagcacggtcgggaggatctgttgtacgcattcgaggaccagcaaactcagacacaggccaccgcaactcatagcatcgcacacctcgtgccaagccaaaccgtcgtgcagacattctccaaccccgacggcaccgtgtccctcatccaggtgggcaccggggccaccgtggccaccttggctgatgcttccgaactccccacgacagttacggtggcccaagtcaattacagcgccgtggccgacggagaagtggagcaaaattgggctacgctccaagggggcgagatgacaatacagaccacacaggccagtgaggctactcaggccgtggcctccctagccgaagcggcggtcgccgcttctcaggagatgcagcagggggcaacagtgaccatggcattgaacagcgaagctgccgcacacgctgttgcgacactggcagaggccactctgcagggggggggccagatagtgctgtcaggtgaaaccgcagccgctgtgggagcactgacaggggtgcaggacgccaatggcctgtttatggcagaccgagcaggcaggaagtggatacttactgataaggccactggcctggttcagattcctgttagtatgtaccagaccgtagtgaccagtctggctcagggcaatgggccagtgcaggtggctatggcgcctgtgaccactagaattagtgacagcgctgtcactatggacggccaggccgttgaggtggttaccctagagcagtag

SEQ ID NO: 111286 - DNA, 2481 bp, Artificial Sequence
  derived and/or modified sequence
gaggctgcgaggagccggcgcggtcgcagtctccacggcgcaggcccacggtagcgcagccgctctgagtagaacttcatggaggaacacggagtgacccaaaccgaacatatggctaccatagaagcacatgcagtggcccagcaagtgcagcaggtccatgtggctacttacaccgagcatagtatgctgagtgctgatgaagactcgccttcttctcccgaggacacctcttacgatgactcagatatactcaactccacagcagctgatgaggtgacagctcatctggcagctgcaggtcctgtgggaatggccgctgctgctgctgtggcaacaggaaagaaacggaaacggcctcatgtatttgagtctaatccatctatccggaagaggcaacaaacacgtttgcttcggaaacttcgagccacgttagatgaatatactactcgtgtgggacagcaagctattgtcctctgtatctcaccctccaaacctaaccctgtctttaaagtgtttggtgcagcacctttggagaatgtggtgcgtaagtacaagagcatgatcctggaagacctggagtctgctctggcagaacacgcccctgcgccacaggaggttaactcagaactgccgcctctcaccatcgacggaattccagtctctgtggacaaaatgacccaggcccagcttcgggcatttatcccagagatgctcaagtactctacaggtcggggaaaaccaggctgggggaaagaaagctgcaagcccatctggtggcctgaagatatcccctgggcaaatgtccggagtgatgtccgcacagaagagcaaaagcagagggtttcatggacccaggcactacggaccatagttaaaaactgttataaacagcatgggcgggaagaccttttgtatgcctttgaagatcagcaaacgcaaacacaggccacagccacacatagtatagctcatcttgtaccatcacagactgtagtccagacttttagtaaccctgatggcactgtctcacttatccaggttggtacgggggcaacagtagccacattggctgatgcttcagaattgccaaccacggtcaccgttgcccaagtgaattattctgccgtggctgatggagaggtggaacaaaattgggccacgttacagggaggtgagatgaccatccagacgacgcaagcatcagaggccacccaggcggtggcatcgttggcagaggccgcagtggcagcttctcaggagatgcagcagggagctacagtcactatggcgcttaacagcgaagctgccgcccatgctgtcgccaccctggctgaggccaccttacaaggtgggggacagatcgtcttgtctggggaaaccgcagcagccgtcggagcacttactggagtccaagatgctaatggcctctttatggcagatcgtgcaggtcgcaagtggatcctgactgacaaagccacaggcctggtccagatccctgtgagcatgtaccagactgtggtgaccagcctcgcccagggcaacggaccagtgcaggtggccatggcccctgtgaccaccaggatatcagacagcgcagtcaccatggacggccaagctgtggaggtggtgacattggaacagtgacatacagccatattatggcatcgttttctagtctacttcaaaattttttacacgtttgcagaggtgcaatcaaatggaattaagtctctcgactttggaaggaaagttttgttaacctttttttttttaaaaggaagaaagcggattttggaattgcattttttaaagcaccactcttgattttctgggattggtgaagaaactgcattgtcaatttcactgtcccaaaaaagccaaattgtggcaggacttctttctgcggaaatgtgtgtgtatacttatgtgtgtgtatgtgtgagtgtgaatatatgtatatgtgtacatatggacatacacatttacatatatataaagtatatatatacatatatatatatatatatgtatgaaacccgcatggaattatctgtatgaaatcaaggtgcgctgtggaaacaataattcacccagtttagtgggtggtagggtacgtggccagacacagtcacccagtttttgttcataccagggtcatgcgttgagctactgacaaactcaggcggaggtgaccatgcccttcaccaaagctgcctcccagtggccacacagaactctccctgctggactcacctgaggaaagaggctccagcatggggtgggtcagagatgtgcttgcaaggtccagggactgcgtggtctgccagctgagatgctcctcgggctggcccaggtgctgaccttgccacaggcagatgaatgtcttgaaagctcccgggcctcagcctcccatctcctctccttcccaggaatccttgatctcatgactattaaaatgttgctctggttttaaggtca

SEQ ID NO: 111287 - DNA, 1776 bp, Artificial Sequence
  derived and/or modified sequence
catggaggaacacggagtgacccaaaccgaacatatggctaccatagaagcacatgcagtggcccagcaagtgcagcaggtccatgtggctacttacaccgagcatagtatgctgagtgctgatgaagactcgccttcttctcccgaggacacctcttacgatgactcagatatactcaactccacagcagctgatgaggtgacagctcatctggcagctgcaggtcctgtgggaatggccgctgctgctgctgtggcaacaggaaagaaacggaaacggcctcatgtatttgagtctaatccatctatccggaagaggcaacaaacacgtttgcttcggaaacttcgagccacgttagatgaatatactactcgtgtgggacagcaagctattgtcctctgtatctcaccctccaaacctaaccctgtctttaaagtgtttggtgcagcacctttggagaatgtggtgcgtaagtacaagagcatgatcctggaagacctggagtctgctctggcagaacacgcccctgcgccacaggaggttaactcagaactgccgcctctcaccatcgacggaattccagtctctgtggacaaaatgacccaggcccagcttcgggcatttatcccagagatgctcaagtactctacaggtcggggaaaaccaggctgggggaaagaaagctgcaagcccatctggtggcctgaagatatcccctgggcaaatgtccggagtgatgtccgcacagaagagcaaaagcagagggtttcatggacccaggcactacggaccatagttaaaaactgttataaacagcatgggcgggaagaccttttgtatgcctttgaagatcagcaaacgcaaacacaggccacagccacacatagtatagctcatcttgtaccatcacagactgtagtccagacttttagtaaccctgatggcactgtctcacttatccaggttggtacgggggcaacagtagccacattggctgatgcttcagaattgccaaccacggtcaccgttgcccaagtgaattattctgccgtggctgatggagaggtggaacaaaattgggccacgttacagggaggtgagatgaccatccagacgacgcaagcatcagaggccacccaggcggtggcatcgttggcagaggccgcagtggcagcttctcaggagatgcagcagggagctacagtcactatggcgcttaacagcgaagctgccgcccatgctgtcgccaccctggctgaggccaccttacaaggtgggggacagatcgtcttgtctggggaaaccgcagcagccgtcggagcacttactggagtccaagatgctaatggcctctttatggcagatcgtgcaggtcgcaagtggatcctgactgacaaagccacaggcctggtccagatccctgtgagcatgtaccagactgtggtgaccagcctcgcccagggcaacggaccagtgcaggtggccatggcccctgtgaccaccaggatatcagacagcgcagtcaccatggacggccaagctgtggaggtggtgacattggaacagtgacatacagccatattatggcatcgttttctagtctacttcaaaattttttacacgtttgcagaggtgcaatcaaatggaattaagtctctcgactttggaaggaaagttttgttaacctttttttttttaaaaggaagaaagcggattttggaattgcattttttaaagcaccactcttgattttctgggattggtgaagaaactgc

SEQ ID NO: 111288 - DNA, 1569 bp, Artificial Sequence
  derived and/or modified sequence
atggaagagcacggcgtcacccaaactgaacacatggcaacaatcgaagcccacgcagtcgcccagcaggtgcagcaggtacacgttgcgacttatactgagcattccatgctctcagctgacgaagatagccctagcagccctgaggatacttcctatgatgactccgacatactcaattccaccgctgccgacgaggtgacagctcaccttgctgcggcagggcctgttggcatggccgcagccgcagccgttgcgacgggaaagaaacgcaaaaggccccacgtcttcgagagtaacccttcaattcggaagcgccagcaaacccgcctgcttcggaaactccgcgctacgcttgacgagtacactacccgcgtcgggcaacaggccatcgtcctgtgcatttctccttccaagccaaatcccgtgtttaaagtgtttggcgctgcaccgctggaaaacgttgtacgaaaatataaatccatgatcttagaagatctagaatcagcccttgctgagcacgccccagcgccacaggaagtaaactccgagcttcctcctctcactatcgacggaattccagtgagtgtggataaaatgacccaggcccagctgcgggctttcatccccgaaatgctgaagtactctacaggcaggggaaaacccggatggggtaaggagtcatgtaaacctatctggtggccagaagacattccttgggcaaatgtacgatctgatgtgcgcaccgaagagcagaagcagcgagtatcctggactcaagccctgcggaccatagtgaagaattgttataagcagcacggtcgtgaggacttgctatacgcctttgaggaccaacagacacagacacaggcaacagccacacatagcatcgcacatctggtcccttcacagacggtcgtacaaactttctccaatcctgatggcacagtcagcctgatacaggtgggtacaggagcaacagtcgccacactggcagacgcgagtgagctgcctactactgtgaccgtcgcccaagttaattacagtgctgtcgctgacggagaggtggagcaaaactgggctactctgcagggaggagagatgactattcagactacacaagcctcagaggcgacgcaggccgtagccagcctggcggaggccgcagttgccgcttcacaagagatgcagcaaggggctaccgtgaccatggcactcaacagcgaagccgctgcccacgccgtggccactctggccgaagctactttacagggcggtggacagatcgtactgtccggcgagaccgcggcagccgtcggcgcactgacaggggtgcaggacgccaacgggctatttatggctgaccgggcagggaggaagtggatcctcaccgataaggccactggcctcgtgcagataccagtttccatgtatcaaacagtcgtcacatcactggcacagggcaatggaccagtccaggtggctatggccccagtgaccaccaggatcagtgattcggctgtgacaatggacggacaggccgtggaggtcgtaaccctcgagcagtag

SEQ ID NO: 111289 - DNA, 1569 bp, Artificial Sequence
  derived and/or modified sequence
atggaagagcatggggtcactcagacagaacacatggccaccattgaggctcatgctgtggcccaacaggtgcagcaggtccatgtggcgacctacacagagcactctatgctgagcgcagatgaggacagcccatcttctccagaagacacctcctatgatgatagcgatatactaaactccacggctgctgacgaagtgactgctcatctggccgctgctggtcctgtgggcatggccgcagcggctgctgtagccacgggtaaaaagcgaaagcgccctcacgtgtttgagtcaaatccatccatacgcaagcggcaacagaccaggcttttacgcaagttacgcgctacgttagacgagtataccacgagagtggggcagcaggccattgtcctctgcatcagtccttcgaagcccaaccccgtgttcaaggtgtttggtgcagcacccctggagaatgtggttcgaaagtataagtctatgattctcgaagacctggaaagtgctctcgcagagcacgccccagcaccccaagaggtgaattcggaactaccccctctgacaatagatggaataccggtgtccgtggataagatgacccaggcccaactgcgtgcttttattcctgagatgcttaagtactccaccgggagaggcaagcctgggtggggcaaagagagctgtaaacccatttggtggccagaggatatcccctgggcgaatgtgcgtagcgacgtgcgcacagaggagcagaagcagagagtgagttggacccaggcactgcgaacgattgtcaagaattgctacaagcagcatggcagggaagacctcctctacgcattcgaagatcagcaaacccagacccaggcgaccgctacacactccattgcccatttagtcccgtcacagaccgtggtgcaaacattctccaaccctgatggaacagtgtccctcattcaggtcggaacgggtgcaaccgtggccactttggctgatgcttctgagctgccaaccactgtgacggttgcccaggtgaactattcggcagtggcggacggagaagtggagcagaattgggctacgctccagggcggtgagatgactatccaaacgacccaggcatcagaggccacacaggctgtggcatccttagccgaagccgctgtggccgcttcccaggagatgcaacagggcgctaccgtgactatggccttgaattccgaggctgcagcgcacgctgttgccactctagctgaggctactctgcaaggaggcggtcagattgttctcagcggagaaaccgctgccgctgtcggtgcacttactggcgtgcaggatgctaatggtttattcatggcagatagggctgggagaaagtggatactgactgacaaggctacaggactggtccagatcccggtcagcatgtatcagacagtggtcacttccctggctcaaggcaatggcccagttcaggttgccatggcgcctgtgactacgcggatcagcgatagcgctgtcacgatggatggacaggcagtagaggtagtcacgctggagcagtag

SEQ ID NO: 111290 - DNA, 1569 bp, Artificial Sequence
  derived and/or modified sequence
atggaggagcacggcgtgacccagaccgagcacatggccaccatcgaggcccacgccgtggcccagcaggtgcagcaggtgcacgtggccacctacaccgagcacagcatgctgagcgccgacgaggacagccccagcagccccgaggacaccagctacgacgacagcgacatcctgaacagcaccgccgccgacgaggtgaccgcccacctggccgccgccggccccgtgggcatggccgccgccgccgccgtggccaccggcaagaagagaaagagaccccacgtgttcgagagcaaccccagcatcagaaagagacagcagaccagactgctgagaaagctgagagccaccctggacgagtacaccaccagagtgggccagcaggccatcgtgctgtgcatcagccccagcaagcccaaccccgtgttcaaggtgttcggcgccgcccccctggagaacgtggtgagaaagtacaagagcatgatcctggaggacctggagagcgccctggccgagcacgcccccgccccccaggaggtgaacagcgagctgccccccctgaccatcgacggcatccccgtgagcgtggacaagatgacccaggcccagctgagagccttcatccccgagatgctgaagtacagcaccggcagaggcaagcccggctggggcaaggagagctgcaagcccatctggtggcccgaggacatcccctgggccaacgtgagaagcgacgtgagaaccgaggagcagaagcagagagtgagctggacccaggccctgagaaccatcgtgaagaactgctacaagcagcacggcagagaggacctgctgtacgccttcgaggaccagcagacccagacccaggccaccgccacccacagcatcgcccacctggtgcccagccagaccgtggtgcagaccttcagcaaccccgacggcaccgtgagcctgatccaggtgggcaccggcgccaccgtggccaccctggccgacgccagcgagctgcccaccaccgtgaccgtggcccaggtgaactacagcgccgtggccgacggcgaggtggagcagaactgggccaccctgcagggcggcgagatgaccatccagaccacccaggccagcgaggccacccaggccgtggccagcctggccgaggccgccgtggccgccagccaggagatgcagcagggcgccaccgtgaccatggccctgaacagcgaggccgccgcccacgccgtggccaccctggccgaggccaccctgcagggcggcggccagatcgtgctgagcggcgagaccgccgccgccgtgggcgccctgaccggcgtgcaggacgccaacggcctgttcatggccgacagagccggcagaaagtggatcctgaccgacaaggccaccggcctggtgcagatccccgtgagcatgtaccagaccgtggtgaccagcctggcccagggcaacggccccgtgcaggtggccatggcccccgtgaccaccagaatcagcgacagcgccgtgaccatggacggccaggccgtggaggtggtgaccctggagcagtag

SEQ ID NO: 111291 - DNA, 1029 bp, Artificial Sequence
  derived and/or modified sequence
atgattctggaggaccttgagtcagccctcgctgagcatgcccctgctcctcaagaggtgaatagcgaactgcctcccctgacaatcgacggaatcccggtctccgttgataaaatgactcaggctcaacttagggccttcatccctgagatgctgaaatactccaccgggaggggcaagccaggctggggaaaggaatcctgtaagcccatttggtggccggaagatatcccctgggccaacgtcaggtctgacgtccgcacagaggaacagaaacagcgagtgtcatggacccaagctttgaggaccatcgtgaagaactgctacaagcagcacgggcgggaggatttgttatatgcttttgaagatcagcagacccagactcaggcaaccgccacacatagtatcgctcacctggtcccatcgcagaccgtcgttcaaacctttagcaatcctgacggtactgtctctcttattcaagtggggacaggcgcaaccgtcgcgaccctcgccgatgcatccgagttaccaacaacagtcacggttgcacaagtcaactattccgcggtggcagatggtgaggtcgagcagaactgggccacgctccagggcggcgaaatgaccatccagacgacccaggcctctgaagccacgcaggccgtggcctcactcgccgaagcggccgtcgctgctagccaggaaatgcagcagggggccacagtgaccatggcgttgaattcagaggctgctgctcacgcagtagctacgctagccgaagctaccctgcagggtggaggccagattgtcttaagcggtgaaaccgccgccgctgtcggggccctcaccggtgtccaggatgccaacggacttgttcaaatccccgtgagcatgtaccaaaccgtcgtgacgagcctcgcccagggcaacgggcccgtccaggtcgccatggcacccgtcactacaaggataagtgactccgcggtcactatggatggacaagcagttgaggtggtcaccctggagcagtag

SEQ ID NO: 111292 - DNA, 1029 bp, Artificial Sequence
  derived and/or modified sequence
atgatcctggaggacctggagagcgccctggccgagcacgccccagccccccaggaggtgaacagcgagctgccccccctgaccattgatggcatccctgtgtctgtggacaagatgacccaggcccagctgcgggccttcatccctgagatgctgaagtacagcacaggccggggcaagccaggctggggcaaggagagctgcaagcccatctggtggccagaggacatcccctgggccaacgtgcggagtgatgtgaggacagaggagcagaagcagagggtgtcctggacccaggccctgcggaccatcgtgaagaactgctacaagcagcacggccgggaggacctgctgtatgcctttgaggaccagcagacccagacccaggccacagccacccacagcatcgcccacctggtgcccagccagacagtggtgcagaccttcagcaacccagatggcaccgtgtccctcatccaggtgggcactggagccaccgtggccaccctggctgatgccagcgagctgcccaccaccgtgacagtggcccaggtgaactacagcgctgtggctgatggagaggtggagcagaactgggccaccctgcagggcggggagatgaccatccagaccacccaggccagcgaggccacccaggccgtggccagcctggccgaggccgctgtggccgccagccaggagatgcagcagggcgccaccgtgaccatggccctgaacagcgaggccgccgcccatgctgtggccaccctggccgaggccaccctgcagggcggcggccagatcgtgctgtctggagaaacagctgctgctgtgggcgccctgactggagtgcaggatgccaacggcctggtgcagatccctgtgtccatgtaccagacagtggtgaccagcctggcccagggcaatggacctgtgcaggtggccatggcccctgtgaccacccgcatcagtgacagcgctgtgaccatggatggccaggccgtggaggtggtgaccctggagcagtag

SEQ ID NO: 111293 - DNA, 1029 bp, Artificial Sequence
  derived and/or modified sequence
atgatcctggaggacctggagagcgccctggccgagcacgcccccgcccctcaggaggtgaactctgagctgcctccactgactatcgatggcattcctgtcagtgtggacaagatgacccaagcacaacttcgcgcttttataccagagatgctgaaatactcgacaggccgaggtaagcccgggtggggtaaggagtcttgtaagcctatttggtggccagaggatataccttgggccaacgtgaggagcgacgtcagaacagaggagcagaagcaacgcgtttcatggacacaggcactcaggactattgttaagaattgttataaacagcacggaagagaagacctgctgtatgcctttgaggatcagcagacgcaaacacaggccacagcaacccactccatagcccacttggtccctagccaaacggtggtgcaaaccttctccaatccagacggtacagtgagtctgatccaggttgggaccggtgcaactgtagccaccctcgcggacgctagcgagttacccaccaccgtgaccgtggcacaggtcaactattccgccgtggcagacggagaagtggaacagaactgggctactttgcaaggcggtgagatgacaatccagaccactcaggcctctgaagcaacgcaggctgtcgcctcactggccgaggccgccgtggccgcgagccaggagatgcagcaaggtgcaactgtcaccatggccctcaactccgaagccgctgctcacgccgtggccacgctggctgaagcaacactgcagggcggcggtcaaatagtcctttcaggggagaccgccgctgccgtgggggcactgaccggagttcaagatgccaacgggctggttcaaatccctgtctctatgtatcagacggtcgtcacgtcgctggctcagggcaatgggcccgtccaggtggccatggcacctgtgactacgcgcatttctgatagtgcagtaaccatggacgggcaggcggttgaggtagtgaccctagaacagtag

SEQ ID NO: 111294 - DNA, 1029 bp, Artificial Sequence
  derived and/or modified sequence
atgattctggaagatctagagagcgccttagctgaacacgctccagctcctcaggaggtgaattcggagctccccccattgacaatcgatgggatccctgtgagcgttgacaagatgactcaggctcaactgcgcgcttttatccccgaaatgctgaagtattccaccgggagaggcaagcccggatggggcaaagagtcctgcaagccaatctggtggccagaagacatcccctgggccaacgtgcgcagtgacgtgcggaccgaggaacaaaaacagcgcgtatcttggacccaggctctgagaaccattgttaagaactgctacaagcaacatggcagagaagaccttctgtacgctttcgaggaccagcagacacagacacaggctacagccacacactctattgcacacttggtcccctcacagacagtggtgcaaaccttctccaatcccgatgggactgtcagccttattcaggtgggcaccggcgctaccgtggccaccctggccgacgcctccgagctgcccacaacagtgaccgtggcacaggttaattactcagcagtcgcagatggcgaggtggagcagaactgggccacgctgcagggaggagaaatgactatacagaccacccaagcttcagaggcgacgcaggcggttgcaagcttagccgaagccgctgtggcagcctctcaggaaatgcagcagggcgctaccgtcactatggcactgaacagtgaggctgctgcccatgctgtcgccacactggccgaagcaaccctgcaagggggagggcagattgtactgtccggcgaaactgccgctgcggtgggtgcacttaccggggtgcaggacgccaatggcttagtgcaaattccagtttccatgtaccagactgtcgtgacctccctggcgcagggcaacggaccggtgcaggtggcaatggctccagtgaccactaggattagcgacagcgccgtgacgatggatgggcaggccgtggaagtggtcacactggagcagtag

SEQ ID NO: 111295 - DNA, 1029 bp, Artificial Sequence
  derived and/or modified sequence
atgatcctggaggacctggagagcgccctggccgagcacgcccccgccccccaggaggtgaacagcgagctgccccccctgaccatcgacggcatccccgtgagcgtggacaagatgacccaggcccagctgagagccttcatccccgagatgctgaagtacagcaccggcagaggcaagcccggctggggcaaggagagctgcaagcccatctggtggcccgaggacatcccctgggccaacgtgagaagcgacgtgagaaccgaggagcagaagcagagagtgagctggacccaggccctgagaaccatcgtgaagaactgctacaagcagcacggcagagaggacctgctgtacgccttcgaggaccagcagacccagacccaggccaccgccacccacagcatcgcccacctggtgcccagccagaccgtggtgcagaccttcagcaaccccgacggcaccgtgagcctgatccaggtgggcaccggcgccaccgtggccaccctggccgacgccagcgagctgcccaccaccgtgaccgtggcccaggtgaactacagcgccgtggccgacggcgaggtggagcagaactgggccaccctgcagggcggcgagatgaccatccagaccacccaggccagcgaggccacccaggccgtggccagcctggccgaggccgccgtggccgccagccaggagatgcagcagggcgccaccgtgaccatggccctgaacagcgaggccgccgcccacgccgtggccaccctggccgaggccaccctgcagggcggcggccagatcgtgctgagcggcgagaccgccgccgccgtgggcgccctgaccggcgtgcaggacgccaacggcctggtgcagatccccgtgagcatgtaccagaccgtggtgaccagcctggcccagggcaacggccccgtgcaggtggccatggcccccgtgaccaccagaatcagcgacagcgccgtgaccatggacggccaggccgtggaggtggtgaccctggagcagtag

SEQ ID NO: 111296 - protein, 351 aa, Artificial Sequence
  derived and/or modified sequence
MAGIPGLLFLLFFLLCAVGQVSPYSAPWKPTWPAYRLPVVLPQSTLNLAKQYLSYETLYANGSRTETQVGIYILSSSGDGAQHRDSGSSGKSRRKRQIYGYDSRFSIFGKDFLLNYPFSTSVKLSTGCTGTLVAEKHVLTAAHCIHDGKTYVKGTQKLRVGFLKPKFKDGGRGANDSTSAMPEQMKFQWIRVKRTHVPKGWIKGNANDIGMDYDYALLELKKPHKRKFMKIGVSPPAKQLPGGRIHFSGYDNDRPGNLVYRFCDVKDETYDLLYQQCDAQPGASGSGVYVRMWKRQQQKWERKIIGIFSGHQWVDMNGSPQDFNVAVRITPLKYAQICYWIKGNYLDCREG

SEQ ID NO: 111297 - DNA, 1056 bp, Artificial Sequence
  derived and/or modified sequence
atggcagggatacctggactgctgttcctgttgttcttcttgctctgcgcggtaggccaggtgtcaccatattcagcaccatggaagcccacctggcccgcttatcgcctccccgtggttctcccgcagagtacgctcaatcttgcaaagcagtacctgagctacgagactttgtacgccaatggcagccgcactgagacacaggtgggcatttacattttgtcctcctccggggacggcgctcagcaccgggacagcggaagctctggaaaaagcaggcggaagcggcagatctatggttatgattctcgcttctccatctttggaaaggacttcttgctgaattaccccttttctacttcggtgaaactgagcaccggctgcaccgggacgctggtggctgaaaaacacgtcctgacagctgctcactgtattcacgacggcaagacttatgttaagggaacacagaaacttagagtcgggttcctaaagcccaagttcaaggatgggggtcggggagcaaacgattcaacgtctgccatgcccgagcagatgaaattccagtggatcagagtgaagcgcacccacgtgcccaaaggttggattaaagggaacgcaaatgacattggaatggactatgactatgccctcttggaactcaagaaaccacataagcggaagtttatgaagatcggagtgtcccctccagcaaagcagttgcctggaggtcggattcatttttctggctacgataacgatcgccctggcaatctggtgtaccggttttgtgatgtcaaggacgagacttacgatctcttgtatcagcagtgcgatgcccaacctggggcaagcgggtctggcgtgtacgtaagaatgtggaagagacagcaacagaagtgggagaggaaaattattggaatttttagcggacaccagtgggtggacatgaacggctccccccaggacttcaatgtggcggtgagaattacccctcttaaatatgcccaaatctgttattggatcaaagggaactatctagactgtcgtgaaggttag

SEQ ID NO: 111298 - DNA, 1056 bp, Artificial Sequence
  derived and/or modified sequence
atggcaggaatcccaggactcctgtttcttctcttcttccttctctgtgccgttggtcaggttagcccttatagtgccccatggaagcctacgtggcctgcatatcgactccctgtggtccttccacagagcacactcaacttagccaagcagtacctaagctacgagacactctatgccaacggcagtcggacagaaacacaggtaggaatttacatcctgagctctagtggagacggcgcccagcacagagactcagggagttccggaaaatcccgaaggaagaggcagatctacgggtacgactcaaggttcagtatattcgggaaggactttctactaaactatccctttagcacatcagtgaagctgtcaacaggctgtacaggaacgctcgtggccgaaaagcacgtgctgaccgcagcgcattgcatccacgatggcaaaacctatgtgaaaggcactcaaaagcttcgagtgggatttctgaaaccaaagtttaaagatgggggcaggggcgccaacgactccacctccgctatgcccgaacagatgaagttccaatggatcagggtgaaacgcacgcacgttccaaaggggtggattaagggaaatgcaaacgacattggcatggactacgactatgctctcctggagctcaagaaaccacataagagaaagttcatgaaaataggagtgtccccaccggcaaagcagctcccgggaggcagaattcatttttctgggtatgacaacgaccggcccgggaacctagtgtacagattctgtgacgtcaaggacgagacctacgatctgctctaccaacagtgtgacgcccaacccggcgcgagtgggtccggtgtgtatgtccgcatgtggaaacgccagcagcagaagtgggagcgcaagataatcggaattttctcgggacatcaatgggtcgacatgaacgggtcaccacaagattttaatgtggccgtgagaataactcccctgaagtatgctcaaatttgttattggattaagggaaactacctcgattgccgtgagggttag

SEQ ID NO: 111299 - DNA, 1510 bp, Artificial Sequence
  derived and/or modified sequence
cactcggctgtgcggcggggcaggcatgggagccgcgcgctctctcccggcgcccacacctgtctgagcggcgcagcgagccgcggcccgggcgggctgctcggcgcggaacagtgctcggcatggcagggattccagggctcctcttccttctcttctttctgctctgtgctgttgggcaagtgagcccttacagtgccccctggaaacccacttggcctgcataccgcctccctgtcgtcttgccccagtctaccctcaatttagccaagcaatatctgtcttatgaaacgctctatgccaatggcagccgcacagagacgcaggtgggcatctacatcctcagcagtagtggagatggggcccaacaccgagactcagggtcttcaggaaagtctcgaaggaagcggcagatttatggctatgacagcaggttcagcatttttgggaaggacttcctgctcaactaccctttctcaacatcagtgaagttatccacgggctgcaccggcaccctggtggcagagaagcatgtcctcacagctgcccactgcatacacgatggaaaaacctatgtgaaaggaacccagaagcttcgagtgggcttcctaaagcccaagtttaaagatggtggtcgaggggccaacgactccacttcagccatgcccgagcagatgaaatttcagtggatccgggtgaaacgcacccatgtgcccaagggttggatcaagggcaatgccaatgacatcggcatggattatgattatgccctcctggaactcaaaaagccccacaagagaaaatttatgaagattggggtgagccctcctgctaagcagctgccagggggcagaattcacttctctggttatgacaatgaccgaccaggcaatttggtgtatcgcttctgtgacgtcaaagacgagacctatgacttgctctaccagcaatgcgatgcccagccaggggccagcgggtctggggtctatgtgaggatgtggaagagacagcagcagaagtgggagcgaaaaattattggcattttttcagggcaccagtgggtggacatgaatggttccccacaggatttcaacgtggctgtcagaatcactcctctcaaatatgcccagatttgctattggattaaaggaaactacctggattgtagggaggggtgacacagtgttccctcctggcagcaattaagggtcttcatgttcttattttaggagaggccaaattgttttttgtcattggcgtgcacacgtgtgtgtgtgtgtgtgtgtgtgtgtaaggtgtcttataatcttttacctatttcttacaattgcaagatgactggctttactatttgaaaactggtttgtgtatcatatcatatatcatttaagcagtttgaaggcatacttttgcatagaaataaaaaaaatactgatttggggcaatgaggaatatttgacaattaagttaatcttcacgtttttgcaaactttgatttttatttcatctg

SEQ ID NO: 111300 - DNA, 1056 bp, Artificial Sequence
  derived and/or modified sequence
atggctggcattccaggactgttattcctcttgtttttccttctctgtgccgttggacaggtgagtccatatagcgccccatggaaacccacctggcccgcatataggcttcccgttgtgctaccacagtcaactttgaatttggccaagcagtatctgagttatgaaacattatacgcaaatggttctagaaccgaaacccaggttggaatttacatattaagctcatccggggatggggcccaacatagggattcggggagttccgggaaaagtcggcgaaagagacagatatacgggtacgatagccgcttctccatctttggaaaagatttcctcctcaattatccgttcagcacatcagtaaaactgtcgacaggctgtacaggcacactggttgccgagaaacacgtacttactgccgcacattgtatacacgatggtaagacttacgtcaaagggacacaaaagttacgagtgggcttcctaaaacccaagtttaaagatggcggacggggtgctaacgacagcacctccgctatgcccgagcagatgaaatttcaatggatccgcgtgaaaagaactcatgttccaaaagggtggattaaggggaacgcgaatgacatcggaatggattatgactacgccttactggagctcaagaagccacataaacggaaatttatgaagattggcgtctcacctcctgccaagcagctcccaggcggccggatacattttagcgggtatgacaatgaccggcctggtaaccttgtgtatagattttgcgatgtgaaggatgaaacgtacgacctcttataccagcagtgtgacgcacagccaggtgcgagtggtagcggcgtgtacgtgcggatgtggaagcggcagcaacagaaatgggagcgcaagataatcggaattttctcgggacatcaatgggtcgacatgaacgggtcaccacaagattttaatgtggccgtgagaataactcccctgaagtatgctcaaatttgttattggattaagggaaactacctcgattgccgtgagggttag

SEQ ID NO: 111301 - DNA, 1056 bp, Artificial Sequence
  derived and/or modified sequence
atggccggcatccccggcctgctgttcctgctgttcttcctgctgtgcgccgtgggccaggtgagcccctacagcgccccctggaagcccacctggcccgcctacagactgcccgtggtgctgccccagagcaccctgaacctggccaagcagtacctgagctacgagaccctgtacgccaacggcagcagaaccgagacccaggtgggcatctacatcctgagcagcagcggcgacggcgcccagcacagagacagcggcagcagcggcaagagcagaagaaagagacagatctacggctacgacagcagattcagcatcttcggcaaggacttcctgctgaactaccccttcagcaccagcgtgaagctgagcaccggctgcaccggcaccctggtggccgagaagcacgtgctgaccgccgcccactgcatccacgacggcaagacctacgtgaagggcacccagaagctgagagtgggcttcctgaagcccaagttcaaggacggcggcagaggcgccaacgacagcaccagcgccatgcccgagcagatgaagttccagtggatcagagtgaagagaacccacgtgcccaagggctggatcaagggcaacgccaacgacatcggcatggactacgactacgccctgctggagctgaagaagccccacaagagaaagttcatgaagatcggcgtgagcccccccgccaagcagctgcccggcggcagaatccacttcagcggctacgacaacgacagacccggcaacctggtgtacagattctgcgacgtgaaggacgagacctacgacctgctgtaccagcagtgcgacgcccagcccggcgccagcggcagcggcgtgtacgtgagaatgtggaagagacagcagcagaagtgggagagaaagatcatcggcatcttcagcggccaccagtgggtggacatgaacggcagcccccaggacttcaacgtggccgtgagaatcacccccctgaagtacgcccagatctgctactggatcaagggcaactacctggactgcagagagggctag

SEQ ID NO: 111302 - DNA, 1056 bp, Artificial Sequence
  derived and/or modified sequence
atggcgggtattcctggcctgctgttcctgttgttttttctgttgtgcgccgtcgggcaggtatcgccatactccgccccttggaagccaacctggccagcttaccgtttgcctgtagtgctccctcagtcaacccttaacctcgcaaaacagtacttatcatacgagacattgtacgcaaatggctcacggacggagacccaggtgggcatctacatcttatccagcagtggggacggtgcacagcaccgggactcgggctcatcaggcaaatcaaggcgcaagagacagatttatggatatgactcgaggttttccattttcgggaaggattttctgctgaattacccgttctccaccagtgtgaaactgagtacggggtgcacaggaactctggttgccgaaaagcacgtcttgaccgcagcgcactgtatacatgacggtaagacttacgtgaagggcacccagaagctgagagtcgggttcctgaaacctaaatttaaggacggcggtagaggtgccaatgatagtacctcggccatgccagagcagatgaaatttcaatggattagagtgaaaagaactcatgttcctaagggatggataaagggaaatgccaacgacattggtatggattacgactacgctctgttggagctaaaaaagcctcacaagagaaagttcatgaagataggtgtttcgccacctgccaagcagttgcctggcggtcgtattcatttcagcgggtatgataacgatcggccagggaacctggtctaccgcttctgcgatgtgaaggatgaaacctatgacctgctgtatcagcagtgtgacgctcagccaggtgccagcggtagcggggtgtacgtgaggatgtggaaaaggcagcagcagaagtgggagcgaaaaattatcggtatcttttcagggcatcagtgggttgatatgaatggtagtccacaggatttcaacgtggctgtcagaatcacacccttaaaatatgcacagatttgctactggataaaaggcaattaccttgactgcagggagggctag

SEQ ID NO: 111303 - DNA, 1056 bp, Artificial Sequence
  derived and/or modified sequence
atggccggcatccctggcctgctcttcctgctcttcttcctgctgtgtgctgtgggccaggtgagcccctacagcgccccctggaagcccacctggccagcctaccgcctgcctgtggtgctgccccagagcaccctgaacctggccaagcagtacctgtcctatgagaccctgtatgccaacggcagcaggacagagacccaggtgggcatctacatcctgagcagcagtggagatggagcccagcaccgggacagcggcagcagcggcaagagcaggaggaagaggcagatctacggctatgacagccgcttcagcatctttgggaaggacttcctgctgaactaccccttcagcacctctgtgaagctgagcacaggctgcaccggcaccctggtggccgagaagcacgtgctgacagctgcccactgcatccatgatggcaagacctacgtgaagggcacccagaagctgcgggtgggcttcctgaagcccaagttcaaggatggcggccgcggggccaatgacagcaccagcgccatgcctgagcagatgaagttccagtggatccgggtgaagaggacccacgtgcccaagggctggatcaagggaaatgccaatgacatcggcatggactatgactatgccctgctggagctgaagaagccccacaagaggaagttcatgaagattggagtgtccccaccagccaagcagctgcccggcggccgcatccacttcagcggctatgacaatgacaggcctggcaacctggtgtaccgcttctgtgatgtgaaggatgagacctatgacctgctgtaccagcagtgtgatgcccagcccggggccagcggcagcggcgtgtatgtgaggatgtggaagaggcagcagcagaagtgggagaggaagatcatcggcatcttcagcggccaccagtgggtggacatgaatggcagcccccaggacttcaacgtggccgtgcgcatcacccccctgaagtatgcccagatctgctactggatcaagggcaactacctggactgccgggagggctag

SEQ ID NO: 111304 - DNA, 1056 bp, Artificial Sequence
  derived and/or modified sequence
atggccggcatccccggcctgctgttcctgctgttcttcctgctgtgcgccgtgggccaggtgtcaccatattctgccccctggaagccgacctggccggcctacagactcccagtggtgctgccccagtctacgctcaatctggcaaagcagtacctctcctatgagacgctgtacgccaatggcagcaggaccgagactcaagtcggaatttatatcctttcatccagcggtgatggggctcagcacagggattctggcagcagcggcaagagccgccgaaagcgccagatctacggctacgactcgcgcttcagcatctttggaaaagattttctgctcaattatcccttcagtacaagtgtcaaactctcaacaggctgcacagggacactggttgcggagaagcacgtgctgactgcagcccactgtattcacgatggtaagacttatgtcaaggggacacagaaactgagggtgggcttcctcaaacctaaatttaaagatggaggccgaggcgcaaacgattcaacatccgccatgcctgagcagatgaagttccagtggattagagttaaacgtactcacgtcccaaaagggtggatcaagggaaacgccaatgatatcggtatggattatgactacgcattactagaactgaaaaagccacacaaaagaaaatttatgaagattggagtttccccacctgctaagcagttacctggagggcggatccacttcagcgggtacgataacgacagaccaggaaatctggtgtaccgtttttgtgatgtcaaagacgagacctacgatctcctgtaccagcagtgcgacgcacaacccggggcctcaggaagcggagtctatgtgaggatgtggaaacgccaacagcaaaagtgggagcgcaagatcatcgggatcttctcagggcatcagtgggttgatatgaacggaagccctcaagactttaatgtcgccgtcaggattacccctttgaagtacgcgcagatttgttactggatcaagggcaactatctggactgccgagagggatag

SEQ ID NO: 111305 - RNA, 1056 nt, Artificial Sequence
  derived and/or modified sequence
auggcaggaaucccaggacuccuguuucuucucuucuuccuucucugugccguuggucagguuagcccuuauagugccccauggaagccuacguggccugcauaucgacucccugugguccuuccacagagcacacucaacuuagccaagcaguaccuaagcuacgagacacucuaugccaacggcagucggacagaaacacagguaggaauuuacauccugagcucuaguggagacggcgcccagcacagagacucagggaguuccggaaaaucccgaaggaagaggcagaucuacggguacgacucaagguucaguauauucgggaaggacuuucuacuaaacuaucccuuuagcacaucagugaagcugucaacaggcuguacaggaacgcucguggccgaaaagcacgugcugaccgcagcgcauugcauccacgauggcaaaaccuaugugaaaggcacucaaaagcuucgagugggauuucugaaaccaaaguuuaaagaugggggcaggggcgccaacgacuccaccuccgcuaugcccgaacagaugaaguuccaauggaucagggugaaacgcacgcacguuccaaagggguggauuaagggaaaugcaaacgacauuggcauggacuacgacuaugcucuccuggagcucaagaaaccacauaagagaaaguucaugaaaauaggaguguccccaccggcaaagcagcucccgggaggcagaauucauuuuucuggguaugacaacgaccggcccgggaaccuaguguacagauucugugacgucaaggacgagaccuacgaucugcucuaccaacagugugacgcccaacccggcgcgaguggguccgguguguauguccgcauguggaaacgccagcagcagaagugggagcgcaagauaaucggaauuuucucgggacaucaaugggucgacaugaacgggucaccacaagauuuuaauguggccgugagaauaacuccccugaaguaugcucaaauuuguuauuggauuaagggaaacuaccucgauugccgugaggguuag

SEQ ID NO: 111306 - RNA, 1056 nt, Artificial Sequence
  derived and/or modified sequence
auggcuggcauuccaggacuguuauuccucuuguuuuuccuucucugugccguuggacaggugaguccauauagcgccccauggaaacccaccuggcccgcauauaggcuucccguugugcuaccacagucaacuuugaauuuggccaagcaguaucugaguuaugaaacauuauacgcaaaugguucuagaaccgaaacccagguuggaauuuacauauuaagcucauccggggauggggcccaacauagggauucggggaguuccgggaaaagucggcgaaagagacagauauacggguacgauagccgcuucuccaucuuuggaaaagauuuccuccucaauuauccguucagcacaucaguaaaacugucgacaggcuguacaggcacacugguugccgagaaacacguacuuacugccgcacauuguauacacgaugguaagacuuacgucaaagggacacaaaaguuacgagugggcuuccuaaaacccaaguuuaaagauggcggacggggugcuaacgacagcaccuccgcuaugcccgagcagaugaaauuucaauggauccgcgugaaaagaacucauguuccaaaaggguggauuaaggggaacgcgaaugacaucggaauggauuaugacuacgccuuacuggagcucaagaagccacauaaacggaaauuuaugaagauuggcgucucaccuccugccaagcagcucccaggcggccggauacauuuuagcggguaugacaaugaccggccugguaaccuuguguauagauuuugcgaugugaaggaugaaacguacgaccucuuauaccagcagugugacgcacagccaggugcgagugguagcggcguguacgugcggauguggaagcggcagcaacagaaaugggagcgcaagauaaucggaauuuucucgggacaucaaugggucgacaugaacgggucaccacaagauuuuaauguggccgugagaauaacuccccugaaguaugcucaaauuuguuauuggauuaagggaaacuaccucgauugccgugaggguuag

SEQ ID NO: 111307 - DNA, 1152 bp, Artificial Sequence
  derived and/or modified sequence
atggccggtataccaggattgctgttcctactattcttcctgttatgtgctgttggacaagtaagcccatatagcgccccttggaagccaacttggcctgcataccgccttcctgtagtgcttccccaatcaacgttaaatctagctaagcccgattttggggcagaagccaagctcgaagtgagtagttcatgtggcccacagtgccacaagggaacacccctgcccacatatgaagaggcgaagcagtatttaagctatgaaactctgtatgccaatggcagtagaactgaaacacaggtgggcatttatatcctttcctcatcaggggatggggctcagcatcgagactccgggtcctctgggaagagcagacggaaaagacagatctatggctacgactcaaggttttcaatattcggtaaagactttctgctcaattacccattctcaaccagcgttaagctcagtaccggctgcactggcacactcgtcgccgaaaaacacgtcctgaccgctgcccactgcatccacgacggaaagacttacgtaaagggaacacaaaagctccgggtaggttttctgaaacctaagtttaaagacggaggacgaggggcaaatgattctacgtctgcaatgcctgagcagatgaaattccagtggattcgggttaagaggacgcatgtgccaaaaggctggatcaaggggaatgctaacgatattggaatggattacgactacgcgctgcttgaactgaaaaagccccacaaacgtaagttcatgaagatcggagtctctcctcccgcaaaacagctccctggtggcaggatccatttttccgggtatgacaatgatcgcccaggaaatctcgtgtacagattttgtgacgtgaaagacgagacgtacgacctcctctaccagcagtgtgatgctcagcccggagcctctggtagtggagtttacgtaaggatgtggaaacgtcagcagcaaaagtgggagaggaaaatcattgggatcttttctggccaccagtgggtggatatgaatggctccccacaggatttcaacgtcgccgtacgcattacaccactcaagtacgcccaaatttgttattggattaaggggaattaccttgattgtcgcgaggggtag

SEQ ID NO: 111308 - DNA, 465 bp, Artificial Sequence
  derived and/or modified sequence
atggctggtatccccggacttctgtttttactgttcttcctgctgtgcgccgtgggtcaggtctctccctattccgccccttggaagccgacatggcctgcttataggcttccggtcgtgttgccacagtccacccttaatctcgcaaaacctgattttggcgctgaggccaagctggaggtgtcatcaagctgcggcccacagtgccacaaggggacacctctgcctacgtatgaagaggcgaaacagtatctctcgtatgagacactgtacgctaacggctctaggacagaaacccaggtgggaatctatatcctttcatccagcggggacggtgcacagcaccgagactctggcagctccggcaaatcccgtagaaaacgccagatctacgggtacgattctcggttctctatcttcggtaaggattttctcctgaattaccccttctcaacctcggtctag

SEQ ID NO: 111309 - DNA, 1152 bp, Artificial Sequence
  derived and/or modified sequence
atggcgggcatcccaggtttgcttttcctacttttctttctcttgtgcgccgtcgggcaggtatctccgtacagcgcaccatggaagcccacatggccagcataccgcttgcccgtggtattacctcagtcaacattgaatttagcaaagcccgacttcggcgcggaggccaagttggaagtcagctcttcttgcggtccgcagtgccacaaaggaacgccactgccgacatacgaagaggccaaacagtatctaagctacgagacattgtatgcaaatggttctagaacagaaacacaggttggtatatacattttgtcatcgtcaggagatggtgcccagcatagggactcaggatcttcaggtaaatcacgccgtaaacgacagatctatggttacgacagcaggtttagcatcttcggcaaagattttctccttaactatcccttctcgacttcagtgaaactgtctacagggtgcactggaacgcttgtcgcggagaaacatgttttgaccgccgcccactgtatccacgatggcaaaacttacgtaaagggaactcagaagttgagagtggggttcctgaagccgaaatttaaggatggtggccggggcgctaacgattcaacaagcgccatgcctgagcagatgaaatttcagtggataagagtgaagagaactcacgtgcctaaggggtggataaagggcaacgctaatgacattggcatggattatgattatgcattactggaactcaaaaagccccacaaaagaaagtttatgaaaatcggagtatcgccccctgctaaacaactgccaggtggcaggatccactttagcgggtatgacaatgacagacctggcaacctcgtgtacaggttctgcgatgtgaaggacgaaacttacgacctgctttatcagcaatgtgacgcacaacccggggccagcggttctggcgtctacgtccggatgtggaaacggcaacaacagaaatgggagaggaaaataatcggtattttttcagggcatcagtgggtggacatgaacggctctccccaagacttcaatgtcgccgtcaggattacacctttaaagtatgcacaaatttgttactggatcaaggggaattatctcgattgtcgcgagggatag

SEQ ID NO: 111310 - DNA, 465 bp, Artificial Sequence
  derived and/or modified sequence
atggctgggatcccaggcctccttttcctgctattcttcctactctgcgcagtcgggcaggtgagtccctactcggcaccctggaagccgacctggccggcctatagacttccagtagttctcccgcaatccaccttgaatcttgctaagcctgatttcggcgccgaagcaaaattagaagtaagtagctcttgtggcccacaatgtcacaaaggcacacctctccccacatatgaggaagcgaagcaatacctcagttatgaaaccctatacgccaacggatcgcgcacagagacacaagtgggcatctacatcctgtctagttccggggacggcgcacagcatagagattccgggtcaagtggtaagtcccgccggaagcgacaaatttacggttatgacagcagattttctatttttgggaaggactttcttctgaattaccctttcagcacctccgtatag

SEQ ID NO: 111311 - DNA, 1152 bp, Artificial Sequence
  derived and/or modified sequence
atggctggcatccctggtctgctctttttgctgtttttccttttatgcgcagtcggtcaagtgagtccttatagcgccccctggaagcccacatggcccgcatatcggctgcccgtggttttaccacagtcaaccttgaacctggccaagcctgactttggagcagaggccaagctggaagtgtcatcttcgtgcggaccccaatgccataaaggaacacccctccctacttacgaggaggcaaaacagtacctgtcttacgaaacattgtatgccaacggctctagaactgaaacccaggtgggcatctatattctctcttcatctggtgatggtgcacagcacagagactctggaagttccgggaaaagtcgtagaaagagacaaatatacgggtatgattcccggttttccatcttcggtaaagactttttactcaattatcccttttctacctccgtaaagctttctactgggtgtaccgggaccctggtggctgagaaacacgtgctcaccgccgctcattgtatccatgacgggaagacctatgttaaaggcacgcagaagcttagagttggattcctgaaaccaaaattcaaagacggaggacgcggcgcaaatgactcaacttcggctatgcctgaacaaatgaaattccagtggatccgtgtgaagcgaacgcatgtccctaagggctggattaagggtaacgcaaatgatattggaatggattatgactatgccctgctcgaactgaagaaacctcacaaacgtaagttcatgaagatcggcgtctccccacctgcaaagcagcttccaggcggtaggattcactttagtggatatgataatgacagacctgggaatctcgtgtatcgcttctgtgatgtgaaggacgaaacttatgatctcttgtaccagcagtgcgatgctcaaccaggggcctccgggagtggagtgtatgtcagaatgtggaaaagacagcagcagaaatgggagcgcaaaatcattggaatcttctcaggccaccagtgggtcgacatgaacggaagtccacaggattttaacgtggctgtgcgaattacaccactgaaatatgctcaaatctgttattggatcaaaggcaactatctcgattgccgcgaaggttag

SEQ ID NO: 111312 - DNA, 465 bp, Artificial Sequence
  derived and/or modified sequence
atggctgggatcccaggcctccttttcctgctattcttcctactctgcgcagtcgggcaggtgagtccctactcggcaccctggaagccgacctggccggcctatagacttccagtagttctcccgcaatccaccttgaatcttgctaagcctgatttcggcgccgaagcaaaattagaagtaagtagctcttgtggcccacaatgtcacaaaggcacacctctccccacatatgaggaagcgaagcaatacctcagttatgaaaccctatacgccaacggatcgcgcacagagacacaagtgggcatctatattctgagctctagtggcgacggagcccagcacagagacagtggcagctctggcaagagtcggcgaaaaaggcagatttatggttatgattctagattctctatctttggaaaggactttctacttaattatccattctcaacaagcgtgtag

SEQ ID NO: 111313 - DNA, 1152 bp, Artificial Sequence
  derived and/or modified sequence
atggccggcatccccggcctgctgttcctgctgttcttcctgctgtgcgccgtgggccaggtgagcccctacagcgccccctggaagcccacctggcccgcctacagactgcccgtggtgctgccccagagcaccctgaacctggccaagcccgacttcggcgccgaggccaagctggaggtgagcagcagctgcggcccccagtgccacaagggcacccccctgcccacctacgaggaggccaagcagtacctgagctacgagaccctgtacgccaacggcagcagaaccgagacccaggtgggcatctacatcctgagcagcagcggcgacggcgcccagcacagagacagcggcagcagcggcaagagcagaagaaagagacagatctacggctacgacagcagattcagcatcttcggcaaggacttcctgctgaactaccccttcagcaccagcgtgaagctgagcaccggctgcaccggcaccctggtggccgagaagcacgtgctgaccgccgcccactgcatccacgacggcaagacctacgtgaagggcacccagaagctgagagtgggcttcctgaagcccaagttcaaggacggcggcagaggcgccaacgacagcaccagcgccatgcccgagcagatgaagttccagtggatcagagtgaagagaacccacgtgcccaagggctggatcaagggcaacgccaacgacatcggcatggactacgactacgccctgctggagctgaagaagccccacaagagaaagttcatgaagatcggcgtgagcccccccgccaagcagctgcccggcggcagaatccacttcagcggctacgacaacgacagacccggcaacctggtgtacagattctgcgacgtgaaggacgagacctacgacctgctgtaccagcagtgcgacgcccagcccggcgccagcggcagcggcgtgtacgtgagaatgtggaagagacagcagcagaagtgggagagaaagatcatcggcatcttcagcggccaccagtgggtggacatgaacggcagcccccaggacttcaacgtggccgtgagaatcacccccctgaagtacgcccagatctgctactggatcaagggcaactacctggactgcagagagggctag

SEQ ID NO: 111314 - DNA, 465 bp, Artificial Sequence
  derived and/or modified sequence
atggccggcatccccggcctgctgttcctgctgttcttcctgctgtgcgccgtgggccaggtgagcccctacagcgccccctggaagcccacctggcccgcctacagactgcccgtggtgctgccccagagcaccctgaacctggccaagcccgacttcggcgccgaggccaagctggaggtgagcagcagctgcggcccccagtgccacaagggcacccccctgcccacctacgaggaggccaagcagtacctgagctacgagaccctgtacgccaacggcagcagaaccgagacccaggtgggcatctacatcctgagcagcagcggcgacggcgcccagcacagagacagcggcagcagcggcaagagcagaagaaagagacagatctacggctacgacagcagattcagcatcttcggcaaggacttcctgctgaactaccccttcagcaccagcgtgtag

SEQ ID NO: 111315 - DNA, 1152 bp, Artificial Sequence
  derived and/or modified sequence
atggccggcattccagggctgctgttcttgcttttttttctgctttgcgctgtagggcaggtgagcccatattcagcgccctggaagcccacatggccggcctaccgcttgccagtggtcctgccccagagcactcttaacctcgccaagcccgatttcggggctgaggctaagttagaagtgagcagcagctgcggaccgcagtgtcacaaggggaccccacttccaacgtacgaggaggcgaagcagtacctgtcatacgagaccctgtatgccaacgggtcacgaactgagacacaagtaggcatttacattctgtcctcaagcggtgatggcgcacagcatcgagatagcgggtcctcaggcaaaagtcggagaaagagacaaatttacggctatgatagccggtttagcatcttcggcaaagacttcctactgaactacccattttctacatctgtcaagttatcgacgggttgtaccggcactctcgttgccgagaaacatgtattaaccgctgcccactgcatacatgacggcaaaacttacgtgaagggaacccaaaagctgcgcgtcggattcctcaagccgaagtttaaggatggcggcaggggggcgaacgattccacctcagctatgccagagcagatgaagttccagtggatcagagtgaagaggacccacgtccccaagggatggatcaaaggtaacgctaacgatatagggatggattacgattatgcactcctcgagctaaaaaaacctcacaaacggaaatttatgaagattggcgtctctccaccagcaaagcagctgcctggcggtagaatccacttcagtggctacgataatgacaggcccggaaacctcgtgtaccgcttttgtgatgttaaagacgagacctacgatctgttatatcagcaatgcgacgcccagccgggcgccagcggctctggggtgtatgtccggatgtggaagagacagcagcagaagtgggagaggaagattatcggcatattttcgggtcaccaatgggtggacatgaacggtagcccccaggatttcaacgtggcagtgcgcatcacaccactaaaatacgcccagatctgctattggatcaagggcaattatcttgattgtcgggaggggtag

SEQ ID NO: 111316 - DNA, 465 bp, Artificial Sequence
  derived and/or modified sequence
atggcaggcatcccaggactgctgttcctcctgtttttcctgttatgcgccgtggggcaggtgagtccttactcagcaccttggaagccaacatggccagcctacaggctgcctgttgtgttgccacagtccaccctgaatcttgccaaaccagattttggcgcggaagccaagttggaagtgtcatcttcgtgtggaccacagtgtcacaaaggaactccgctcccaacgtatgaagaggccaagcagtacttgtcttacgaaacattgtacgcaaacggctctcgaactgaaacccaagtgggcatctatatcttgagcagcagcggagatggtgcccagcatagggacagcggatctagcgggaaatcacgtcggaagcggcagatttacgggtatgactccagattttccatctttgggaaggacttcctgctgaactacccattctccacaagcgtgtag

SEQ ID NO: 111317 - DNA, 1152 bp, Artificial Sequence
  derived and/or modified sequence
atggccggcatccctggcctgctcttcctgctcttcttcctgctgtgtgctgtgggccaggtgagcccctacagcgccccctggaagcccacctggccagcctaccgcctgcctgtggtgctgccccagagcaccctgaacctggccaagccagactttggagctgaggccaagctggaggtgagcagcagctgtggcccccagtgccacaagggcacccccctgcccacctatgaggaggccaagcagtacctgtcctatgagaccctgtatgccaacggcagcaggacagagacccaggtgggcatctacatcctgagcagcagtggagatggagcccagcaccgggacagcggcagcagcggcaagagcaggaggaagaggcagatctacggctatgacagccgcttcagcatctttgggaaggacttcctgctgaactaccccttcagcacctctgtgaagctgagcacaggctgcaccggcaccctggtggccgagaagcacgtgctgacagctgcccactgcatccatgatggcaagacctacgtgaagggcacccagaagctgcgggtgggcttcctgaagcccaagttcaaggatggcggccgcggggccaatgacagcaccagcgccatgcctgagcagatgaagttccagtggatccgggtgaagaggacccacgtgcccaagggctggatcaagggaaatgccaatgacatcggcatggactatgactatgccctgctggagctgaagaagccccacaagaggaagttcatgaagattggagtgtccccaccagccaagcagctgcccggcggccgcatccacttcagcggctatgacaatgacaggcctggcaacctggtgtaccgcttctgtgatgtgaaggatgagacctatgacctgctgtaccagcagtgtgatgcccagcccggggccagcggcagcggcgtgtatgtgaggatgtggaagaggcagcagcagaagtgggagaggaagatcatcggcatcttcagcggccaccagtgggtggacatgaatggcagcccccaggacttcaacgtggccgtgcgcatcacccccctgaagtatgcccagatctgctactggatcaagggcaactacctggactgccgggagggctag

SEQ ID NO: 111318 - DNA, 465 bp, Artificial Sequence
  derived and/or modified sequence
atggccggcatccctggcctgctcttcctgctcttcttcctgctgtgtgctgtgggccaggtgagcccctacagcgccccctggaagcccacctggccagcctaccgcctgcctgtggtgctgccccagagcaccctgaacctggccaagccagactttggagctgaggccaagctggaggtgagcagcagctgtggcccccagtgccacaagggcacccccctgcccacctatgaggaggccaagcagtacctgtcctatgagaccctgtatgccaacggcagcaggacagagacccaggtgggcatctacatcctgagcagcagtggagatggagcccagcaccgggacagcggcagcagcggcaagagcaggaggaagaggcagatctacggctatgacagccgcttcagcatctttgggaaggacttcctgctgaactaccccttcagcacctctgtgtag

SEQ ID NO: 111319 - DNA, 1152 bp, Artificial Sequence
  derived and/or modified sequence
atggccggcatccccggcctgctgttcctgctgttcttcctgctgtgcgccgtgggccaagtgtccccttacagcgccccctggaaacctacttggccagcttatcggctgcccgtggttctcccgcagagcacattgaacctcgctaagccagactttggggctgaggcaaagttagaagttagttcctcgtgcggtccccagtgccacaagggcacccctctccccacatacgaggaggcaaagcagtacttaagttatgaaacgttatacgccaacgggagcagaacagaaacccaggtggggatctatattttgtcgtccagtggcgatggggcccagcatcgcgatagcggctcaagcgggaaatcgcggcgcaagcgacagatctacggctacgacagcaggtttagtatatttggaaaagatttcctgctcaactacccattctccacatctgtgaaactgagcactggttgcacggggaccttagtggccgaaaagcacgtgctgacagccgcccattgtatccacgatgggaaaacctatgttaagggtacacaaaaattgagagtgggattcttgaagccgaaattcaaggatgggggtcgtggtgccaatgactcaaccagcgccatgcccgagcagatgaaatttcagtggatcagagttaagaggacccacgttccaaaaggatggatcaagggaaatgccaatgacatcggcatggactacgattacgccctcctcgagctcaagaaaccacataagaggaaatttatgaagatcggtgtatccccgccagccaagcagctgcccggcggccgaatacatttcagtggctatgacaacgataggcccggcaatctggtgtatcgcttctgtgatgtgaaggatgagacctacgacttgctgtaccaacaatgcgacgctcaacccggagcttcgggaagtggcgtgtatgtgcgcatgtggaaacggcagcagcagaaatgggaaagaaaaataatcgggatcttctctggccatcagtgggtcgatatgaatgggtccccccaggattttaatgtcgctgtgagaattacccccctgaaatacgcccagatctgctattggatcaagggaaactatctggactgccgcgaaggatag

SEQ ID NO: 111320 - DNA, 465 bp, Artificial Sequence
  derived and/or modified sequence
atggccggcatccccggcctgctgttcctgctgttcttcctgctgtgtgccgtcggccaggtttcaccctactccgccccctggaagccaacgtggcccgcctaccggcttcccgtggttctgcctcagtcaacgctgaatttagcaaaacccgacttcggagccgaggctaagctagaggtgtccagcagttgtggtccccagtgccacaagggaacaccgctccccacatacgaagaggccaagcagtatctcagctacgagacactgtacgccaacggctctagaaccgaaacccaggtcggcatatatattttatcgagctcgggtgatggagcccagcaccgagacagtggcagttccggcaaaagtcgacgaaagcggcagatatatggatacgacagtcgcttcagcatttttggaaaagacttcttactcaattacccattttcaactagcgtctag

SEQ ID NO: 111321 - RNA, 1152 nt, Artificial Sequence
  derived and/or modified sequence
auggcgggcaucccagguuugcuuuuccuacuuuucuuucucuugugcgccgucgggcagguaucuccguacagcgcaccauggaagcccacauggccagcauaccgcuugcccgugguauuaccucagucaacauugaauuuagcaaagcccgacuucggcgcggaggccaaguuggaagucagcucuucuugcgguccgcagugccacaaaggaacgccacugccgacauacgaagaggccaaacaguaucuaagcuacgagacauuguaugcaaaugguucuagaacagaaacacagguugguauauacauuuugucaucgucaggagauggugcccagcauagggacucaggaucuucagguaaaucacgccguaaacgacagaucuaugguuacgacagcagguuuagcaucuucggcaaagauuuucuccuuaacuaucccuucucgacuucagugaaacugucuacagggugcacuggaacgcuugucgcggagaaacauguuuugaccgccgcccacuguauccacgauggcaaaacuuacguaaagggaacucagaaguugagagugggguuccugaagccgaaauuuaaggaugguggccggggcgcuaacgauucaacaagcgccaugccugagcagaugaaauuucaguggauaagagugaagagaacucacgugccuaagggguggauaaagggcaacgcuaaugacauuggcauggauuaugauuaugcauuacuggaacucaaaaagccccacaaaagaaaguuuaugaaaaucggaguaucgcccccugcuaaacaacugccagguggcaggauccacuuuagcggguaugacaaugacagaccuggcaaccucguguacagguucugcgaugugaaggacgaaacuuacgaccugcuuuaucagcaaugugacgcacaacccggggccagcgguucuggcgucuacguccggauguggaaacggcaacaacagaaaugggagaggaaaauaaucgguauuuuuucagggcaucaguggguggacaugaacggcucuccccaagacuucaaugucgccgucaggauuacaccuuuaaaguaugcacaaauuuguuacuggaucaaggggaauuaucucgauugucgcgagggauag

SEQ ID NO: 111322 - RNA, 465 nt, Artificial Sequence
  derived and/or modified sequence
auggcugggaucccaggccuccuuuuccugcuauucuuccuacucugcgcagucgggcaggugagucccuacucggcacccuggaagccgaccuggccggccuauagacuuccaguaguucucccgcaauccaccuugaaucuugcuaagccugauuucggcgccgaagcaaaauuagaaguaaguagcucuuguggcccacaaugucacaaaggcacaccucuccccacauaugaggaagcgaagcaauaccucaguuaugaaacccuauacgccaacggaucgcgcacagagacacaagugggcaucuacauccugucuaguuccggggacggcgcacagcauagagauuccgggucaagugguaagucccgccggaagcgacaaauuuacgguuaugacagcagauuuucuauuuuugggaaggacuuucuucugaauuacccuuucagcaccuccguauag

SEQ ID NO: 111323 - RNA, 1152 nt, Artificial Sequence
  derived and/or modified sequence
auggcuggcaucccuggucugcucuuuuugcuguuuuuccuuuuaugcgcagucggucaagugaguccuuauagcgcccccuggaagcccacauggcccgcauaucggcugcccgugguuuuaccacagucaaccuugaaccuggccaagccugacuuuggagcagaggccaagcuggaagugucaucuucgugcggaccccaaugccauaaaggaacaccccucccuacuuacgaggaggcaaaacaguaccugucuuacgaaacauuguaugccaacggcucuagaacugaaacccaggugggcaucuauauucucucuucaucuggugauggugcacagcacagagacucuggaaguuccgggaaaagucguagaaagagacaaauauacggguaugauucccgguuuuccaucuucgguaaagacuuuuuacucaauuaucccuuuucuaccuccguaaagcuuucuacuggguguaccgggacccugguggcugagaaacacgugcucaccgccgcucauuguauccaugacgggaagaccuauguuaaaggcacgcagaagcuuagaguuggauuccugaaaccaaaauucaaagacggaggacgcggcgcaaaugacucaacuucggcuaugccugaacaaaugaaauuccaguggauccgugugaagcgaacgcaugucccuaagggcuggauuaaggguaacgcaaaugauauuggaauggauuaugacuaugcccugcucgaacugaagaaaccucacaaacguaaguucaugaagaucggcgucuccccaccugcaaagcagcuuccaggcgguaggauucacuuuaguggauaugauaaugacagaccugggaaucucguguaucgcuucugugaugugaaggacgaaacuuaugaucucuuguaccagcagugcgaugcucaaccaggggccuccgggaguggaguguaugucagaauguggaaaagacagcagcagaaaugggagcgcaaaaucauuggaaucuucucaggccaccagugggucgacaugaacggaaguccacaggauuuuaacguggcugugcgaauuacaccacugaaauaugcucaaaucuguuauuggaucaaaggcaacuaucucgauugccgcgaagguuag

SEQ ID NO: 111324 - RNA, 465 nt, Artificial Sequence
  derived and/or modified sequence
auggcugggaucccaggccuccuuuuccugcuauucuuccuacucugcgcagucgggcaggugagucccuacucggcacccuggaagccgaccuggccggccuauagacuuccaguaguucucccgcaauccaccuugaaucuugcuaagccugauuucggcgccgaagcaaaauuagaaguaaguagcucuuguggcccacaaugucacaaaggcacaccucuccccacauaugaggaagcgaagcaauaccucaguuaugaaacccuauacgccaacggaucgcgcacagagacacaagugggcaucuauauucugagcucuaguggcgacggagcccagcacagagacaguggcagcucuggcaagagucggcgaaaaaggcagauuuaugguuaugauucuagauucucuaucuuuggaaaggacuuucuacuuaauuauccauucucaacaagcguguag

SEQ ID NO: 111325 - protein, 228 aa, Artificial Sequence
  derived and/or modified sequence
MKTLFLGVTLGLAAALSFTLEEEDITGTWYVKAMVVDKDFPEDRRPRKVSPVKVTALGGGNLEATFTFMREDRCIQKKILMRKTEEPGKFSAYGGRKLIYLQELPGTDDYVFYCKDQRRGGLRYMGKLVASAPCRAVPLSPPWLTWPPHLQVGILIPTWRPWKNLRNWCSTRDSRRRTFSCPCRREAAFSNTRQPPGLHLQSPPYHQTQSPDHLDLPSSHDPSLLPPT

SEQ ID NO: 111326 - DNA, 687 bp, Artificial Sequence
  derived and/or modified sequence
atgaagacactatttctgggggtaactcttggtctggcggccgcgttaagcttcacccttgaggaagaggacattaccgggacctggtatgtgaaagcaatggtagttgacaaagactttcctgaggatcgtagaccccgtaaagtatctccggtaaaggtcacggcgctgggaggcggtaatctggaagccactttcacctttatgagagaagacaggtgtattcagaaaaagatcctgatgcgtaaaactgaggaaccaggcaaattctccgcatacgggggcaggaagttgatctacctccaggaactgcctggcactgacgattatgtgttctactgtaaggaccagcgccgtggcgggcttcggtatatgggtaagctggtggcatctgccccgtgtagagcagtcccgctgtctcccccttggctcacatggccaccacacctacaggtagggatccttattcctacctggcggccctggaaaaatctgaggaattggtgtagtaccagggattcaagacgtcgaaccttcagttgcccctgccggagagaggcagcctttagcaatacacgccagccaccgggcctgcacctgcagtcacccccttaccatcagactcagagccccgaccatcttgacttgccatccagccacgacccttccttgctgcctcccacgtag

SEQ ID NO: 111327 - DNA, 687 bp, Artificial Sequence
  derived and/or modified sequence
atgaagaccctcttcctgggcgtgaccctgggcctggccgccgccctgtccttcaccctggaggaggaggacatcaccggcacctggtacgtgaaggccatggtggtggacaaggacttccctgaggaccggcggcccaggaaggtgtcccctgtgaaggtgacagccctgggcggcggcaacctggaggccaccttcaccttcatgagagaagatcgctgcatccagaagaagatcctgatgaggaagacagaggagcccgggaagttcagcgcctatggaggcaggaagctgatctacctgcaggagctgcctggaacagatgattatgtgttctactgcaaggaccagaggcggggcggcctgcgctacatgggcaagctggtggccagcgccccctgcagagctgtgcccctgagccccccctggctgacctggccaccccacctgcaggtgggcatcctgatccccacctggaggccctggaagaacctgaggaactggtgcagcacccgggacagcagaagaaggaccttcagctgcccctgccggcgggaggccgccttcagcaacacccggcagcccccaggcctgcacctgcagagccccccctaccaccagacccagagcccagaccacctggacctgcccagcagccatgaccccagcctgctgccccccacctag

SEQ ID NO: 111328 - DNA, 687 bp, Artificial Sequence
  derived and/or modified sequence
atgaagaccctgttcctgggcgtgaccctgggcctggccgccgccctctcttttactctggaggaggaggacatcaccggaacatggtatgtgaaggcgatggtggttgacaaagactttcccgaagaccgccggcccaggaaagtttcccctgtgaaagtgaccgctctggggggaggtaacttagaggccaccttcacatttatgcgggaagacaggtgtattcaaaagaaaatcttgatgcgcaaaactgaagaacctgggaaatttagcgcatatggaggcaggaaactgatatatctgcaggaacttcctggaaccgatgattacgtgttctattgtaaagaccagcgtcgcggcggcttgagatatatgggcaagcttgttgcaagcgcgccgtgccgggcagtgcccctctccccaccatggcttacctggcctcctcacctccaggtcggcatcctgatccctacatggcggccatggaaaaaccttcgaaactggtgcagcacacgggatagcagacgccggacattttcttgtccttgcagaagggaggccgcatttagtaatactcggcagccccctgggctgcatctgcagtcacccccctatcaccaaacgcagtccccggatcatctggacctcccgagctcacatgatccaagcttgctgccgcctacatag

SEQ ID NO: 111329 - DNA, 741 bp, Artificial Sequence
  derived and/or modified sequence
cgcccagtgacctgccgaggtcggcagcacagagctctggagatgaagaccctgttcctgggtgtcacgctcggcctggccgctgccctgtccttcaccctggaggaggaggatatcacagggacctggtacgtgaaggccatggtggtcgataaggactttccggaggacaggaggcccaggaaggtgtccccagtgaaggtgacagccctgggcggtgggaacttggaagccacgttcaccttcatgagggaggatcggtgcatccagaagaaaatcctgatgcggaagacggaggagcctggcaaattcagcgcctatgggggcaggaagctcatatacctgcaggagctgcccgggacggacgactacgtcttttactgcaaagaccagcgccgtgggggcctgcgctacatgggaaagcttgtggcatctgctccctgcagggccgtgccgctgtccccaccttggctcacctggccacctcacctgcaggtaggaatcctaataccaacctggaggccctggaagaatttaagaaattggtgcagcacaagggactctcggaggaggacattttcatgcccctgcagacgggaagctgcgttctcgaacactaggcagcccccgggtctgcacctccagagcccaccctaccaccagacacagagcccggaccacctggacctaccctccagccatgacccttccctgctcccacccacctgactccaaataaag

SEQ ID NO: 111330 - DNA, 607 bp, Artificial Sequence
  derived and/or modified sequence
cgcccagtgacctgccgaggtcggcagcacagagctctggagatgaagaccctgttcctgggtgtcacgctcggcctggccgctgccctgtccttcaccctggaggaggaggatgagggaggatcggtgcatccagaagaaaatcctgatgcggaagacggaggagcctggcaaattcagcgcctatgggggcaggaagctcatatacctgcaggagctgcccgggacggacgactacgtcttttactgcaaagaccagcgccgtgggggcctgcgctacatgggaaagcttgtggcatctgctccctgcagggccgtgccgctgtccccaccttggctcacctggccacctcacctgcaggtaggaatcctaataccaacctggaggccctggaagaatttaagaaattggtgcagcacaagggactctcggaggaggacattttcatgcccctgcagacgggaagctgcgttctcgaacactaggcagcccccgggtctgcacctccagagcccaccctaccaccagacacagagcccggaccacctggacctaccctccagccatgacccttccctgctcccacccacctgactccaaataaag

SEQ ID NO: 111331 - DNA, 687 bp, Artificial Sequence
  derived and/or modified sequence
atgaagaccctgttccttggggttacgctgggcctcgcggcagccctgtcctttacacttgaggaggaagatatcacgggcacgtggtatgtgaaagcgatggtggtagacaaagactttccagaggacagaaggccgagaaaagtgtcccctgtgaaggtaaccgcactgggtggcggaaatctggaagcaacctttactttcatgcgagaagacaggtgtattcagaaaaaaatactgatgaggaaaactgaagagcccggaaagttctcagcgtacggtggacggaagttgatctatctgcaggagcttcctggaaccgacgattatgtcttttattgtaaagaccagagacggggaggattgcggtacatgggtaaactcgtggcaagtgccccatgcagagcagtaccgctctctccgccatggttaacgtggccacctcatctgcaggtaggtatcctgattcccacatggagaccttggaagaatctccgtaattggtgttcaactcgagacagccgcaggcgcacattcagttgtccttgtaggcgcgaagcagcattctccaacacacggcagcccccaggtctgcatctccagtcccctccttaccaccagactcagtcgccagatcatttggatctccctagttcgcacgatccgagcctgctgcctccgacctag

SEQ ID NO: 111332 - DNA, 687 bp, Artificial Sequence
  derived and/or modified sequence
atgaagaccctgttcctgggcgtgaccctgggcctggccgccgccctgagcttcaccctggaggaggaggacatcaccggcacctggtacgtgaaggccatggtggtggacaaggacttccccgaggacagaagacccagaaaggtgagccccgtgaaggtgaccgccctgggcggcggcaacctggaggccaccttcaccttcatgagagaggacagatgcatccagaagaagatcctgatgagaaagaccgaggagcccggcaagttcagcgcctacggcggcagaaagctgatctacctgcaggagctgcccggcaccgacgactacgtgttctactgcaaggaccagagaagaggcggcctgagatacatgggcaagctggtggccagcgccccctgcagagccgtgcccctgagccccccctggctgacctggcccccccacctgcaggtgggcatcctgatccccacctggagaccctggaagaacctgagaaactggtgcagcaccagagacagcagaagaagaaccttcagctgcccctgcagaagagaggccgccttcagcaacaccagacagccccccggcctgcacctgcagagccccccctaccaccagacccagagccccgaccacctggacctgcccagcagccacgaccccagcctgctgccccccacctag

SEQ ID NO: 111333 - protein, 536 aa, Artificial Sequence
  derived and/or modified sequence
MTPLVSRLSRLWAIMRKPRAAVGSGHRKQAASQEGRQKHAKNNSQAKPSACDAGLARQPEEVVLQASVSSYHLFRDVAEVTAFRGSLLSWYDQEKRDLPWRRRAEDEMDLDRRAYAVWVSEVMLQQTQVATVINYYTGWMQKWPTLQDLASASLEEVNQLWAGLGYYSRGRRLQEGARKVVEELGGHMPRTAETLQQLLPGVGRYTAGAIASIAFGQATGVVDGNVARVLCRVRAIGADPSSTLVSQQLWGLAQQLVDPARPGDFNQAAMELGATVCTPQRPLCSQCPVESLCRARQRVEQEQLLASGSLSGSPDVEECAPNTGQCHLCLPPSEPWDQTLGVVNFPRKASRKPPREESSATCVLEQPGALGAQILLVQRPNSGLLAGLWEFPSVTWEPSEQLQRKALLQELQRWAGPLPATHLRHLGEVVHTFSHIKLTYQVYGLALEGQTPVTTVPPGARWLTQEEFHTAAVSTAMKKVFRVYQGQQPGTCMGSKRSQVSSPCSRKKPRMGQQVLDNFFRSHISTDAHSLNSAAQ

SEQ ID NO: 111334 - DNA, 1611 bp, Artificial Sequence
  derived and/or modified sequence
atgacccccctggtgagcagactgagcagactgtgggccatcatgagaaagcccagagccgccgtgggcagcggccacagaaagcaggccgccagccaggagggcagacagaagcacgccaagaacaacagccaggccaagcccagcgcctgcgacgccggcctggccagacagcccgaggaggtggtgctgcaggccagcgtgagcagctaccacctgttcagagacgtggccgaggtgaccgccttcagaggcagcctgctgagctggtacgaccaggagaagagagacctgccctggagaagaagagccgaggacgagatggacctggacagaagagcctacgccgtgtgggtgagcgaggtgatgctgcagcagacccaggtggccaccgtgatcaactactacaccggctggatgcagaagtggcccaccctgcaggacctggccagcgccagcctggaggaggtgaaccagctgtgggccggcctgggctactacagcagaggcagaagactgcaggagggcgccagaaaggtggtggaggagctgggcggccacatgcccagaaccgccgagaccctgcagcagctgctgcccggcgtgggcagatacaccgccggcgccatcgccagcatcgccttcggccaggccaccggcgtggtggacggcaacgtggccagagtgctgtgcagagtgagagccatcggcgccgaccccagcagcaccctggtgagccagcagctgtggggcctggcccagcagctggtggaccccgccagacccggcgacttcaaccaggccgccatggagctgggcgccaccgtgtgcaccccccagagacccctgtgcagccagtgccccgtggagagcctgtgcagagccagacagagagtggagcaggagcagctgctggccagcggcagcctgagcggcagccccgacgtggaggagtgcgcccccaacaccggccagtgccacctgtgcctgccccccagcgagccctgggaccagaccctgggcgtggtgaacttccccagaaaggccagcagaaagccccccagagaggagagcagcgccacctgcgtgctggagcagcccggcgccctgggcgcccagatcctgctggtgcagagacccaacagcggcctgctggccggcctgtgggagttccccagcgtgacctgggagcccagcgagcagctgcagagaaaggccctgctgcaggagctgcagagatgggccggccccctgcccgccacccacctgagacacctgggcgaggtggtgcacaccttcagccacatcaagctgacctaccaggtgtacggcctggccctggagggccagacccccgtgaccaccgtgccccccggcgccagatggctgacccaggaggagttccacaccgccgccgtgagcaccgccatgaagaaggtgttcagagtgtaccagggccagcagcccggcacctgcatgggcagcaagagaagccaggtgagcagcccctgcagcagaaagaagcccagaatgggccagcaggtgctggacaacttcttcagaagccacatcagcaccgacgcccacagcctgaacagcgccgcccagtag

SEQ ID NO: 111335 - DNA, 1611 bp, Artificial Sequence
  derived and/or modified sequence
atgacgccgctggtgagcaggcttagtagactgtgggcaataatgagaaagcccagagcagccgtgggatctggccacaggaagcaagcagcctcacaagaaggccgccagaaacacgccaaaaacaactcacaggcgaaacccagcgcatgcgacgccggcctggcaaggcagcccgaggaagtagtgcttcaggcctctgttagttcctatcacctgttccgcgatgtagcggaagtgacagcctttaggggatctcttcttagctggtatgaccaggaaaagcgggatcttccctggaggcgaagagcggaagacgagatggacttggaccggcgggcctacgccgtctgggtgagcgaggtcatgttgcagcagactcaagtcgcgaccgtgatcaactactacactgggtggatgcaaaagtggccaacacttcaagatttggcttcggctagcctcgaagaagttaaccagctctgggcaggattgggatattatagtagaggaaggagattacaggagggagcccgcaaagtggtcgaagagctgggcggacacatgccccgcacagcagagacccttcagcagttgctgccaggtgtcggcagatataccgcaggggcaatcgcaagcattgcctttggacaggcgaccggtgtagtggacgggaacgtggcccgcgttctgtgtagagtccgagcaatcggggccgacccctctagtaccctcgtctcccagcaactgtggggtctggcccaacagttagtggatcctgctaggcctggcgatttcaaccaggccgccatggagttgggcgccacagtctgtaccccccagcgcccactgtgcagtcagtgcccagttgagtcattgtgcagggcgcgccaaagggtggagcaggagcagctcctagcctcaggctctctgtcaggctcccctgatgttgaggaatgcgcccctaacactggtcaatgccacctgtgtctcccaccctctgaaccttgggatcagaccttgggcgtggtcaattttccccggaaagctagtcgcaaaccccctcgtgaagaatccagcgcaacatgtgtactggagcagcctggagccctgggggcgcagatacttttagtgcagaggccgaactccggcctacttgccggcctgtgggagttccccagcgtaacatgggagcccagcgagcagcttcagaggaaggccctcctccaggagctgcagcgctgggccgggccactgcccgcaacacacctgagacacctcggggaggtagttcacaccttctcccatattaaactgacataccaagtatatgggctcgctttggaaggacagacgcccgtgactactgtcccccccggagcgaggtggctaacgcaggaagagtttcacacagcagcagtctctacagccatgaagaaagtgtttagggtgtaccaagggcagcagcccgggacgtgcatgggcagtaaacgtagccaagtgtcttccccttgctccagaaagaaaccacgcatggggcagcaagtgttggacaactttttccgctcacacatctcgaccgacgctcacagtctgaactccgcggcacagtag

SEQ ID NO: 111336 - DNA, 1611 bp, Artificial Sequence
  derived and/or modified sequence
atgacccccctggtgtcccggctgagccggctgtgggccatcatgaggaagcccagggctgctgtgggcagcggccacaggaagcaggccgccagccaggagggccggcagaagcacgccaagaacaacagccaggccaagcccagcgcctgtgatgctggcctggcccggcagcctgaggaggtggtgctgcaggcctctgtgagcagctaccacctgttcagagatgtggccgaggtgacagccttccggggcagcctgctgtcctggtatgaccaggagaagagggacctgccctggaggcggcgggcagaagatgagatggacctggaccggcgggcctatgctgtgtgggtgtctgaggtgatgctgcagcagacccaggtggccaccgtcatcaactactacacaggctggatgcagaagtggcccaccctgcaggacctggccagcgccagcctggaggaggtgaaccagctgtgggccggcctgggctactacagccggggccgccgcctgcaggagggcgccaggaaggtggtggaggagctgggcggccacatgcccaggacagctgagaccctgcagcagctgctgcccggggtgggccgctacacagctggggccatcgccagcatcgccttcggccaggccactggagtggtggatggaaatgtggcccgggtgctgtgccgggtgcgggccatcggggctgaccccagcagcaccctggtgtcccagcagctgtggggcctggcccagcagctggtggaccctgcccggcctggggacttcaaccaggccgccatggagctgggcgccaccgtgtgcaccccccagaggcccctgtgcagccagtgccctgtggagagcctgtgccgggcccggcagagggtggagcaggagcagctgctggccagcggcagcctgagcggcagcccagatgtggaggagtgtgcccccaacacaggccagtgccacctgtgcctgcccccatctgagccctgggaccagaccctgggcgtggtgaacttccccaggaaggccagcaggaagccaccccgggaggagagcagcgccacctgtgtgctggagcagcccggggccctgggcgcccagatcctgctggtgcagaggcccaacagcggcctgctggccggcctgtgggagttccccagcgtgacctgggagcccagcgagcagctgcagaggaaggccctgctgcaggagctgcagcgctgggccggccccctgcctgccacccacctgcggcacctgggggaggtggtgcacaccttcagccacatcaagctgacctaccaggtgtatggcctggccctggagggccagacccctgtgaccaccgtgcccccaggggcccgctggctgacccaggaggagttccacacagctgctgtgtccacagccatgaagaaggtgttccgggtgtaccagggccagcagcccggcacctgcatgggcagcaagaggagccaggtgagcagcccctgcagcaggaagaagcccaggatgggccagcaggtgctggacaacttcttccgcagccacatcagcacagatgcccacagcctgaacagcgctgcccagtag

SEQ ID NO: 111337 - DNA, 1611 bp, Artificial Sequence
  derived and/or modified sequence
atgacccccctggtgagccggctgagccggctgtgggccatcatgcgcaaaccacgggccgcagttggctccgggcatagaaagcaagccgcatctcaggagggccgccagaagcatgccaaaaataatagccaggccaaacctagcgcctgcgatgcaggtctggcccggcagcctgaagaggtcgtgctgcaggccagtgtgtcatcataccacctattcagggatgtagctgaggtcaccgcatttcggggttccctgcttagctggtatgaccaggagaagcgcgacttgccgtggcgccggcgcgccgaggacgaaatggatcttgatagaagagcctatgccgtctgggtatctgaggtaatgctacagcagacccaagtagcgaccgtcattaactattacaccggctggatgcagaagtggcctacgttgcaggaccttgccagcgccagcttggaggaggtaaatcagctgtgggccggcctcgggtactattctcggggcaggagattacaggagggcgcgcgcaaggtggtggaagagttaggcggtcatatgcctcgaacagccgaaacgctccagcagctcttgccaggcgtggggagatacacagctggcgccatcgcctctatcgcttttggtcaggcaacaggagtcgtggacggcaacgttgcacgggtgctctgtcgggtgagagcaatcggcgctgaccccagtagcacattggtgtcccaacaattatggggcctcgcgcaacagctggtggatccagcccgaccaggtgacttcaaccaggccgccatggagctgggggctaccgtgtgcacaccccagcgcccactatgcagtcagtgtcctgtggagagtctctgccgcgcacgtcaacgcgttgagcaggaacagctgcttgcttccggcagcttgtctggatcgccagatgtggaagaatgcgcccctaatacagggcagtgccatttatgcctgcctccgtccgaaccttgggatcagactctgggggttgtgaactttcctagaaaggccagcagaaagcccccgagggaggaatccagcgcaacttgtgttctcgagcagcctggcgctctcggggctcagattctgcttgttcagcgaccgaattcagggctactggccggtctctgggagttccccagtgttacctgggaacctagcgaacagcttcaaaggaaagctctcctgcaggagctacaacgatgggccggacccctccctgcaacgcatctcagacacttaggcgaagtggtgcatacattctctcacatcaagctcacataccaagtgtatggtctggccctagaaggacagaccccagtcacaacggtgccccccggagcccggtggctgactcaggaggaattccatactgcagccgtctccaccgctatgaaaaaagtgttccgggtgtaccaaggccagcagcccggaacatgcatgggctccaagaggtctcaggtttcttcgccttgctcgaggaaaaaacctcgcatgggtcaacaggtgctcgacaacttcttccgaagccacatctcgaccgacgcccactccctgaattccgccgctcagtag

SEQ ID NO: 111338 - DNA, 1744 bp, Artificial Sequence
  derived and/or modified sequence
cgctaattgcctattggcctgtgctgccggctcgcagcccgggtggacccgagccacgccccctggagtgcgccggaaagccgggcgcgctagagctcgcgggaggccatcatgaggaagccacgagcagccgtgggaagtggtcacaggaagcaggcagccagccaggaagggaggcagaagcatgctaagaacaacagtcaggccaagccttctgcctgtgatgcaggcctggccaggcagccggaagaggtggtattgcaggcctctgtctcctcataccatctattcagagacgtagctgaagtcacagccttccgagggagcctgctaagctggtacgaccaagagaaacgggacctaccatggagaagacgggcagaagatgagatggacctggacaggcgggcatatgctgtgtgggtctcagaggtcatgctgcagcagacccaggttgccactgtgatcaactactataccggatggatgcagaagtggcctacactgcaggacctggccagtgcttccctggaggaggtgaatcaactctgggctggcctgggctactattctcgtggccggcggctgcaggagggagctcggaaggtggtagaggagctagggggccacatgccacgtacagcagagaccctgcagcagctcctgcctggcgtggggcgctacacagctggggccattgcctctatcgcctttggccaggcaaccggtgtggtggatggcaacgtagcacgggtgctgtgccgtgtccgagccattggtgctgatcccagcagcacccttgtttcccagcagctctggggtctagcccagcagctggtggacccagcccggccaggagatttcaaccaagcagccatggagctaggggccacagtgtgtaccccacagcgcccactgtgcagccagtgccctgtggagagcctgtgccgggcacgccagagagtggagcaggaacagctcttagcctcagggagcctgtcgggcagtcctgacgtggaggagtgtgctcccaacactggacagtgccacctgtgcctgcctccctcggagccctgggaccagaccctgggagtggtcaacttccccagaaaggccagccgcaagccccccagggaggagagctctgccacctgtgttctggaacagcctggggcccttggggcccaaattctgctggtgcagaggcccaactcaggtctgctggcaggactgtgggagttcccgtccgtgacctgggagccctcagagcagcttcagcgcaaggccctgctgcaggaactacagcgttgggctgggcccctcccagccacgcacctccggcaccttggggaggttgtccacaccttctctcacatcaagctgacatatcaagtatatgggctggccttggaagggcagaccccagtgaccaccgtaccaccaggtgctcgctggctgacgcaggaggaatttcacaccgcagctgtttccaccgccatgaaaaaggttttccgtgtgtatcagggccaacagccagggacctgtatgggttccaaaaggtcccaggtgtcctctccgtgcagtcggaaaaagccccgcatgggccagcaagtcctggataatttctttcggtctcacatctccactgatgcacacagcctcaacagtgcagcccagtgacacctctgaaagcccccattccctgagaatcctgttgttagtaaagtgcttatttttgtagtta

SEQ ID NO: 111339 - DNA, 1809 bp, Artificial Sequence
  derived and/or modified sequence
ggagcctctagaactatgagcccgaggccttcccctctcccagagcgcagaggctttgaaggctacctctgggaagccgctcaccgtcggaagctgcgggagctgaaactgcgccatcgtcactgtcggcggccatgacaccgctcgtctcccgcctgagtcgtctgtgggccatcatgaggaagccacgagcagccgtgggaagtggtcacaggaagcaggcagccagccaggaagggaggcagaagcatgctaagaacaacagtcaggccaagccttctgcctgtgatgcaggcctggccaggcagccggaagaggtggtattgcaggcctctgtctcctcataccatctattcagagacgtagctgaagtcacagccttccgagggagcctgctaagctggtacgaccaagagaaacgggacctaccatggagaagacgggcagaagatgagatggacctggacaggcgggcatatgctgtgtgggtctcagaggtcatgctgcagcagacccaggttgccactgtgatcaactactataccggatggatgcagaagtggcctacactgcaggacctggccagtgcttccctggaggaggtgaatcaactctgggctggcctgggctactattctcgtggccggcggctgcaggagggagctcggaaggtggtagaggagctagggggccacatgccacgtacagcagagaccctgcagcagctcctgcctggcgtggggcgctacacagctggggccattgcctctatcgcctttggccaggcaaccggtgtggtggatggcaacgtagcacgggtgctgtgccgtgtccgagccattggtgctgatcccagcagcacccttgtttcccagcagctctggggtctagcccagcagctggtggacccagcccggccaggagatttcaaccaagcagccatggagctaggggccacagtgtgtaccccacagcgcccactgtgcagccagtgccctgtggagagcctgtgccgggcacgccagagagtggagcaggaacagctcttagcctcagggagcctgtcgggcagtcctgacgtggaggagtgtgctcccaacactggacagtgccacctgtgcctgcctccctcggagccctgggaccagaccctgggagtggtcaacttccccagaaaggccagccgcaagccccccagggaggagagctctgccacctgtgttctggaacagcctggggcccttggggcccaaattctgctggtgcagaggcccaactcaggtctgctggcaggactgtgggagttcccgtccgtgacctgggagccctcagagcagcttcagcgcaaggccctgctgcaggaactacagcgttgggctgggcccctcccagccacgcacctccggcaccttggggaggttgtccacaccttctctcacatcaagctgacatatcaagtatatgggctggccttggaagggcagaccccagtgaccaccgtaccaccaggtgctcgctggctgacgcaggaggaatttcacaccgcagctgtttccaccgccatgaaaaaggttttccgtgtgtatcagggccaacagccagggacctgtatgggttccaaaaggtcccaggtgtcctctccgtgcagtcggaaaaagccccgcatgggccagcaagtcctggataatttctttcggtctcacatctccactgatgcacacagcctcaacagtgcagcccagtgacacctctgaaagcccccattccctgagaatcctgttgttagtaaagtgcttatttttgtagtta

SEQ ID NO: 111340 - DNA, 1611 bp, Artificial Sequence
  derived and/or modified sequence
atgacaccgttagtcagtaggttatctaggctatgggctatcatgcggaagcctagggcagccgtagggtcaggacacaggaaacaagcagcaagtcaagagggccgtcagaaacacgctaaaaacaattcgcaggcaaaacctagcgcctgcgacgccggactggctcggcagcctgaggaagtggtgctgcaggcttcagtctcatcataccacctctttagggacgtggcagaggtgactgccttcagggggagcttgctgagttggtatgatcaagaaaagcgcgaccttccttggagacgacgggctgaggacgagatggatcttgaccgcagggcatacgccgtatgggtgagcgaggtgatgctgcagcagactcaggtggctaccgtcattaactattacacggggtggatgcagaaatggcccactctgcaggacctggccagcgccagcttagaggaagttaatcagttgtgggccggtcttgggtactacagtcgaggaagaaggctgcaagagggggctcgtaaggttgtcgaggaactggggggtcacatgccgagaacagccgaaacgcttcagcagctgctcccaggcgtagggagatataccgccggagccatcgcctccatagcgttcggacaggcgacgggcgtagtagatgggaacgtcgctcgagtgctttgcagggtcagggcgatcggagctgacccgagctcgacgctggtgagtcagcagttatggggcctcgctcagcagctggtcgaccccgctcggccaggcgacttcaaccaagctgccatggaactaggggctacggtttgtacccctcagagaccactgtgtagtcaatgcccagtcgaaagtctctgtagggctaggcagcgcgtggaacaagagcagctactcgccagcgggtccctttccggctcccctgacgtcgaggaatgcgcacctaacaccggccagtgccacctgtgtctgccaccgtctgaaccgtgggaccagacacttggggtcgttaacttcccacgcaaagcctcccgtaaacctccacgtgaggagagctctgctacgtgcgttctggaacaaccaggggctcttggggcacagattttacttgtgcagagacctaacagcgggttgctggccggactgtgggagttccccagtgttacttgggaaccttcagagcagctgcagcgaaaagctctcctgcaggagctacaacggtgggctggcccactgcccgctactcacctgagacacctgggagaagtggttcacaccttctcccatatcaagctcacctatcaggtttacgggctcgccctggaaggccagactcctgttacaacagttcctcccggagctcgctggctgacacaagaagagttccacaccgcagccgtttcaaccgctatgaagaaggtgtttcgcgtttaccaaggccagcaaccaggcacatgcatggggtccaagcgttctcaggtgagcagcccttgctcccgcaaaaagccaagaatgggccagcaggtgctggataatttcttccgcagccatataagtacagacgcccattcactcaactcggcggcacaatag

SEQ ID NO: 111341 - protein, 291 aa, Artificial Sequence
  derived and/or modified sequence
MRKPRAAVGSGHRKQAASQEGRQKHAKNNSQAKPSACDGMIAECPGAPAGLARQPEEVVLQASVSSYHLFRDVAEVTAFRGSLLSWYDQEKRDLPWRRRAEDEMDLDRRAYAVWVSEVMLQQTQVATVINYYTGWMQKWPTLQDLASASLEEVNQLWAGLGYYSRGRRLQEGARKVVEELGGHMPRTAETLQQLLPGVGRYTAGAIASIAFGQATGVVDGNVARVLCRVRAIGADPSSTLVSQQLWGLAQQLVDPARPGDFNQAAMELGATVCTPQRPLCSQCPVESLCRA

SEQ ID NO: 111342 - DNA, 1599 bp, Artificial Sequence
  derived and/or modified sequence
atgagaaagcccagagccgccgtgggcagcggccacagaaagcaggccgccagccaggagggcagacagaagcacgccaagaacaacagccaggccaagcccagcgcctgcgacggcatgatcgccgagtgccccggcgcccccgccggcctggccagacagcccgaggaggtggtgctgcaggccagcgtgagcagctaccacctgttcagagacgtggccgaggtgaccgccttcagaggcagcctgctgagctggtacgaccaggagaagagagacctgccctggagaagaagagccgaggacgagatggacctggacagaagagcctacgccgtgtgggtgagcgaggtgatgctgcagcagacccaggtggccaccgtgatcaactactacaccggctggatgcagaagtggcccaccctgcaggacctggccagcgccagcctggaggaggtgaaccagctgtgggccggcctgggctactacagcagaggcagaagactgcaggagggcgccagaaaggtggtggaggagctgggcggccacatgcccagaaccgccgagaccctgcagcagctgctgcccggcgtgggcagatacaccgccggcgccatcgccagcatcgccttcggccaggccaccggcgtggtggacggcaacgtggccagagtgctgtgcagagtgagagccatcggcgccgaccccagcagcaccctggtgagccagcagctgtggggcctggcccagcagctggtggaccccgccagacccggcgacttcaaccaggccgccatggagctgggcgccaccgtgtgcaccccccagagacccctgtgcagccagtgccccgtggagagcctgtgcagagccagacagagagtggagcaggagcagctgctggccagcggcagcctgagcggcagccccgacgtggaggagtgcgcccccaacaccggccagtgccacctgtgcctgccccccagcgagccctgggaccagaccctgggcgtggtgaacttccccagaaaggccagcagaaagccccccagagaggagagcagcgccacctgcgtgctggagcagcccggcgccctgggcgcccagatcctgctggtgcagagacccaacagcggcctgctggccggcctgtgggagttccccagcgtgacctgggagcccagcgagcagctgcagagaaaggccctgctgcaggagctgcagagatgggccggccccctgcccgccacccacctgagacacctgggcgaggtggtgcacaccttcagccacatcaagctgacctaccaggtgtacggcctggccctggagggccagacccccgtgaccaccgtgccccccggcgccagatggctgacccaggaggagttccacaccgccgccgtgagcaccgccatgaagaaggtgttcagagtgtaccagggccagcagcccggcacctgcatgggcagcaagagaagccaggtgagcagcccctgcagcagaaagaagcccagaatgggccagcaggtgctggacaacttcttcagaagccacatcagcaccgacgcccacagcctgaacagcgccgcccagtag

SEQ ID NO: 111343 - DNA, 876 bp, Artificial Sequence
  derived and/or modified sequence
atgagaaagcccagagccgccgtgggcagcggccacagaaagcaggccgccagccaggagggcagacagaagcacgccaagaacaacagccaggccaagcccagcgcctgcgacggcatgatcgccgagtgccccggcgcccccgccggcctggccagacagcccgaggaggtggtgctgcaggccagcgtgagcagctaccacctgttcagagacgtggccgaggtgaccgccttcagaggcagcctgctgagctggtacgaccaggagaagagagacctgccctggagaagaagagccgaggacgagatggacctggacagaagagcctacgccgtgtgggtgagcgaggtgatgctgcagcagacccaggtggccaccgtgatcaactactacaccggctggatgcagaagtggcccaccctgcaggacctggccagcgccagcctggaggaggtgaaccagctgtgggccggcctgggctactacagcagaggcagaagactgcaggagggcgccagaaaggtggtggaggagctgggcggccacatgcccagaaccgccgagaccctgcagcagctgctgcccggcgtgggcagatacaccgccggcgccatcgccagcatcgccttcggccaggccaccggcgtggtggacggcaacgtggccagagtgctgtgcagagtgagagccatcggcgccgaccccagcagcaccctggtgagccagcagctgtggggcctggcccagcagctggtggaccccgccagacccggcgacttcaaccaggccgccatggagctgggcgccaccgtgtgcaccccccagagacccctgtgcagccagtgccccgtggagagcctgtgcagagcctag

SEQ ID NO: 111344 - DNA, 1599 bp, Artificial Sequence
  derived and/or modified sequence
atgcgcaaacctcgtgccgcagtggggtcaggccatagaaaacaggccgctagtcaggaaggaagacagaagcatgcgaagaacaattcccaggccaagccatcagcctgcgatggaatgattgccgaatgccccggagcgcctgcaggacttgcaaggcaacctgaagaagtagtcctgcaggcttccgtctcttcctatcatctattcagagatgtagcagaagtgacagccttccggggctccctcctgtcctggtacgatcaggaaaaacgtgatcttccttggcgcagaagagcagaggatgagatggatctcgatcggagggcctatgctgtgtgggtctccgaggttatgcttcagcaaacccaggtggcaacagtcatcaactattacacagggtggatgcaaaagtggcctacgttgcaagatttagccagtgcctcacttgaggaagttaaccagttgtgggccggactgggttactactcccggggacggcggttacaagagggagctcgaaaggtcgttgaggaacttggaggtcatatgcccagaacagccgagactctgcagcagcttctgccaggagtagggcggtacacggccggagcgatcgcaagtatcgcctttggacaagctacaggagtcgtcgacggtaatgtagcaagggtcctctgtagggtgcgggctatcggagctgacccttccagtactctcgtttcacagcagttgtggggcctcgcacagcagctcgtggaccctgcccggcctggagactttaatcaggcggcgatggaacttggcgctactgtgtgcacacctcagcggcccctctgttctcagtgcccagtcgaaagcctgtgtcgggccagacagcgggtggaacaggaacagttattggccagtggttctttgagcggtagtcccgacgtggaagaatgtgcccctaacacgggacagtgccacctgtgcctgcctccatcagagccttgggatcagacccttggagtggtgaacttccctcggaaagcttctaggaaaccccccagagaagagtcttccgcgacctgtgttctagagcagcctggagcactgggagcccaaatcctcctcgtccagcggcctaattcgggactgctggccgggctgtgggagttcccttccgtcacctgggaaccatccgagcagctgcagcggaaggccctgctccaggagctgcaacgctgggcaggaccgttaccagcaacacacctccgccacctgggtgaagttgttcacacattctctcatattaagctgacatatcaggtgtatggactggccctcgaaggacagactcccgtgacaaccgtacctccgggcgccagatggctgacccaagaggagtttcatactgctgccgttagcacggcaatgaaaaaagtcttccgagtttaccagggccagcagcctgggacctgcatgggcagcaaacgctcccaggtatccagtccctgttcgcgaaagaagccccgaatgggccagcaagtgctagacaattttttccgctcccacattagtaccgacgctcactcccttaactccgccgcgcagtag

SEQ ID NO: 111345 - DNA, 876 bp, Artificial Sequence
  derived and/or modified sequence
atgagaaagcccagagccgccgtgggttccggccatcgcaagcaagccgcctcgcaggaaggtaggcagaagcacgctaaaaataattctcaggcgaagccaagcgcatgcgacgggatgatagcagaatgccccggcgctcccgcagggttggcaagacagcccgaagaggtggtgctgcaagcaagcgtatccagctatcacctgttccgcgatgtcgccgaggtgactgcctttagaggctcacttttaagctggtatgaccaggagaaaagagatctgccttggcgtagacgcgccgaagacgagatggacttggacaggagggcatacgccgtttgggtatcggaagtcatgctgcagcaaacccaggtggcaaccgttatcaactattatacaggttggatgcaaaagtggcccaccctccaagacctggcctccgcctccttagaagaagtgaaccagctgtgggctggcctgggctactacagccgaggacggaggctccaggaaggtgctcgtaaggtcgtggaggagctgggaggacacatgccccgcacagcggagaccttacagcaactgttgcccggggtgggacgttacacagctggagccatcgcttcaatcgcctttggacaagcgaccggtgtcgtggacggcaacgtagccagggtcttgtgcagagtccgcgccatcggcgcggaccctagcagcacgctggtctcgcaacagctgtggggacttgcccagcagcttgttgaccccgcgaggccaggggattttaaccaagcggccatggagcttggggccacggtgtgcacaccacagcgccccctgtgctcgcaatgccctgtggagtcactgtgtagagcatag

SEQ ID NO: 111346 - DNA, 1599 bp, Artificial Sequence
  derived and/or modified sequence
atgcggaaacccagagccgccgtaggctcaggtcacagaaaacaggcggcctcacaagaaggaagacagaagcatgctaagaataactcacaggccaaaccaagcgcctgcgacggaatgatagcagaatgtccaggtgcccctgcaggcctggcccgccagcccgaggaagtcgtgctacaggccagtgtgtcatcctaccacctatttcgcgacgtggccgaggtaacagcctttcgcggctctctgcttagctggtatgaccaggaaaaacgagacctaccctggcgccgacgggccgaagatgaaatggatctcgaccggagggcatatgccgtttgggtgtccgaggtgatgcttcagcagacccaagtcgcaaccgtgatcaactattacaccgggtggatgcagaagtggccgaccttgcaggacctcgcttccgcctcactggaagaggttaaccaactgtgggccggactcggttactactcgcggggtaggagactgcaggagggcgcccgtaaagtcgtggaggaactcggaggccatatgccacgaaccgctgagaccttacagcagctgctgccgggtgtgggacgttatacagctggggccattgcatcaattgcctttggccaggccacaggcgttgtagatgggaatgtggcccgggtcctgtgcagagtgcgggccataggggccgacccctcctccacacttgttagtcaacaactctgggggttggcccagcagctggtggatcctgcccgcccaggagacttcaaccaggccgccatggagttaggggcaaccgtctgcacgccacagcgccctctatgttctcagtgcccagtggaatccctgtgccgagcccgccagcgggtggagcaggagcaattgctcgcctccggatccctctcagggtcgccagacgtcgaagaatgtgctcccaacaccggtcagtgccatctgtgcctgccccccagcgagccctgggaccagaccctcggcgtcgtgaattttccccggaaggccagtaggaagcccccccgcgaggagagtagcgcgacctgcgtgctcgaacaacccggcgcactgggggcccagattctcctggtgcaacgacccaatagtggcctactcgcgggactgtgggagttcccatcagttacttgggaaccaagcgagcagctccagaggaaagcactgctccaggagcttcagagatgggctggcccactgccagccacccacttaaggcacctcggagaggtggttcataccttctcacacattaagctgacctaccaggtgtatggactggccctggaaggccagacccccgtgaccacggttccccctggagcccgctggctcacgcaggaggagtttcacaccgctgccgtttcaacagcaatgaaaaaagttttccgcgtgtaccaggggcaacagcctggcacctgcatgggatccaaaagaagccaggtaagctccccttgttctcggaagaagccccgaatgggccaacaggtgctcgacaattttttccgatcacacatctccactgatgcccactccctgaactctgccgcgcaatag

SEQ ID NO: 111347 - DNA, 1599 bp, Artificial Sequence
  derived and/or modified sequence
atgaggaagcccagggctgctgtgggcagcggccacaggaagcaggccgccagccaggagggccggcagaagcacgccaagaacaacagccaggccaagcccagcgcctgtgatggcatgattgctgaatgtcctggggccccagctggcctggcccggcagcctgaggaggtggtgctgcaggcctctgtgagcagctaccacctgttcagagatgtggccgaggtgacagccttccggggcagcctgctgtcctggtatgaccaggagaagagggacctgccctggaggcggcgggcagaagatgagatggacctggaccggcgggcctatgctgtgtgggtgtctgaggtgatgctgcagcagacccaggtggccaccgtcatcaactactacacaggctggatgcagaagtggcccaccctgcaggacctggccagcgccagcctggaggaggtgaaccagctgtgggccggcctgggctactacagccggggccgccgcctgcaggagggcgccaggaaggtggtggaggagctgggcggccacatgcccaggacagctgagaccctgcagcagctgctgcccggggtgggccgctacacagctggggccatcgccagcatcgccttcggccaggccactggagtggtggatggaaatgtggcccgggtgctgtgccgggtgcgggccatcggggctgaccccagcagcaccctggtgtcccagcagctgtggggcctggcccagcagctggtggaccctgcccggcctggggacttcaaccaggccgccatggagctgggcgccaccgtgtgcaccccccagaggcccctgtgcagccagtgccctgtggagagcctgtgccgggcccggcagagggtggagcaggagcagctgctggccagcggcagcctgagcggcagcccagatgtggaggagtgtgcccccaacacaggccagtgccacctgtgcctgcccccatctgagccctgggaccagaccctgggcgtggtgaacttccccaggaaggccagcaggaagccaccccgggaggagagcagcgccacctgtgtgctggagcagcccggggccctgggcgcccagatcctgctggtgcagaggcccaacagcggcctgctggccggcctgtgggagttccccagcgtgacctgggagcccagcgagcagctgcagaggaaggccctgctgcaggagctgcagcgctgggccggccccctgcctgccacccacctgcggcacctgggggaggtggtgcacaccttcagccacatcaagctgacctaccaggtgtatggcctggccctggagggccagacccctgtgaccaccgtgcccccaggggcccgctggctgacccaggaggagttccacacagctgctgtgtccacagccatgaagaaggtgttccgggtgtaccagggccagcagcccggcacctgcatgggcagcaagaggagccaggtgagcagcccctgcagcaggaagaagcccaggatgggccagcaggtgctggacaacttcttccgcagccacatcagcacagatgcccacagcctgaacagcgctgcccagtag

SEQ ID NO: 111348 - DNA, 876 bp, Artificial Sequence
  derived and/or modified sequence
atgaggaagcccagggctgctgtgggcagcggccacaggaagcaggccgccagccaggagggccggcagaagcacgccaagaacaacagccaggccaagcccagcgcctgtgatggcatgattgctgaatgtcctggggccccagctggcctggcccggcagcctgaggaggtggtgctgcaggcctctgtgagcagctaccacctgttcagagatgtggccgaggtgacagccttccggggcagcctgctgtcctggtatgaccaggagaagagggacctgccctggaggcggcgggcagaagatgagatggacctggaccggcgggcctatgctgtgtgggtgtctgaggtgatgctgcagcagacccaggtggccaccgtcatcaactactacacaggctggatgcagaagtggcccaccctgcaggacctggccagcgccagcctggaggaggtgaaccagctgtgggccggcctgggctactacagccggggccgccgcctgcaggagggcgccaggaaggtggtggaggagctgggcggccacatgcccaggacagctgagaccctgcagcagctgctgcccggggtgggccgctacacagctggggccatcgccagcatcgccttcggccaggccactggagtggtggatggaaatgtggcccgggtgctgtgccgggtgcgggccatcggggctgaccccagcagcaccctggtgtcccagcagctgtggggcctggcccagcagctggtggaccctgcccggcctggggacttcaaccaggccgccatggagctgggcgccaccgtgtgcaccccccagaggcccctgtgcagccagtgccctgtggagagcctgtgccgggcctag

SEQ ID NO: 111349 - DNA, 1599 bp, Artificial Sequence
  derived and/or modified sequence
atgcggaagccccgggccgccgtgggcagcggccaccggaagcaggccgcttcacaagaaggccgacaaaagcatgcgaagaacaatagccaggccaagccatccgcatgcgatggcatgattgccgagtgccccggcgcgcccgccggccttgccagacagccagaagaagtggtgctccaggcaagcgtctctagttaccaccttttccgtgacgtcgctgaggtcacggcattccgcggctcactcctcagctggtatgatcaggagaagagagacctgccttggaggagaagagctgaggacgaaatggatttagatcgtagggcctatgccgtgtgggtgagtgaagtcatgctgcagcagacccaggtggcaacagtgataaattattacacagggtggatgcagaagtggcccactttgcaggacctggcctctgcatctttggaggaagttaaccagctgtgggcgggactggggtactactcaagagggagacgcctgcaggagggcgcccggaaggtggtagaggagcttggaggacacatgcctcgcacagccgagacgctgcaacaactgctcccaggggtgggcaggtacactgctggagccattgcctcgatagcattcggccaggcgacgggagtagtggatgggaacgtggccagggtactgtgcagggttcgggccattggcgccgacccgagctccacacttgtgagccaacagttgtggggcctggctcagcaactcgtagaccccgcacgtccaggtgatttcaatcaggctgctatggagttgggggctactgtatgtaccccccagaggcccctctgcagccagtgccctgtagaaagtctctgtagggccaggcagcgtgttgaacaggaacaactgctcgcctctggaagcctctcaggcagcccagacgtcgaagagtgcgctcccaacacagggcaatgccatctctgcctgccgccctctgagccatgggaccagacattgggcgtcgttaatttcccacggaaggcatctcgcaaaccacctagggaagaaagctctgccacctgtgtgctggagcagcccggagccctcggagctcaaatcctcctcgtgcagcgcccaaatagcggcttgctggcaggcctctgggaattcccttcggttacatgggagccgagtgaacagcttcagaggaaagctctgctccaggagctgcagaggtgggcaggccccctccccgcgacccatctccgccatctcggagaggttgtgcatacctttagccacataaaattgacatatcaggtgtacggcttagccctggagggacaaacacctgtcaccaccgtccccccaggagcacggtggctgactcaggaggaattccatacagcagccgtgtccacagccatgaaaaaggtgttccgtgtgtatcagggccagcagcccggaacttgcatgggatccaaaagatcccaagtgagcagcccctgtagcagaaagaaaccgagaatgggccagcaggtgctcgataactttttccggtctcacatctcaacagacgcccatagcctgaacagcgccgctcaatag

SEQ ID NO: 111350 - DNA, 876 bp, Artificial Sequence
  derived and/or modified sequence
atgcggaagccccgggccgccgtgggcagcggccaccggaagcaggccgcgtcgcaggagggtcggcagaaacacgccaagaataatagtcaagcaaaaccttctgcttgtgacggcatgattgccgagtgtcccggcgccccagccggactagccaggcaacctgaggaggtagtgctgcaggcttctgtgtcaagctaccatctatttcgggatgttgcagaggtgacggcttttcgcggcagtttactttcctggtacgatcaagaaaagagagatctgccctggaggcgtcgcgcggaggatgaaatggatctggatcgacgcgcatatgccgtgtgggtgagcgaggtcatgctgcagcagacacaggttgccaccgtcataaattattatactgggtggatgcagaagtggcctacgttacaggatctggcgtccgccagccttgaggaggtcaaccaactgtgggcaggtttaggttactactctcgcgggagacgcctgcaggagggggcccgaaaagtagttgaggagttggggggacacatgccaagaactgcagagacactgcagcaattgctgcctggcgtggggcggtacactgctggggccatagcatccattgcttttggccaagccacaggcgtggtcgacggcaatgtggcgagagtgctctgtcgcgtaagagcaatcggagccgatccttctagcaccttggtaagccaacaactatggggactggcccagcagctcgtggatcccgctcgacccggggacttcaatcaggctgctatggagctgggcgcaaccgtgtgtacaccacagcgccccctgtgctcccaatgtccagtggagtcattatgccgagcctag

SEQ ID NO: 111351 - DNA, 1599 bp, Artificial Sequence
  derived and/or modified sequence
atgcggaagccccgggccgccgtgggcagcggccaccggaagcaggcagcctcccaggagggaagacaaaagcatgccaagaacaacagtcaggctaagcctagtgcctgtgatggaatgattgccgagtgtccaggggctccagctggtctggcaaggcagccggaggaagtggtcctgcaggctagtgtaagttcataccacttattccgcgacgttgcagaagtcactgcttttagaggcagcctgctcagctggtacgaccaggagaaacgggaccttccctggaggcggcgggccgaagatgaaatggatcttgacaggagggcttacgcagtctgggtgtccgaagttatgctgcaacagactcaggtcgcaacggtaattaattactatacaggatggatgcaaaagtggcctactctgcaggatctggcatctgcatctcttgaggaagtgaaccagctgtgggctggtctgggctactattctaggggcagaaggctgcaggagggcgcaaggaaggtcgtggaagaactcggaggccatatgccaagaacagccgagacactgcaacagttgctgccaggcgtggggaggtacactgcgggagcaatcgcgagtatagccttcggacaagccacaggcgttgtggatggcaacgttgctagggtgctttgtagggtccgggcaattggcgcggacccctcctcaacactggtgagtcagcaactgtggggactggcccagcagttggtggacccagccaggcctggagatttcaaccaggctgccatggagctcggcgcaacagtctgcactcctcagcgtccactgtgttctcagtgcccagtggagagcctgtgcagagcgaggcagagggtcgaacaggagcagttactggccagtggaagtctatccggcagccccgacgtggaggagtgtgctcctaacactgggcaatgccacctatgtcttcctccatctgagccctgggatcagacgctgggggttgtgaatttcccacgcaaggcttctcggaagcctcccagagaagagtcctccgccacctgtgttctggaacaacccggcgcactgggggcgcagattctgctggtgcagcgaccgaattccggcctgttagctggcctgtgggaatttccgtctgtaacctgggagccaagtgagcagctgcagcggaaagcgctactgcaggaactgcagagatgggctggtcctctccctgccacacacctgaggcacctgggggaggtcgttcacactttcagccacataaagctcacttaccaagtgtacggcctggccctggaaggccagacccctgtgaccacagtaccccccggagccaggtggctgacacaagaggagtttcacaccgctgctgtgagtacagccatgaagaaagtcttccgggtctatcagggacagcagcctggaacttgtatgggaagtaaaaggagtcaggtgagcagcccctgcagcagaaaaaagcctagaatggggcagcaggtgctagataacttcttcaggtcacatattagcactgacgcacattcccttaatagtgctgcgcagtag

SEQ ID NO: 111352 - DNA, 1599 bp, Artificial Sequence
  derived and/or modified sequence
atgagaaagccaagggccgctgtgggcagtggccaccgcaagcaggccgcttcacaggagggccgtcaaaaacacgccaagaacaactcacaagcgaagccaagcgcatgtgatgggatgatcgcggaatgtcctggcgctccagcgggattggccaggcagccagaagaagtagtgcttcaggctagcgtgtcctcctatcatctgttcagggacgtggctgaagtgaccgccttccgcggtagcctcctgtcatggtatgatcaggagaaacgggacttgccgtggcgcaggcgggcagaagacgagatggatctggatcgcagggcctatgcagtgtgggtgagcgaagtgatgctgcagcaaacgcaggttgccaccgttatcaattactacacaggatggatgcagaaatggcctactctccaagacttagcctccgcatccctagaggaggtcaatcagctgtgggccggacttggctactatagtagggggcgacgactgcaggagggagcacgtaaagttgtggaagagctgggcggtcatatgcctaggaccgctgaaactctgcagcagttactccccggtgtgggtagatatacagcaggggctatcgcaagtatcgcttttggccaggccacaggagtggtagacggaaacgtggctagagtcctatgccgagtgcgcgctattggcgctgacccttcttcgaccttagtcagtcaacagctctggggcctggcccagcaacttgtcgaccccgctcgacctggggactttaatcaagcagccatggagctgggggcaaccgtatgtacaccacagcgacccttgtgcagtcagtgccccgttgagtctctctgtagagctaggcaacgcgtggagcaggagcagctccttgcctccggaagcctgtctgggtccccagatgtggaggaatgtgcgcctaacactggacagtgccatttatgtctgcccccaagcgagccttgggaccaaacactgggagtcgtgaactttccgaggaaagcaagcaggaaaccaccacgggaagagtcttctgctacatgcgttcttgagcaacccggagctcttggagctcaaattctgttggtgcagcggccaaattctgggttgctggccggtctttgggagtttccctctgtgacatgggagcctagcgagcagctccagaggaaagcccttctacaggagctgcagcgttgggccggaccactgcccgctacgcatctgcgccatttgggcgaggtagtgcacaccttcagccatatcaagcttacttatcaggtgtacggactcgcccttgagggacagacccctgtgaccacagtgcccccaggcgcacgctggcttacacaggaggaattccacacagcagctgtaagcaccgcgatgaaaaaggtatttagagtgtaccagggacagcagcctgggacctgtatgggctctaaaagatctcaagtaagtagcccgtgctcccggaagaagccaaggatgggtcaacaggtcctggacaatttttttagaagccacattagcaccgatgctcacagcctgaattctgccgcacagtag

SEQ ID NO: 111353 - DNA, 876 bp, Artificial Sequence
  derived and/or modified sequence
atgcgcaagcctagagccgcagtcgggtccgggcatcgcaaacaagcggcatcccaggaaggccgtcaaaaacatgctaagaacaattcccaggccaaaccgagcgcatgcgacggtatgatcgccgaatgccccggagccccagctggcctggcccgtcagcctgaggaggtggttttacaggcctccgtctcatcttatcacttatttcgcgacgtcgcagaggtgaccgctttccggggaagcttgctctcttggtacgaccaggaaaagcgcgatctgccatggcggagacgcgcagaggatgaaatggacctggatcgcagagcttatgcagtgtgggtgagcgaggtcatgctgcagcagacccaagtagctactgtgatcaactactacactgggtggatgcagaaatggcctaccctgcaagaccttgccagtgcttctctcgaggaggtgaatcaactgtgggccggtttaggttactattctagaggtcggaggttacaggagggcgctcgaaaggtggttgaggaactgggagggcacatgcctcgaactgccgaaactctgcagcagttattgccaggtgtcggacggtacacagccggagccattgcatctatagccttcggccaagctaccggcgtagtcgacggcaatgtggctcgcgtgctttgcagagtccgtgcgatcggtgccgacccctcctcgaccctggtgtcccagcagctgtgggggctggctcagcagcttgtcgatccagcccgacccggagactttaaccaggcagccatggagctgggcgctactgtctgtactccccagcgccctctgtgttcgcagtgcccagtcgaatcattgtgcagagcctag

SEQ ID NO: 111354 - DNA, 1599 bp, Artificial Sequence
  derived and/or modified sequence
atgaggaaacccagggctgcagtgggtagcggccaccggaagcaggcagcctcacaggaggggcgacaaaagcacgccaaaaataacagccaagccaagccatcggcatgcgacggtatgatcgcggaatgccctggggctcccgctggactcgccagacagcccgaagaagttgtgctccaagccagtgtgagcagttaccacctgttccgcgacgtggcagaggtcacagcctttagggggtctttgctgtcctggtatgatcaggagaagcgggatctgccatggaggaggagagcggaagacgagatggacctggatcggagggcttatgccgtatgggtttccgaggtcatgctccagcagacacaggtcgccacggttatcaactattatactggctggatgcagaagtggccaactcttcaggacctcgctagcgcttccctggaggaggtgaatcagctgtgggctggactgggctactactctcgaggtcggaggctgcaggagggagctagaaaggttgtagaggagttgggaggacatatgcccaggactgctgagaccctccagcagcttctgccaggggtcggcagatacaccgctggggcaatcgcatctattgcattcggacaggcgaccggagttgtggacgggaacgtggcacgcgtcctgtgcagggttcgggctatcggtgcagatccctcctccacactggtttctcagcagctatggggcctcgctcagcaactggtggatcccgctcggcctggagattttaatcaggccgctatggagttaggggcaaccgtttgtactccccagagaccactgtgttctcagtgcccagtcgagtccctatgcagagcccgtcaaagagtggagcaggagcagttactggctagtggatcactgtctggttctcccgacgtggaagagtgcgcccctaacactgggcagtgtcatttgtgtttacccccatcagagccctgggaccagacattgggcgtcgtgaacttccccaggaaagcgtcgaggaagcctcccagggaagaatcaagcgctacttgtgtattagagcaacctggggcactaggtgcccagatactcttggtacagcggcctaactccgggctcctggcgggactttgggagtttcccagcgttacctgggagccatctgagcagttgcaaaggaaagctctacttcaagagctacaacggtgggctggccctctgccagctacccacctgaggcatctgggcgaggtggtgcataccttcagtcacattaagctaacttaccaagtctacggcctcgccctggaaggccagactcctgtgaccaccgtgcctccaggtgctcgctggctcacccaggaggaattccatacagccgctgtgtctaccgccatgaaaaaggtgttccgcgtataccaggggcagcaacctggtacctgtatgggctcaaagaggagtcaagtctcctccccatgtagccgcaagaaacctcgcatgggccagcaggtcctggataactttttcaggtcccatatctcaacagacgctcacagtctcaactccgcagctcagtag

SEQ ID NO: 111355 - protein, 147 aa, Artificial Sequence
  derived and/or modified sequence
MKTLFLGVTLGLAAALSFTLEEEDEGGSVHPEENPDAEDGGAWQIQRLWGQEAHIPAGAARDGRLRLLLQRPAPWGPALHGKACGICSLQGRAAVPTLAHLATSPAGRNPNTNLEALEEFKKLVQHKGLSEEDIFMPLQTGSCVLEH

SEQ ID NO: 111356 - protein, 85 aa, Artificial Sequence
  derived and/or modified sequence
MKTLFLGVTLGLAAALSFTLEEEDDGPWVHPEENPDAEDGGAWQIQRLWGQEAHVPAGAAQEGPLHLLLQRPAPWGPAPHGKACG

SEQ ID NO: 111357 - DNA, 444 bp, Artificial Sequence
  derived and/or modified sequence
atgaagactttgttcctgggggtaacattgggcttggcagccgctctttcatttacgcttgaggaggaggatgagggcggttccgtgcacccagaagagaaccctgatgcagaagatggaggagcctggcagattcagagactgtggggccaggaagcacatatccctgcaggagccgctagggatgggcggcttcggttactgctgcagcgacccgccccctggggacccgcgctccatggtaaggcctgcgggatttgttctttgcaggggagggccgcggtccctactcttgcccatctggcaacttcaccggctggcagaaaccccaatacaaacctggaagcacttgaggaatttaagaagctggtgcagcataaggggctgagcgaagaggatattttcatgcccctgcagactgggtcttgtgtgcttgagcattag

SEQ ID NO: 111358 - DNA, 258 bp, Artificial Sequence
  derived and/or modified sequence
atgaagacactctttctcggcgtcaccttaggattggccgccgccctctcatttaccctggaggaggaagacgatggcccatgggtccaccccgaggagaacccagatgctgaagacggaggcgcctggcagattcagcgtctttggggacaggaggcccacgtccccgccggagcggcccaggaaggtcctcttcatttgctgctgcagcgaccggccccttggggcccggcccctcatgggaaggcctgtggatag

SEQ ID NO: 111359 - DNA, 444 bp, Artificial Sequence
  derived and/or modified sequence
atgaagaccctcttcctgggcgtgaccctgggcctggccgccgccctgtccttcaccctggaggaggaggatgagggcggctctgtgcacccagaagaaaatccagatgctgaagatggaggagcctggcagatccagaggctgtggggccaggaggcccacatcccagctggagctgccagagatggccgcctgcggctgctgctgcagaggcctgccccctggggccctgccctgcacggcaaggcctgtggcatctgcagcctgcagggccgggctgctgtgcccaccctggcccacctggccaccagccctgctggcaggaaccccaacaccaacctggaggccctggaggagttcaagaagctggtgcagcacaagggcctgtctgaggaggacatcttcatgcccctgcagacaggcagctgtgtgctggagcactag

SEQ ID NO: 111360 - DNA, 258 bp, Artificial Sequence
  derived and/or modified sequence
atgaagaccctcttcctgggcgtgaccctgggcctggccgccgccctgtccttcaccctggaggaggaggatgatggcccctgggtgcacccagaagaaaatccagatgctgaagatggaggagcctggcagatccagaggctgtggggccaggaggcccacgtgcctgctggagctgcccaggagggccccctgcacctgctgctgcagaggcctgccccctggggccctgccccccacggcaaggcctgtggctag

SEQ ID NO: 111361 - DNA, 444 bp, Artificial Sequence
  derived and/or modified sequence
atgaagaccctgttcctgggcgtgaccctgggcctggccgccgccttgtccttcacactcgaagaagaggatgagggcggatctgtgcatcctgaggaaaaccctgacgccgaagatggtggggcatggcagattcaaaggctgtggggccaggaagcccacatccccgccggcgcagcacgagatggccgccttagattactacttcagcgccccgcaccttgggggcctgctctgcacggtaaagcctgcggaatctgcagcctgcaaggaagggccgccgtgcctactctagcacacctcgccaccagcccagcaggccggaatcccaatactaacctggaggctcttgaggagttcaagaagctggtccagcacaagggtctgtctgaggaggatatcttcatgcctctgcagacgggttcatgcgttctcgaacactag

SEQ ID NO: 111362 - DNA, 258 bp, Artificial Sequence
  derived and/or modified sequence
atgaagaccctgttcctgggcgtgaccctgggcctggccgccgccctgtcttttactctagaggaggaagatgatggcccttgggtgcatcctgaggagaatcccgacgcagaggacgggggggcttggcaaattcagagattgtggggtcaggaagctcacgtacccgccggcgcagcacaggagggccctctgcatctgctgctgcaaaggcccgctccatggggcccagccccacacggcaaggcttgcggatag

SEQ ID NO: 111363 - DNA, 444 bp, Artificial Sequence
  derived and/or modified sequence
atgaagaccctgttcctcggagtgactctgggacttgcagccgctctctcctttaccttagaggaggaggatgagggaggaagcgttcatccggaggagaaccctgatgctgaagatggaggggcttggcagatacagaggctgtggggacaggaagcccacatcccagctggagccgctagagatggaaggttaaggctgctccttcaacgccctgcaccttggggccctgccctccacggtaaggcatgcggcatctgcagtttacagggaagagccgctgtgcctaccttagctcatttggccacttcccctgccggtagaaaccctaataccaatctcgaggctcttgaggagtttaagaagttggttcagcacaagggcctaagtgaagaagacatattcatgccgctgcagactggatcatgcgtcctagaacactag

SEQ ID NO: 111364 - DNA, 258 bp, Artificial Sequence
  derived and/or modified sequence
atgaagactctatttcttggcgtgaccctgggacttgccgcagcgctgagctttacattagaagaagaggacgacggcccatgggtacatcccgaggaaaaccccgatgcggaggatggaggcgcatggcagattcagcggctctggggccaggaggcccatgtgcctgctggcgctgctcaggagggacccttacacctcttgcttcagcgcccagcgccttggggacccgctccccacgggaaggcatgtggctag

SEQ ID NO: 111365 - DNA, 444 bp, Artificial Sequence
  derived and/or modified sequence
atgaagaccctgttcctgggcgtgaccctgggcctggccgccgccctgagcttcaccctggaggaggaggacgagggcggcagcgtgcaccccgaggagaaccccgacgccgaggacggcggcgcctggcagatccagagactgtggggccaggaggcccacatccccgccggcgccgccagagacggcagactgagactgctgctgcagagacccgccccctggggccccgccctgcacggcaaggcctgcggcatctgcagcctgcagggcagagccgccgtgcccaccctggcccacctggccaccagccccgccggcagaaaccccaacaccaacctggaggccctggaggagttcaagaagctggtgcagcacaagggcctgagcgaggaggacatcttcatgcccctgcagaccggcagctgcgtgctggagcactag

SEQ ID NO: 111366 - DNA, 258 bp, Artificial Sequence
  derived and/or modified sequence
atgaagaccctgttcctgggcgtgaccctgggcctggccgccgccctgagcttcaccctggaggaggaggacgacggcccctgggtgcaccccgaggagaaccccgacgccgaggacggcggcgcctggcagatccagagactgtggggccaggaggcccacgtgcccgccggcgccgcccaggagggccccctgcacctgctgctgcagagacccgccccctggggccccgccccccacggcaaggcctgcggctag

SEQ ID NO: 111367 - DNA, 1098 bp, Artificial Sequence
  derived and/or modified sequence
aaggcagggtgagagttccccatctgaggcgtttgttgcagctacctgcacttctagattcatcttcttgtgagccctgggcttaggagtcaccatggcaactgaagagttcatcatccgcatccccccataccactatatccatgtgctggaccagaacagcaacgtgtcccgtgtggaggtcgggccaaagacctacatccggcaggacaatgagaggttctggatttggtggacgccgtcatccttacggaaaagacagccctgcacctccgggctcggcggaacttccgggacttcaggggagtgtcccgccgcactggggaggagtggctggtaacagtgcaggacacagaggcccacgtgccagatgtccacgaggaggtgctgggggttgtgcccatcaccaccctgggcccccacaactactgcgtgattctcgaccctgtcggaccggatggcaagaatcagctggggcagaagcgcgtggtcaagggagagaagtcttttttcctccagccaggagagcagctggaacaaggcatccaggatgtgtatgtgctgtcggagcagcaggggctgctgctgagggccctgcagcccctggaggagggggaggatgaggagaaggtctcacaccaggctggggaccactggctcatccgcggacccctggagtatgtgccatctgccaaagtggaggtggtggaggagcgccaggccatccctctagacgagaacgagggcatctatgtgcaggatgtcaagaccggaaaggtgcgcgctgtgattggaagcacctacatgctgacccaggacgaagtcctgtgggagaaagagctgcctcccggggtggaggagctgctgaacaaggggcaggaccctctggcagacaggggtgagaaggacacagctaagagcctccagcccttggcgccccggaacaagacccgtgtggtcagctaccgcgtgccccacaacgctgcggtgcaggtgtacgactaccgagagaagcgagcccgcgtggtcttcgggcctgagctggtgtcgctgggtcctgaggagcagttcacagtgttgtccctctcagctgggcgg

SEQ ID NO: 111368 - DNA, 480 bp, Artificial Sequence
  derived and/or modified sequence
atgtgctggactaggacggccacttgtccagtttggagatcagggcagcgcccgacaagcggccgcacaatgagaggaagcggcttcggaggcaggaggcatccatacggtaaagacagccctgctcctccaggctctgcagagttgcccgggctccagggtagcgtgccccctcactggggtggcgtggccgggaatagtgctgggcaccgtggcccacgtgcccggtgtccacgcggaggggccggaggttgcgctcaccaccacccagggcccccccaattactgagggattctaggccatgtcgaaccggatggcaagagtccgctggcgctgaggccaggggacaggggcgtgaggtctttttccctccggcacgcagagctgcaggcactagacacccaggatgtgtttgtgccgtcggcgctgccggagctgcagccgaaggccccgccgcacctggcggcggaggaggatag

SEQ ID NO: 111369 - DNA, 480 bp, Artificial Sequence
  derived and/or modified sequence
atgtgctggacccggaccgccacctgccccgtgtggcggagcggccagagacctacatcggggaggacaatgcgaggtagcgggtttggcggtaggagacacccctacggcaaagactcaccagcacctcccggaagtgctgaactacctggactacagggctcagtgccacctcactggggaggtgtggcaggcaacagcgccggacacagagggccacgagctaggtgtcccagaggtggggcaggcggatgtgctcaccatcaccccggacctccgcaactgcttcgggactcacggccctgccgtactggctggcaggagtcagcaggcgctgaagcacgcgggcaggggcgggaagtcttctttccccccgcacggagggcagcggggactaggcatccggggtgcgtgtgtgctgtgggtgccgctggcgctgccgcggaggggcccgccgcccctggcggcggaggaggttag

SEQ ID NO: 111370 - protein, 243 aa, Artificial Sequence
  derived and/or modified sequence
MREIVHIQAGQCGNQIGAKFWEVISDEHGIDPTGTYHGDSDLQLDRISVYYNEATGGKYVPRAILVDLEPGTMDSVRSGPFGQIFRPDNFVFGQSGAGNNWAKGHYTEGAELVDSVLDVVRKEEVDEQMLNVQNKNSSYFVEWIPNNVKTAVCDIPPRGLKMAVTFIGNSTAIQELFKRISEQFTAMFRRKAFLHWYTGEGMDEMEFTEAESNMNDLVSEYQQYQDATAEEEEDFGEEAEEEA

SEQ ID NO: 111371 - DNA, 732 bp, Artificial Sequence
  derived and/or modified sequence
atgagagagatcgtgcacatccaggccggccagtgcggcaaccagatcggcgccaagttctgggaggtgatcagcgacgagcacggcatcgaccccaccggcacctaccacggcgacagcgacctgcagctggacagaatcagcgtgtactacaacgaggccaccggcggcaagtacgtgcccagagccatcctggtggacctggagcccggcaccatggacagcgtgagaagcggccccttcggccagatcttcagacccgacaacttcgtgttcggccagagcggcgccggcaacaactgggccaagggccactacaccgagggcgccgagctggtggacagcgtgctggacgtggtgagaaaggaggaggtggacgagcagatgctgaacgtgcagaacaagaacagcagctacttcgtggagtggatccccaacaacgtgaagaccgccgtgtgcgacatcccccccagaggcctgaagatggccgtgaccttcatcggcaacagcaccgccatccaggagctgttcaagagaatcagcgagcagttcaccgccatgttcagaagaaaggccttcctgcactggtacaccggcgagggcatggacgagatggagttcaccgaggccgagagcaacatgaacgacctggtgagcgagtaccagcagtaccaggacgccaccgccgaggaggaggaggacttcggcgaggaggccgaggaggaggcctag

SEQ ID NO: 111372 - DNA, 732 bp, Artificial Sequence
  derived and/or modified sequence
atgcgggaaatcgtccatatccaggcaggtcaatgcggcaaccagatcggggctaagttctgggaggtgatcagtgatgagcacggaatagaccccactgggacataccacggagacagtgacctacagctcgaccggattagcgtctactataatgaggcaactgggggcaagtacgtaccacgggccatcctagttgacctcgagccaggcaccatggactcggttcgctctggtccatttggtcagatctttaggcctgacaacttcgtatttgggcagagcggcgcaggaaataattgggccaaagggcattacacggaaggtgctgagctggtggacagtgtgctggacgtggtgaggaaggaagaggtagacgaacaaatgttaaacgtccaaaacaagaacagctcttatttcgtggagtggattcctaacaatgtcaagacggctgtatgtgacattcctcccagggggctcaagatggctgttacatttattggcaattccaccgcgatccaggagttgttcaagcgtatctcagagcagtttacagccatgttcagacggaaggcctttctgcattggtacactggtgaaggcatggatgagatggaatttaccgaagccgagagtaatatgaacgatctagtcagcgagtaccaacagtatcaggatgccactgcagaagaagaagaagattttggcgaagaagccgaagaagaggcgtag

SEQ ID NO: 111373 - DNA, 732 bp, Artificial Sequence
  derived and/or modified sequence
atgagggagatcgtgcacatccaggccggccagtgtggcaaccagatcggggccaagttctgggaggtgatcagtgatgagcacggcatcgaccccaccggcacctaccatggagacagcgacctgcagctggaccgcatctctgtgtactacaatgaggccactggaggcaagtatgtgccccgggccatcctggtggacctggagcccggcaccatggattctgtgcgcagcggccccttcggccagatcttccggccagacaactttgtgtttggccagagcggggccggcaacaactgggccaagggccactacacagaaggagctgagctggtggacagcgtgctggatgtggtgaggaaggaggaggtggatgagcagatgctgaatgtgcagaacaagaacagcagctactttgtggagtggatccccaacaacgtgaagacagctgtgtgtgacatccccccccggggcctgaagatggctgtgaccttcatcggcaacagcacagccatccaggagctgttcaagaggatcagcgagcagttcaccgccatgttccggaggaaggccttcctgcactggtacaccggggagggcatggatgagatggagttcacagaggccgagagcaacatgaatgacctggtgtctgagtaccagcagtaccaggatgccacagctgaggaggaggaggactttggagaggaggccgaggaggaggcctag

SEQ ID NO: 111374 - DNA, 732 bp, Artificial Sequence
  derived and/or modified sequence
atgcgggagatcgtgcacatccaggccggccagtgcggcaaccagattggcgctaagttctgggaagtgatctcagatgagcatgggattgaccccactgggacgtaccacggtgacagcgacttacagctggatcgcatatctgtgtactacaacgaagctacaggaggcaagtacgtgcctagggcaatcttggtggatctggagccaggcacaatggactctgtcagaagcggtcctttcggtcagatctttagacctgataattttgtgttcggccagagcggggcgggcaacaattgggctaaaggacactacaccgagggtgctgaacttgttgattccgttctcgatgtggttagaaaggaagaggttgatgagcagatgctgaacgtgcagaataaaaatagcagctacttcgtggaatggatacctaacaacgtgaaaaccgctgtctgcgatatccctcctcgggggttgaaaatggctgtgacatttatagggaactctacagccattcaggagctctttaagaggatctcggaacaattcacggctatgttccgacggaaggcatttctccattggtacactggagagggtatggatgaaatggaattcaccgaggctgagtcaaacatgaatgacctggtcagcgagtatcagcaataccaagacgcaaccgcagaagaggaagaagattttggagaagaagccgaggaggaggcgtag

SEQ ID NO: 111375 - DNA, 732 bp, Artificial Sequence
  derived and/or modified sequence
atgcgcgagattgtgcatattcaagccggacagtgtggaaatcagatcggcgcaaagttttgggaggtgatctccgacgaacatggcatcgaccctacaggtacctatcatggggatagtgacctgcagctcgaccgtatttcggtgtactataatgaggccaccggaggaaagtacgtcccaagggcaattctagtggatcttgagcccggaaccatggactccgtccgctcggggccttttggacaaattttccgaccagacaactttgtgttcgggcagtctggtgctggtaataattgggcaaaaggccactacacggaaggggcagaactggtggattctgtgctggacgtggtcaggaaagaggaggtggatgagcagatgcttaacgtccaaaacaagaactccagttactttgtggaatggatacctaataatgttaagaccgctgtgtgtgacattccacctagagggctgaaaatggccgtaacctttatcggaaactcaaccgccattcaggaactgttcaagaggatcagcgaacagtttaccgccatgttcagaagaaaggctttcctgcattggtatacaggggaaggaatggacgagatggaattcacagaggccgagtcaaacatgaacgatctggtgtcagagtatcagcagtaccaggatgctactgccgaggaggaggaggactttggggaggaggctgaagaggaggcttag

SEQ ID NO: 111376 - DNA, 882 bp, Artificial Sequence
  derived and/or modified sequence
agaaccttcctgccgtcgcgtttgcacctcgctgctccagcctctggggcgcattccaaccttccagcctgcgacctgcggagaaaaaaaattacttattttcttgccccatacataccttgaggcgagcaaaaaaattaaattttaaccatgagggaaatcgtgcacatccaggctggtcagtgtggcaaccagatcggtgccaagttctgggaggtgatcagtgatgaacatggcatcgaccccaccggcacctaccacggggacagcgacctgcagctggaccgcatctctgtgtactacaatgaagccacaggtggcaaatatgttcctcgtgccatcctggtggatctagaacctgggaccatggactctgttcgctcaggtccttttggccagatctttagaccagacaactttgtatttggtcagtctggggcaggtaacaactgggccaaaggccactacacagagggcgccgagctggttgattctgtcctggatgtggtacggaaggaggaggtcgatgagcagatgcttaacgtgcagaacaagaacagcagctactttgtggaatggatccccaacaatgtcaagacagccgtctgtgacatcccacctcgtggcctcaagatggcagtcaccttcattggcaatagcacagccatccaggagctcttcaagcgcatctcggagcagttcactgccatgttccgccggaaggccttcctccactggtacacaggcgagggcatggacgagatggagttcaccgaggctgagagcaacatgaacgacctcgtctctgagtatcagcagtaccaggatgccaccgcagaagaggaggaggatttcggtgaggaggccgaagaggaggcctaa

SEQ ID NO: 111377 - protein, 372 aa, Artificial Sequence
  derived and/or modified sequence
MDSVRSGPFGQIFRPDNFVFGQSGAGNNWAKGHYTEGAELVDSVLDVVRKEAESCDCLQGFQLTHSLGGGTGSGMGTLLISKIREEYPDRIMNTFSVVPSPKVSDTVVEPYNATLSVHQLVENTDETYCIDNEALYDICFRTLKLTTPTYGDLNHLVSATMSGVTTCLRFPGQLNADLRKLAVNMVPFPRLHFFMPGFAPLTSRGSQQYRALTVPELTQQVFDAKNMMAACDPRHGRYLTVAAVFRGRMSMKEVDEQMLNVQNKNSSYFVEWIPNNVKTAVCDIPPRGLKMAVTFIGNSTAIQELFKRISEQFTAMFRRKAFLHWYTGEGMDEMEFTEAESNMNDLVSEYQQYQDATAEEEEDFGEEAEEEA

SEQ ID NO: 111378 - protein, 353 aa, Artificial Sequence
  derived and/or modified sequence
MREIVHIQAGQCGNQIGAKFWEVISDEHGIDPTGTYHGDSDLQLTHSLGGGTGSGMGTLLISKIREEYPDRIMNTFSVVPSPKVSDTVVEPYNATLSVHQLVENTDETYCIDNEALYDICFRTLKLTTPTYGDLNHLVSATMSGVTTCLRFPGQLNADLRKLAVNMVPFPRLHFFMPGFAPLTSRGSQQYRALTVPELTQQVFDAKNMMAACDPRHGRYLTVAAVFRGRMSMKEVDEQMLNVQNKNSSYFVEWIPNNVKTAVCDIPPRGLKMAVTFIGNSTAIQELFKRISEQFTAMFRRKAFLHWYTGEGMDEMEFTEAESNMNDLVSEYQQYQDATAEEEEDFGEEAEEEA

SEQ ID NO: 111379 - DNA, 1119 bp, Artificial Sequence
  derived and/or modified sequence
atggacagcgtgagaagcggccccttcggccagatcttcagacccgacaacttcgtgttcggccagagcggcgccggcaacaactgggccaagggccactacaccgagggcgccgagctggtggacagcgtgctggacgtggtgagaaaggaggccgagagctgcgactgcctgcagggcttccagctgacccacagcctgggcggcggcaccggcagcggcatgggcaccctgctgatcagcaagatcagagaggagtaccccgacagaatcatgaacaccttcagcgtggtgcccagccccaaggtgagcgacaccgtggtggagccctacaacgccaccctgagcgtgcaccagctggtggagaacaccgacgagacctactgcatcgacaacgaggccctgtacgacatctgcttcagaaccctgaagctgaccacccccacctacggcgacctgaaccacctggtgagcgccaccatgagcggcgtgaccacctgcctgagattccccggccagctgaacgccgacctgagaaagctggccgtgaacatggtgcccttccccagactgcacttcttcatgcccggcttcgcccccctgaccagcagaggcagccagcagtacagagccctgaccgtgcccgagctgacccagcaggtgttcgacgccaagaacatgatggccgcctgcgaccccagacacggcagatacctgaccgtggccgccgtgttcagaggcagaatgagcatgaaggaggtggacgagcagatgctgaacgtgcagaacaagaacagcagctacttcgtggagtggatccccaacaacgtgaagaccgccgtgtgcgacatcccccccagaggcctgaagatggccgtgaccttcatcggcaacagcaccgccatccaggagctgttcaagagaatcagcgagcagttcaccgccatgttcagaagaaaggccttcctgcactggtacaccggcgagggcatggacgagatggagttcaccgaggccgagagcaacatgaacgacctggtgagcgagtaccagcagtaccaggacgccaccgccgaggaggaggaggacttcggcgaggaggccgaggaggaggcctag

SEQ ID NO: 111380 - DNA, 1062 bp, Artificial Sequence
  derived and/or modified sequence
atgagagagatcgtgcacatccaggccggccagtgcggcaaccagatcggcgccaagttctgggaggtgatcagcgacgagcacggcatcgaccccaccggcacctaccacggcgacagcgacctgcagctgacccacagcctgggcggcggcaccggcagcggcatgggcaccctgctgatcagcaagatcagagaggagtaccccgacagaatcatgaacaccttcagcgtggtgcccagccccaaggtgagcgacaccgtggtggagccctacaacgccaccctgagcgtgcaccagctggtggagaacaccgacgagacctactgcatcgacaacgaggccctgtacgacatctgcttcagaaccctgaagctgaccacccccacctacggcgacctgaaccacctggtgagcgccaccatgagcggcgtgaccacctgcctgagattccccggccagctgaacgccgacctgagaaagctggccgtgaacatggtgcccttccccagactgcacttcttcatgcccggcttcgcccccctgaccagcagaggcagccagcagtacagagccctgaccgtgcccgagctgacccagcaggtgttcgacgccaagaacatgatggccgcctgcgaccccagacacggcagatacctgaccgtggccgccgtgttcagaggcagaatgagcatgaaggaggtggacgagcagatgctgaacgtgcagaacaagaacagcagctacttcgtggagtggatccccaacaacgtgaagaccgccgtgtgcgacatcccccccagaggcctgaagatggccgtgaccttcatcggcaacagcaccgccatccaggagctgttcaagagaatcagcgagcagttcaccgccatgttcagaagaaaggccttcctgcactggtacaccggcgagggcatggacgagatggagttcaccgaggccgagagcaacatgaacgacctggtgagcgagtaccagcagtaccaggacgccaccgccgaggaggaggaggacttcggcgaggaggccgaggaggaggcctag

SEQ ID NO: 111381 - DNA, 624 bp, Artificial Sequence
  derived and/or modified sequence
atgggcaccctgctgatcagcaagatcagagaggagtaccccgacagaatcatgaacaccttcagcgtggtgcccagccccaaggtgagcgacaccgtggtggagccctacaacgccaccctgagcgtgcaccagctggtggagaacaccgacgagacctactgcatcgacaacgaggccctgtacgacatctgcttcagaaccctgaagctgaccacccccacctacggcgacctgaaccacctggtgagcgccaccatgagcggcgtgaccacctgcctgagattccccggccagctgaacgccgacctgagaaagctggccgtgaacatggtgcccttccccagactgcacttcttcatgcccggcttcgcccccctgaccagcagaggcagccagcagtacagagccctgaccgtgcccgagctgacccagcaggtgttcgacgccaagaacatgatggccgcctgcgaccccagacacggcagatacctgaccgtggccgccgtgttcagaggcagaatgagcatgaaggaggtggacgagcagatgctgaacgtgcagaacaagaacagcagctacttcgtggagtggccccagcagtgccaggacagcagactgtag

SEQ ID NO: 111382 - DNA, 1119 bp, Artificial Sequence
  derived and/or modified sequence
atggactcagtaaggtctggcccattcggccagatttttaggcccgacaactttgtgtttgggcaaagcggcgcgggaaataactgggctaagggacactacacagagggcgcagagctggtcgatagcgttctggatgttgtcaggaaggaggcggaaagctgtgactgccttcaaggattccagctgacgcacagcttgggcggtggaaccgggtctggcatgggtaccctcctcatcagtaagatcagagaagaatatcctgatcgtattatgaatactttctcggtggtgccctctccaaaagtgtccgacactgtcgttgagccatacaacgctaccctgtctgtccatcaattggtggagaacacagatgaaacttactgcatcgacaatgaagccctgtacgatatctgcttccgtaccctgaaactcactacacccacctacggcgaccttaatcacttggtgtcagctactatgtcgggggtgactacctgcctccgttttccaggccagttaaacgccgacctgcgcaagcttgcagtaaatatggtcccttttccgagattacacttttttatgcccggcttcgcacctctaacatcacggggctctcagcagtaccgcgctttgacagtgcctgagttgacccagcaggtgtttgatgccaagaacatgatggccgcttgtgaccctaggcacggtagataccttactgttgcagctgtttttcgcgggcggatgtcgatgaaagaggttgatgagcagatgctcaatgtccagaacaagaatagttcttacttcgtggaatggattcccaacaatgtgaagacagctgtctgtgatatccctccgcgagggctcaagatggctgtaacttttatcgggaactccaccgctatacaggaactttttaaaaggatctccgagcagttcactgccatgttccgacgaaaggcctttctgcattggtataccggcgagggaatggacgagatggaattcacagaggccgagagcaacatgaatgacttggtgagcgagtatcaacagtaccaggacgctacagctgaagaggaagaagattttggagaggaggcagaagaagaggcatag

SEQ ID NO: 111383 - DNA, 1119 bp, Artificial Sequence
  derived and/or modified sequence
atggactctgtgagaagcggtccctttgggcaaattttcaggccggacaactttgtgtttggtcagtccggtgccggcaataactgggctaagggacattatactgagggcgctgagttggtagacagcgtgttggacgtcgtgcgcaaggaagcagagagctgcgattgtctacagggatttcaactgactcacagcctgggaggtggcactgggagcggcatgggcacactcctgatctccaaaatccgcgaggaatacccggacaggatcatgaatacattctccgtggttccgagccccaaagtgtccgacacagtcgttgaaccctacaacgcaacgctcagcgtgcatcagctggtggagaacactgacgaaacgtattgcattgataacgaagccctttacgacatctgcttcagaactctgaagctgacaacacccacatacggggacctcaaccatctggtctccgccactatgtccggagtgaccacatgtctaaggttccccggtcaacttaacgccgacctgaggaaactcgccgtgaacatggtaccgttcccccgcctccacttcttcatgcctggctttgcccccctcacctcacgcggaagccagcagtatagggcccttacagtccccgagctgacccagcaggtgttcgatgccaagaacatgatggctgcctgtgatccgcgccacggccgctatctgacagtggctgcagtgtttagaggcagaatgagcatgaaggaggttgacgaacagatgctgaatgtgcagaacaaaaacagctcctactttgttgagtggatccccaacaacgtcaaaactgcagtctgtgacattcctccccgtggcctgaaaatggccgtaacctttattggcaacagcactgccatacaggaattgtttaaacggatttccgagcagtttacagcaatgttccgccggaaagcttttctacattggtacactggcgagggtatggacgagatggagttcactgaggccgagtccaatatgaacgatctggtgtctgaataccaacagtaccaggacgccacagcagaggaagaggaggatttcggcgaggaagctgaagaagaggcttag

SEQ ID NO: 111384 - DNA, 1119 bp, Artificial Sequence
  derived and/or modified sequence
atggactctgtgcgcagcggaccttttggtcagatattccggccagacaattttgtattcggtcagtcgggggcaggaaataactgggccaaaggacattataccgaaggagctgaacttgtggactccgttttggacgtcgttcggaaggaggcagaatcatgtgactgcttgcaaggattccagctcactcactcactcggaggaggaaccgggagtgggatgggtaccctgctaatttctaaaattcgagaagagtatcctgatcgcataatgaatacctttagcgtggtgcctagtcccaaagtgtccgacaccgtcgtagagccctataatgctactctttccgtgcatcagctcgtggaaaacactgatgaaacttattgcattgataacgaggctctctacgatatatgctttcgtacattaaaacttacaacccccacctatggcgatctgaatcatttagtctcagcaacaatgagcggggtgactacctgccttcgcttcccgggacaattgaacgccgacctacgcaaactggctgtgaatatggtgccattcccccgcctacatttttttatgccggggttcgccccactgacctcccgcggtagccagcagtatcgggcactgaccgtacctgaacttacccagcaggtgttcgacgctaagaatatgatggccgcatgtgatccccgccacggcagatatttgacagttgcagctgtttttagaggcagaatgtcaatgaaagaggtggacgaacagatgttgaatgtacagaacaaaaattccagctactttgtagagtggattccaaataacgttaagacagccgtatgtgatataccgccacgagggctcaaaatggctgtgacgttcattgggaatagcacagctatccaggagctgtttaaaagaatttccgagcagttcacggctatgttccgccggaaagctttcctgcactggtacacaggtgagggaatggatgagatggagttcaccgaggctgaatctaacatgaatgatttggtctctgagtatcaacagtaccaggatgcgaccgctgaagaggaggaggacttcggtgaagaggctgaggaggaggcttag

SEQ ID NO: 111385 - DNA, 1119 bp, Artificial Sequence
  derived and/or modified sequence
atggattctgttaggtcgggaccttttggtcaaatcttcagacccgataatttcgtgtttggccagtccggcgccggcaataactgggctaaaggccattataccgaaggtgctgaactggtagatagcgttctagatgtggtgaggaaagaagcagaatcctgtgattgtcttcagggttttcagctgacccacagcttgggtggaggcactggcagcgggatgggtactttgctcatatcaaagatcagggaggagtatcctgaccgaattatgaatacattctctgttgtgccatctccaaaggtctcggacaccgtcgtggaaccttataatgcaacactgagtgtccatcagctggtcgaaaacacagatgagacgtactgcattgacaacgaagccctgtatgatatctgctttaggaccctgaaactgaccacaccgacgtacggtgatcttaatcacttagtcagtgccactatgagtggcgtcactacctgtttgcgattcccgggtcagctcaatgccgatctgcgcaagctggcagtcaatatggtcccattcccaagacttcacttctttatgcctgggttcgcgcctcttacatcccgcggatctcagcagtatcgagctcttactgtacctgaactcacccagcaggttttcgacgctaaaaatatgatggcggcatgcgacccgagacacggccggtatctaaccgtggctgcagtcttccggggaagaatgtccatgaaggaggtagatgaacagatgttaaatgttcagaataaaaattcctcctacttcgtggagtggattcctaacaacgtcaagaccgcagtttgcgatataccgccaagagggctgaaaatggccgttactttcatcggaaacagtacagccatacaagaattgtttaagagaatatcagagcagttcactgccatgtttcgccgcaaggctttcctgcactggtacaccggtgaaggcatggatgaaatggagtttaccgaggccgagagtaatatgaacgacttggttagtgagtatcagcagtaccaggatgctactgccgaagaggaggaggattttggagaggaagcggaggaagaggcttag

SEQ ID NO: 111386 - DNA, 1119 bp, Artificial Sequence
  derived and/or modified sequence
atggactctgtgagatccggacctttcgggcagatctttcgtcccgataatttcgtcttcggacaatccggggccggcaataattgggcaaagggccactatacagaaggcgccgaattagtggacagtgttctggatgtggttcgtaaggaggcggagtcgtgtgattgtcttcaaggattccaactgacccactcactcggcggaggtaccggctcagggatgggaacattactcatttctaaaattcgtgaagagtacccagacaggatcatgaacacattctccgtcgtcccatcccctaaggtgagtgacactgtggttgaaccttataacgctactttgagcgttcaccagctcgttgaaaacaccgatgagacctattgcatagataacgaggccctctacgatatctgcttcaggactcttaagcttaccacccccacatacggggacttgaatcaccttgtgtcagctacaatgtctggtgtgaccacatgcctgcgcttccctggacaactgaatgccgatctcaggaaactggctgtgaacatggtaccatttccccggcttcacttctttatgcctgggtttgcccccttaacctcacgggggtcacagcagtatcgagctctgacagtccccgagctgacccagcaggtgttcgacgccaaaaacatgatggcagcctgtgacccacgtcacgggaggtatttgaccgtggctgccgtcttcagaggccgaatgagcatgaaggaggtggacgaacagatgctcaacgtccagaacaagaactctagctatttcgtggagtggatccccaataacgtaaaaacagcagtctgtgatatcccacctcgcgggctgaagatggcggtcactttcattggcaacagtactgccatccaagagctctttaaacggatctccgagcagttcacggccatgttcagacggaaggcgtttctgcactggtacacaggagaagggatggatgagatggagttcacagaagccgagagcaatatgaatgatctggtgtctgaataccagcagtatcaggacgccactgccgaagaggaggaggactttggagaggaggccgaggaagaggcttag

SEQ ID NO: 111387 - DNA, 1119 bp, Artificial Sequence
  derived and/or modified sequence
atggattcagtgaggtctgggccgtttggccagatcttccggccagataacttcgtgttcggtcagtctggggcaggaaataactgggccaaaggccattatacggaaggcgctgaactggtggattctgtcctggacgttgtgcggaaagaagctgagtcttgtgattgcctacaggggtttcaattaacccacagcttagggggtggcactggcagtgggatgggaacgttgttgatctccaaaatccgagaggaataccctgaccggattatgaatacgttttccgtcgtcccctctccgaaagtgtctgacaccgtggtggagccttacaacgctacattgtctgtgcatcaattagtggagaatactgacgaaacttattgtattgataacgaggcactctacgatatatgtttccggactttgaagctcacaactcctacatacggcgacctaaaccatttggtctctgctaccatgagtggcgttaccacttgtttgcgtttccctggccaactcaacgccgacttaagaaaactggccgtcaatatggttccctttcctcggttacacttcttcatgcctggctttgctccgctgacctctcgcggatctcagcagtaccgagctttgacagtcccagagttgacacaacaggtttttgacgcaaaaaatatgatggctgcgtgcgatccccgacatggtagatacttgaccgtcgccgccgtgttccgggggcgcatgtcgatgaaagaggtggatgagcagatgctaaatgtgcagaacaaaaactcgtcatatttcgtcgaatggatccccaacaacgtgaagacagccgtctgtgatattccaccgcggggattgaagatggcagtgaccttcattggcaacagcacggctatacaggagctattcaaacgaatttcagagcagttcaccgcgatgtttcgacgcaaagcctttttgcactggtacactggcgaaggtatggatgagatggaattcactgaagccgagagtaatatgaatgatctcgtatcagagtatcagcaatatcaggacgcaacggctgaagaggaagaagactttggcgaggaagcagaagaggaggcatag

SEQ ID NO: 111388 - DNA, 1062 bp, Artificial Sequence
  derived and/or modified sequence
atgcgggaaatagtgcacatccaggccgggcagtgtggtaaccagatcggcgccaagttttgggaggtgatcagcgacgagcacggcatcgatcccacaggcacataccatggcgattccgaccttcagctaacgcattctctcggtggtggtaccggctcagggatgggcacactgctgatttcgaagatcagggaagaatatccagatcgtatcatgaacacgtttagtgtcgttcccagccctaaagtttcagataccgtcgttgaaccctataacgcaactctgagtgtgcaccagttggtggagaatactgatgagacctactgtatcgacaacgaagcattatatgacatctgttttcgtacgctgaaactgaccactcctacttatggggaccttaaccatttggtgagcgccacgatgtccggagtcacgacttgcctccggttccccggccaactcaacgctgatctccggaagttggcggtcaatatggttcccttcccacggcttcactttttcatgcccgggtttgccccgctgacttcacgcggatcacagcaatacagagcactgacggttccagaacttacccaacaggtttttgacgccaagaatatgatggctgcttgtgatcctcgacacgggcgttacctcactgtggcagccgtattcagaggcagaatgagtatgaaagaagttgatgagcagatgcttaacgtgcagaataaaaactcttcgtatttcgtcgaatggatccctaacaatgtcaagacagcagtctgtgatattccgcctcggggcttgaagatggccgtgaccttcataggcaactccaccgccatccaagagctcttcaagcgcatatcggaacagttcactgccatgttcagaagaaaggccttcctgcattggtatactggcgagggcatggatgagatggagttcacagaggccgagtcaaacatgaatgacctggtgtctgaataccagcagtaccaagacgccactgcggaagaagaggaagactttggagaggaagcggaagaggaagcatag

SEQ ID NO: 111389 - DNA, 1119 bp, Artificial Sequence
  derived and/or modified sequence
atggacagtgtccgctctggcccgtttggccagatttttaggcccgacaattttgtgttcggccaaagtggtgccggcaacaattgggctaagggacattacacggaaggagctgaactagtggatagcgtactcgatgtagttcggaaggaggcagaaagctgcgactgcttgcagggctttcagctgacacactcactcggtggcgggactggctcaggcatggggactttactgatctctaaaatcagagaagagtacccggataggatcatgaacaccttctcagtcgtgccaagccccaaggtctccgacactgtggtcgaaccctataatgccacactctccgttcaccagctcgtggagaacactgatgaaacatactgcatcgacaatgaagcgctgtatgacatctgcttccgaaccctcaagctgactacccccacctacggcgatctaaaccacctcgtgagcgccactatgtccggcgtcacaacctgcctgagattccctgggcaactgaatgctgatttgaggaagctggcggtgaacatggtgccattcccgaggctgcacttctttatgccagggtttgcccctttaacctctcgtggatcacagcagtatcgcgctctgactgtgcctgagctcacacagcaggtttttgatgccaagaacatgatggccgcctgtgaccctaggcacggcagatacctgacggtggccgctgtgtttcgaggccgcatgtccatgaaggaagtggatgaacagatgctgaatgttcagaataaaaatagctcttacttcgtcgagtggatccctaacaacgtcaagacagccgtctgtgacattcccccaagggggctgaagatggcagtaaccttcatcggaaactctaccgccattcaggagctcttcaagcgaatatctgagcagtttacagcgatgttccggcgaaaagccttcctccactggtacactggagagggcatggacgagatggagttcactgaggcggagtcaaatatgaatgacctggtgagtgagtaccagcagtatcaagacgctaccgccgaagaggaggaagattttggggaagaggctgaggaggaggcctag

SEQ ID NO: 111390 - DNA, 1119 bp, Artificial Sequence
  derived and/or modified sequence
atggatagcgtcagatccggacccttcggccaaatcttccgtccagataatttcgtgttcggacagtcaggcgctgggaacaattgggcgaaaggccactatacagaaggcgccgaactcgtggattccgtgctcgacgttgtgcgaaaggaagccgaatcctgcgattgtctgcaggggttccagttaacccacagtctggggggggggacaggctccggtatgggcacgctactcattagtaagattcgagaggagtacccggaccgaatcatgaacacattttccgtcgttccgagtccgaaggtctccgataccgtggtggaaccatacaatgccaccctgtcagtgcatcaactggtggagaacactgacgagacatattgtattgataatgaggccctttacgatatctgttttcggaccctgaagttgaccactcctacctatggagacctgaatcaccttgtgtccgctaccatgtctggagtgacgacctgtttacgctttccaggtcagctgaatgctgatttgcgcaagctggccgtgaatatggtcccattcccaagactgcatttcttcatgcccggtttcgcacccttgaccagtagggggtcccagcagtaccgggcgttgaccgtgcctgagctgacccaacaagtattcgacgcaaagaacatgatggcggcatgcgacccgaggcacggtcgatacctcaccgtggccgcggttttccgcggccgcatgagcatgaaagaggtcgacgagcagatgttaaacgtgcagaacaagaattcttcttactttgtggagtggatcccaaataacgtgaaaacagccgtgtgtgacattccccctagaggattaaaaatggcagtaaccttcatcgggaacagtactgctatacaagaactctttaagagaatctcagagcagttcacagccatgtttaggaggaaggcgttcctgcattggtataccggcgaaggcatggatgagatggaattcaccgaagcagaaagcaatatgaatgatctggttagcgaataccaacagtatcaggacgctacagcagaggaggaggaagattttggagaggaagcagaagaagaagcctag

SEQ ID NO: 111391 - DNA, 1119 bp, Artificial Sequence
  derived and/or modified sequence
atggattccgtgcggagtggacccttcggtcagattttcagaccagacaacttcgtctttggtcagagcggggctgggaataattgggccaaggggcactataccgaaggtgcagaactggtggactcagtgctcgacgtggtcaggaaagaagccgagagctgcgattgcctgcagggtttccaattgacacactcactgggaggagggacagggagtggcatgggaacactcctcatctccaagataagagaagagtacccagaccgcattatgaataccttcagcgttgtgccatctcctaaagtgtccgatactgtcgtagaaccctacaatgcaaccttgagcgtccaccagctagtagaaaataccgacgaaacctactgcatagataacgaggctctgtacgatatctgctttcgcacactgaaacttaccacgccaacctacggagacctgaaccacctcgtgtccgccactatgtccggggtcacaacttgcttgcgtttccctgggcaactcaacgccgatctgcggaaactcgccgttaacatggtacccttccctagacttcacttttttatgcctgggttcgcgcccctgaccagtcgcgggtctcaacagtaccgagccctgactgtgccggagctgacccaacaggttttcgacgctaaaaatatgatggctgcttgtgacccgcgccacggaaggtacctgacagtggccgctgtgttccgcggccggatgtccatgaaggaggtagacgagcagatgctcaatgttcagaataagaactctagctattttgtggagtggatcccgaataatgtcaaaactgcggtttgcgatatacctccaaggggtctgaagatggcagtgactttcatagggaactcaactgctatccaggagctgtttaaacgcatctccgaacagttcacagctatgttccgtaggaaggcatttctgcactggtatacaggagaaggtatggacgaaatggagtttacagaagctgaatccaacatgaatgatctagtcagcgaatatcagcagtaccaggacgcaacagccgaggaagaggaggattttggcgaagaggcagaggaagaagcgtag

SEQ ID NO: 111392 - DNA, 1119 bp, Artificial Sequence
  derived and/or modified sequence
atggatagtgtgcgtagcggaccctttggccagattttccgacccgacaactttgttttcggccagtctggggccggaaacaattgggcgaagggtcactacactgagggagcggagctggtagactcggtactcgatgtggtacggaaggaagccgagtcatgcgattgcctgcagggatttcagctgacacactccctaggtggcggaactggctcaggcatgggcaccctgttgattagcaaaatcagggaggagtacccagacagaattatgaacacattctcagtcgtgccttctccaaaggtgtcagatacagttgtggaaccatacaacgcgacactttcagtgcatcagctcgtggagaataccgatgagacttactgcatagacaatgaagctttgtacgatatttgtttcaggactctcaagcttaccacccccacctatggggatctaaaccatctggtgagcgccaccatgtcgggagtgaccacctgcctcagattccccggtcagttgaatgccgacttaagaaagctggctgtcaatatggtcccattccctcgtctgcacttttttatgcccgggtttgctccacttacatctagagggagtcagcaatatagagccttgacagtacccgagctgacacagcaggttttcgacgcaaaaaacatgatggcggcgtgcgaccccaggcatggcagatacttaacggtggcggccgtgtttcggggacgcatgagcatgaaagaagtcgacgagcaaatgctgaatgtccagaataaaaattcctcctatttcgttgagtggatcccaaacaatgtcaaaaccgccgtctgtgacataccaccaagaggcttgaaaatggccgtgactttcatcgggaatagcactgccatacaagagctttttaaacgcattagcgaacagtttaccgcgatgttcaggcgcaaggcatttcttcactggtacacaggggaaggcatggacgagatggagttcaccgaggcagagtccaacatgaacgacctggtaagtgagtaccagcagtatcaggacgccacggcagaagaagaagaggactttggcgaagaggctgaggaagaagcgtag

SEQ ID NO: 111393 - DNA, 1119 bp, Artificial Sequence
  derived and/or modified sequence
atggattctgtcagaagcggaccttttggacagatcttccgaccagataacttcgtgtttggacagagcggagcaggcaataattgggctaaaggacactacaccgaaggcgcagaactcgtcgacagcgtcctagacgtagtgcgcaaagaggctgaatcgtgcgactgtctgcaagggtttcagctgacacatagtctagggggtggaaccggctctggcatggggaccttgctcatcagtaagatacgggaagagtatccggacaggatcatgaataccttcagtgttgttccgagtccaaaagtttcagatacggtcgttgagccatacaatgccacgctgtccgtgcatcagttggtcgagaataccgatgaaacatactgtattgataacgaggcactctacgacatctgtttccgtactctcaagctgaccacaccaacatatggagaccttaatcacctggtgtcagctaccatgagtggggtaacgacctgtctgcgatttcctgggcagcttaatgcggacctgcgaaaacttgcagtcaatatggtgccgtttcctagattacacttctttatgccagggttcgcacctttgacatcacggggttcccagcagtaccgggccctgactgtcccagaactgacccagcaagtttttgacgctaagaacatgatggccgcttgtgaccccaggcatgggagatatcttaccgtcgccgccgtcttccggggtcgcatgtctatgaaggaggtggacgagcagatgttgaacgttcagaacaaaaacagcagttatttcgtggaatggattcccaataatgttaagaccgcagtttgtgatattccccccagaggtctgaaaatggctgttacatttattggtaattcaacagcaatccaagagctgttcaagcgtatcagcgaacagtttacagccatgttcagaaggaaagccttcctccactggtacacaggcgagggcatggatgagatggagtttaccgaagccgagtcaaacatgaacgaccttgtttccgagtaccaacagtaccaggacgccaccgcagaggaggaagaggatttcggcgaagaggcggaagaggaggcttag

SEQ ID NO: 111394 - DNA, 1119 bp, Artificial Sequence
  derived and/or modified sequence
atggatagcgtgaggagtggcccatttggacagatctttcgaccagataatttcgtcttcggccaatccggcgccgggaacaactgggccaaggggcattacacagaaggagctgaattggtcgactctgttctcgatgtagtgaggaaagaggcagaatcttgcgactgcctgcagggcttccaactgacacatagcttaggtggggggaccggcagcggtatgggaactttgctaattagcaagatccgtgaggagtatccagatagaattatgaatactttttccgtcgtgccctctccgaaagtgagcgacaccgtcgtagagccctacaatgcaaccctaagcgttcaccagctcgtggaaaatactgacgagacatactgcatcgataacgaggccctctatgatatttgcttccgcacacttaaactgaccacaccaacctacggtgatttaaatcacctggtgtctgctacaatgagtggggtgactacgtgtctccggttccccggtcagctgaatgctgacctgcggaaactcgcagtaaatatggtaccattcccacgcttacatttctttatgccgggctttgccccattgacaagcagaggttcacagcagtatcgagccctgacagtgcccgaacttacgcaacaggtctttgacgccaagaatatgatggcggcctgcgatccacgccacggtcgatacctgaccgtagccgccgtgttccggggtcggatgtctatgaaggaggtagacgagcagatgctgaatgtccagaacaagaactcctcttattttgttgagtggatccccaacaacgtgaagacagcggtttgcgatattccgcccaggggcctgaagatggctgtgaccttcattggaaatagcacagccattcaggaactgtttaaacggataagcgagcaattcacggccatgttcagacgcaaggcctttctccattggtacacaggcgagggcatggatgaaatggaatttactgaggccgaaagtaacatgaacgacttggtgagcgagtaccagcaataccaggacgccaccgccgaggaggaggaggactttggggaggaggcagaggaggaggcatag

SEQ ID NO: 111395 - DNA, 1119 bp, Artificial Sequence
  derived and/or modified sequence
atggatagcgtgaggtccggaccatttggccaaatctttcgccccgataattttgtgtttggccaatcgggggccggcaataactgggccaaggggcactacaccgagggagctgaactcgtggatagtgtgctcgacgtcgtgcgaaaagaggcggagtcatgcgattgtctacagggtttccagttgacccacagcctggggggcggcaccggctccggaatgggcaccctactgatctccaaaatccgggaagaatatccagacagaatcatgaataccttcagtgtggtgccttccccaaaggtgtctgacactgttgtcgagccctataatgcaacactcagtgtccaccagctcgttgagaatacagacgagacctattgcattgacaatgaagctctgtatgatatctgtttcaggactttaaaactgaccacacctacttacggggatctgaaccatctggtgtcagcgacaatgtcaggggtaacaacgtgtctgagattcccggggcagctaaacgccgacctgcggaagctggcggttaacatggtgccatttcctcggctccattttttcatgcccggtttcgctccactcactagtcgtggttctcaacagtaccgagccctgactgtccccgagctgactcagcaggtcttcgacgctaagaacatgatggccgcctgtgatcctcgacacggtcggtacctgaccgtcgcagcggttttccgcggccggatgagcatgaaggaagttgacgagcagatgctgaacgtacaaaacaagaatagtagctacttcgtcgagtggatcccaaataacgtgaagaccgccgtgtgtgatattccaccacggggtttgaagatggcagtaacatttatcgggaactccaccgctattcaggagctgttcaagagaataagcgaacagttcaccgctatgttcagacggaaagcattcttgcattggtacactggggagggaatggacgagatggagttcacggaggctgaatccaatatgaacgacctggtcagtgagtatcagcagtaccaggacgctaccgctgaagaagaggaagatttcggggaggaagcagaagaggaagcgtag

SEQ ID NO: 111396 - DNA, 1119 bp, Artificial Sequence
  derived and/or modified sequence
atggactcagtaaggagcggcccctttgggcagatcttcaggcctgataactttgtatttggccaatctggtgccggcaataactgggccaagggacattatacagagggcgcagagctggtggacagcgtgctcgatgtcgtcagaaaggaagccgagtcttgcgattgtttgcagggctttcagctgacacatagcttgggcggcgggacaggttctggaatgggcacccttttaataagcaaaatccgggaggaataccccgatcgaattatgaacacctttagcgtggtgccctctccaaaggtgtccgacactgtcgtcgagccatacaatgctacgctctcggttcaccagctcgtagagaatactgacgaaacttattgcatagacaatgaggcactctatgacatttgcttccgcaccctcaaactgactactcctacttacggagatctgaatcatctggtctctgccacgatgtccggcgtcacgacgtgccttaggttcccgggacaactgaacgcagatctaagaaagcttgccgtaaatatggtgccctttccaagactgcactttttcatgccaggattcgcaccactgacctctaggggttctcagcaatacagggcgctcaccgtgccagagttgacacaacaagtttttgatgcaaagaatatgatggccgcatgcgatcctcgccatgggcggtacctgaccgtggccgccgtcttcaggggtcggatgtccatgaaagaggtagacgagcagatgctgaacgtacagaacaagaactctagttatttcgtggaatggatcccaaacaacgtgaagaccgcagtatgtgatattcctcctcgcggcctgaagatggcagttacttttataggcaatagcactgcgatccaagaacttttcaagcgaatttcggagcagtttaccgccatgttcagaagaaaggcttttcttcattggtataccggcgaaggtatggacgaaatggagttcaccgaagcagaatccaacatgaacgacctagtctccgaataccagcagtaccaggatgcaactgcagaagaggaggaggatttcggagaggaagccgaggaagaggcttag

SEQ ID NO: 111397 - DNA, 1119 bp, Artificial Sequence
  derived and/or modified sequence
atggacagcgtgcgttcaggaccttttggccagatcttcaggcctgataatttcgtgtttgggcagtcaggcgctgggaataactgggcaaaggggcactacacggagggagctgagctagtcgattcagtcctcgatgtggtgcggaaagaagctgagtcttgcgactgtctgcaaggattccagctaacccactcactgggaggcggaactggtagcggaatgggaacgctgctcatcagcaagattagggaagaatatcccgacagaattatgaatactttctccgttgtaccttcacctaaggtttccgatacggtggtggagccttacaatgccaccctatccgttcaccaactcgtagagaacaccgatgagacgtattgcatcgataacgaagccctttacgatatttgcttccgaaccctaaagctaactacccccacctacggcgacttgaatcatctcgtgagcgccacgatgagcggagtgaccacctgtctgcggtttccaggccaactgaatgccgacttaagaaaactggccgtgaacatggtgccttttccccggctccacttctttatgcccggtttcgcccctctaacctccagaggatcacagcagtatagggcgctcacggtgccggagcttacacagcaggtcttcgacgctaaaaacatgatggccgcgtgtgacccccgacacggacgatacctgacagtggcggcagtcttcaggggccggatgagcatgaaagaggtcgatgagcagatgctgaacgtccagaataagaactcaagctattttgttgaatggattcctaacaacgtgaaaaccgcagtatgtgacattcctcctaggggactcaaaatggctgttactttcatcggaaacagtactgccattcaggagctgtttaagcggattagcgagcagtttactgcgatgtttcggcgcaaggcatttttgcattggtacacgggggagggtatggacgagatggagtttaccgaagcagaaagcaacatgaatgacctagtgtcagaatatcagcagtaccaagacgccaccgctgaggaagaagaggatttcggggaggaagccgaagaggaggcatag

SEQ ID NO: 111398 - DNA, 1119 bp, Artificial Sequence
  derived and/or modified sequence
atggactcagttcgtagtggaccattcggccaaatatttcgacccgacaacttcgtgttcggacagtccggcgcgggcaacaattgggctaagggacactatacagaaggagcagagttagtggactcagtcctggatgtggtgcggaaagaggctgaatcttgcgactgtctccagggcttccaactgacacattctcttggaggcgggaccggaagtggtatggggacactactcatctcaaaaatcagagaggaataccccgatcggattatgaataccttttcagtcgtgccctcacctaaagtgagcgacacagtggtcgaaccatataacgctacattgtctgtgcaccaacttgtggaaaataccgatgagacctactgcatcgacaacgaggccctctacgacatttgttttaggaccttgaagcttaccacacccacttacggtgacctcaatcatttggtgagcgctacaatgagtggtgtgacaacctgtctgaggttcccaggccaactgaatgctgatctccggaagctcgcggtgaacatggtgccatttcctcgcctgcacttttttatgcccggtttcgcccccctgacgtcccgcggcagccagcagtaccgggctcttacagtgccagagctgacccagcaagtgttcgatgccaagaatatgatggctgcatgcgaccctaggcacggcagatatctaactgttgcggctgtgtttagaggcagaatgtccatgaaagaagttgatgagcagatgctgaatgtccaaaacaagaacagcagctatttcgtggaatggattcctaacaatgtgaagactgccgtctgtgatatccctcccagaggtcttaaaatggccgtaactttcataggcaacagtacggctatccaagagttgttcaagagaatctctgagcagttcactgccatgtttcgcaggaaagccttcctgcactggtataccggagaaggaatggacgagatggagtttacagaagccgaatctaacatgaacgacctcgtgtctgagtatcagcaataccaagacgccaccgccgaagaagaggaagattttggtgaggaagccgaagaggaggcctag

SEQ ID NO: 111399 - DNA, 624 bp, Artificial Sequence
  derived and/or modified sequence
atgggtactctcctgataagtaagattagagaagagtatcctgaccgcatcatgaacactttttccgtggtcccctccccaaaggtgtctgataccgttgtggaaccctataatgccacattgagtgtgcaccagcttgtcgaaaatactgacgagacatactgcatcgacaacgaggcactttatgatatctgctttcggacactaaaactgactacccccacatatggggatctaaaccatctggtgtcggctaccatgtctggggtcaccacgtgtctaaggttccctgggcagctgaatgcagatcttagaaaacttgctgtgaacatggttcccttcccccgactgcactttttcatgcctggttttgccccactcaccagccgtgggtctcagcagtatcgtgcgcttaccgtgcctgaactgacccaacaggtatttgatgcaaaaaatatgatggcagcttgcgatccacgtcatggcaggtatctgacagttgccgccgtatttcgcggtcgtatgtcaatgaaggaggtggacgagcagatgctcaatgttcagaacaagaactcatcttactttgtggaatggccccagcagtgccaggattcgcgtctttag

SEQ ID NO: 111400 - DNA, 1062 bp, Artificial Sequence
  derived and/or modified sequence
atgcgggagatcgtacacatccaggcagggcagtgcggtaatcagatcggggctaaattctgggaggtcattagcgatgagcacggtattgatcccactggtacataccacggagacagcgatctccagctgacccatagcctcgggggaggtaccggctcaggcatgggcactctattgatctccaagatccgggaagaatatccagatagaatcatgaatacttttagcgtcgtccctagccccaaagtaagcgacaccgtagtcgagccttacaatgctacactgtcggtgcaccagctagtggagaataccgacgagacctactgcatcgataacgaggctctgtatgatatctgtttccggaccctgaaactcacaacacctacctatggcgaccttaatcacctggtgagtgctactatgtctggagtgaccacatgtctccgatttcccggccagctgaacgcggatctacgaaagctcgcggtaaatatggtgccatttccacggctccatttctttatgcccgggttcgctccactgacatcccggggtagtcagcagtacagggccctaaccgtaccagagctcacccaacaagtctttgacgcaaagaatatgatggcggcttgcgatcctagacacggccggtatctaacagttgccgccgtcttcaggggccgcatgtctatgaaggaggtagatgaacagatgctgaatgtgcagaataaaaattcctcctactttgttgaatggatcccaaataacgtgaagacagctgtttgtgatatccctccgcgcgggttgaagatggctgtgacattcatcggtaacagcacggccatccaggagcttttcaagagaatttcggagcagttcaccgcgatgttccgccggaaagcattccttcattggtacacgggagaggggatggacgagatggagttcacagaggcagaatccaacatgaacgaccttgtctccgaatatcagcagtaccaggacgccacagccgaagaggaagaagatttcggggaggaagccgaggaagaagcctag

SEQ ID NO: 111401 - DNA, 1062 bp, Artificial Sequence
  derived and/or modified sequence
atgcgcgagatcgtccacatccaggctggacaatgcggcaaccagatcggcgccaaattctgggaagtcatcagtgacgaacacggtatagatccaaccgggacatatcacggtgattctgatctgcagttgactcatagcctcggaggcggaacgggctccgggatgggaaccctgctcatttcgaagatacgggaagaatacccagataggataatgaatacattttccgtcgtgccaagtcctaaagtctccgacacagtagtagaaccctataatgccaccctgtccgtccaccagctggtcgaaaatacagacgagacttattgcatcgacaatgaagcgttgtacgacatttgcttccgaaccctgaagctcactacccccacatatggagacttaaatcatctcgtgtctgcgaccatgtctggagtgaccacttgcctgcgattccctgggcaactgaacgccgacctgcggaagctggccgtaaacatggtacccttcccaaggttgcatttttttatgcctggcttcgctccactaaccagtcgtgggtcccaacagtatcgcgcgctgacggtgcccgagcttacccagcaggtgtttgacgccaagaacatgatggccgcatgcgatcccaggcacggtagatatttgaccgtggctgcagtttttcgtgggaggatgagcatgaaagaagtcgacgaacagatgttgaacgtacagaacaagaattcatcctactttgtggaatggattcctaacaacgtcaagacagccgtgtgcgatatcccaccacgcggactgaaaatggccgtcacattcatcgggaactccactgcgattcaggaactgttcaagcgcatctctgagcagttcactgccatgtttcgcaggaaagcttttctgcattggtacacaggcgaaggaatggatgaaatggagttcaccgaagctgaaagcaacatgaacgacctggtgagcgagtatcagcagtatcaggatgctacggctgaagaggaagaagattttggagaagaagctgaagaggaagcctag

SEQ ID NO: 111402 - DNA, 1062 bp, Artificial Sequence
  derived and/or modified sequence
atgcgagagattgtgcacattcaggctggccagtgtggaaaccagattggggccaaattttgggaagtaatctccgatgaacacggcattgatcctacaggtacgtaccacggggactcagacctccagctgacccacagcctcggtggcggaacgggttccggcatggggactctcttgatttcaaagattcgcgaggaataccctgaccgcataatgaataccttttctgttgtccccagccccaaggtgagcgatacagtggtggaaccctacaacgccaccctgagcgtgcatcagcttgtcgagaacacagacgagacttattgtattgataatgaagccttatacgatatttgtttccggaccctcaaactgacaacccccacgtatggagacctgaatcacctggtgagtgccaccatgtctggggtgacgacctgcctgcggttccctggacagctcaatgcggatctacgaaaattggctgtgaatatggtccccttcccccggctgcacttcttcatgcccggattcgccccactgacttcacggggctcccagcagtaccgtgcactcacagtgccagagttgacgcagcaggtttttgatgctaagaatatgatggctgcatgtgacccccgccacgggagatatctgaccgtagccgcagttttccgtggaagaatgtctatgaaagaggtggatgagcagatgcttaacgtgcagaacaaaaactcctcctactttgtggaatggattccgaacaacgtgaagactgcagtttgtgacattccaccgagggggctaaaaatggcagtaactttcattggtaatagtacagcgattcaggagctgttcaagcggataagtgagcagttcaccgcaatgttccgcagaaaggcctttttgcactggtataccggcgagggcatggatgaaatggagtttacagaggctgagtccaatatgaacgacttagtctctgaatatcaacagtatcaggacgcaactgctgaggaagaggaggactttggtgaagaggccgaggaggaggcttag

SEQ ID NO: 111403 - DNA, 1062 bp, Artificial Sequence
  derived and/or modified sequence
atgcgcgagatcgtgcacattcaggccggccaatgcggtaatcagataggcgctaagttctgggaagtaatcagtgatgaacatgggatcgacccaacaggcacatatcacggtgacagtgacctccagttaacccatagcttaggaggaggcacaggctcaggtatgggcactcttctcatttcgaagatcagggaagaatacccagatcgaataatgaacactttttcagtggtccccagtcctaaagtctcagacacagtcgtggaaccttacaatgccacactgtcagtgcaccaacttgtggaaaacacggatgaaacctactgcattgacaacgaagctctgtatgacatttgctttcgaacactgaaactgaccacgcccacctatggggaccttaatcatctggtaagcgccaccatgtccggagttacgacctgcctcaggttccccggacagttaaacgctgacttaagaaaattggccgtaaatatggtgccgtttccaaggctgcatttctttatgccaggcttcgccccattaacttcaaggggatcgcaacaatatcgggcactaacggtgcctgagcttacccagcaagtcttcgatgcaaaaaatatgatggcggcctgtgatcctcgacatggccggtacctgactgttgctgccgtctttcgtggacggatgagtatgaaagaggtggatgaacaaatgttgaacgttcagaacaaaaattccagctacttcgtcgagtggattccaaacaacgtcaagaccgccgtctgcgatattccccctcggggcttgaagatggcggtgacattcatcgggaacagcactgcaatccaggaactgtttaagagaatttccgagcagttcacagcgatgtttcgcagaaaagcattcttgcactggtatacaggtgaaggaatggacgaaatggaatttactgaagccgaatctaacatgaacgacttagtgagcgagtaccagcaatatcaggacgccacagctgaggaagaagaggacttcggggaggaggccgaggaagaggcctag

SEQ ID NO: 111404 - DNA, 1062 bp, Artificial Sequence
  derived and/or modified sequence
atgcgggaaattgtccacatccaggccggccagtgtggaaaccagataggggccaagttttgggaggtcatctcagatgaacacggtatcgaccctacaggcacttaccacggcgacagcgatctccagttgactcattctttgggaggaggtacaggctccgggatgggaactttgctgatttccaaaattagagaagaatacccagatagaatcatgaatacattctctgttgtgccctctccgaaggtaagcgacactgtcgttgagccctacaacgctaccctctctgttcatcagttggtggaaaacaccgacgaaacgtactgcatcgacaacgaggccctgtatgacatttgctttcgcacattgaagctgaccactcccacttacggggatttgaatcacttggtgtccgccacaatgagcggggtcactacctgcctaaggtttcccggacagttaaacgccgatcttagaaaactagccgttaatatggtaccatttccgagacttcacttttttatgccaggctttgctccgttaacatccaggggctcacagcagtatcgtgcgctcacagtccctgaactaacccagcaagtattcgacgcaaagaatatgatggccgcttgtgaccccagacacggccgatacctcacggtggccgctgtgtttcgtgggaggatgtctatgaaggaggtcgatgaacagatgctgaacgtccagaataagaactcttcttattttgtcgaatggatcccgaacaatgtgaagacagccgtctgcgatatcccgccccggggacttaagatggcagtcaccttcattggaaactctaccgccatacaggaactttttaagaggatctcagagcagtttactgccatgttccgccggaaggcttttctgcattggtacacgggcgagggtatggacgaaatggagttcactgaagctgagtctaacatgaatgacctggtttcggagtaccaacagtatcaggatgccactgctgaagaagaagaggatttcggcgaggaggcagaggaggaggcttag

SEQ ID NO: 111405 - DNA, 1062 bp, Artificial Sequence
  derived and/or modified sequence
atgcgcgaaatcgtacacatacaggctggccagtgcggcaatcagatcggggcaaaattctgggaggtgattagtgatgagcatggcatcgatcccactggcacgtatcacggggacagtgatctccaactcacccatagtttagggggaggcacaggttctggtatgggtactttactcattagcaaaatcagagaggagtaccctgacaggataatgaatacgttctctgtagtcccgtctccaaaggtgagtgacacagtcgtcgaaccctataacgcaactctgtctgtccatcaactcgtggagaacacagatgagacctactgcatcgataatgaagccctgtatgatatctgcttcagaacgctgaaattgaccacccctacctatggtgacctgaatcacctggttagtgctacaatgtccggcgtcacaacctgcctcaggttcccgggtcagctgaatgccgatcttagaaagctggcagtgaacatggtgcccttcccccgactgcatttctttatgcctggattcgctccgcttacgagtaggggatctcagcagtaccgcgctctcactgtgcccgagctcacacagcaggtgtttgatgccaagaatatgatggctgcttgtgaccccagacacgggagatacctgacagtagccgctgtgtttagagggcgaatgtctatgaaggaggtggacgaacagatgctgaacgtacagaataagaacagtagctactttgtggagtggattcctaataacgtgaagaccgctgtgtgcgatatcccgcctcgcggactcaagatggcggtgacctttatcgggaactcaactgcaatacaggagttgttcaaacgaattagcgagcagttcacagccatgttcaggcgcaaagcgttcctgcattggtatactggggaagggatggacgagatggagttcacagaagccgagtccaacatgaacgatctggtgagtgagtaccagcaataccaagacgccacagccgaagaggaggaagacttcggagaggaggccgaagaggaggcttag

SEQ ID NO: 111406 - DNA, 1062 bp, Artificial Sequence
  derived and/or modified sequence
atgcgcgaaattgtgcatattcaggctggacaatgtggcaatcagataggcgctaagttctgggaggttataagcgatgaacatgggatcgatcccaccggtacttatcacggcgattccgacttacagctgacgcacagcctcggcggggggacaggatctggaatggggacccttcttattagcaagattcgtgaggagtatcccgaccgaatcatgaataccttttccgtcgtccctagccccaaggtgtctgataccgtcgtggagccctacaatgcaacgctttcggtgcatcaactcgttgaaaatacagacgaaacatattgcatagacaatgaggccctttatgatatttgttttcgcaccctgaaactgactacacccacatacggggatttgaatcacctggtgagtgcaaccatgtcaggtgtcacaacatgcctgcgattcccgggacagttgaatgccgatcttaggaagctcgcggtgaacatggtgcctttccccaggctgcatttctttatgcctggttttgctcctttaacttccagggggtcacagcagtatcgcgctctcacagtaccagaactgactcagcaagttttcgatgcaaaaaacatgatggcggcctgtgacccccgccatggtcggtacctgacagtagctgccgtcttccggggccggatgagtatgaaggaggtcgacgaacagatgctgaacgtgcagaataagaactcatcttactttgtggagtggatccccaacaacgttaaaaccgcggtttgtgacatcccaccacgcggtctgaaaatggccgtgacgtttattggtaattcaacagccatccaggagctgttcaagcgcatctctgagcaattcactgctatgtttcgaaggaaggctttcttgcattggtacacaggagagggtatggatgaaatggaattcactgaggcagaatccaacatgaacgatctggttagcgagtatcagcagtatcaagacgctaccgccgaggaagaggaggattttggagaggaagccgaggaagaggcctag

SEQ ID NO: 111407 - DNA, 1119 bp, Artificial Sequence
  derived and/or modified sequence
atggattctgtgcgcagcggccccttcggccagatcttccggccagacaactttgtgtttggccagagcggggccggcaacaactgggccaagggccactacacagaaggagctgagctggtggacagcgtgctggatgtggtgaggaaggaggccgagagctgtgactgcctgcagggcttccagctgacccacagcctgggcggcggcactggaagtggcatgggcaccctgctgatcagcaagatccgggaggagtacccagaccgcatcatgaacaccttctctgtggtgcccagccccaaggtgtctgacacagtggtggagccctacaatgccaccctgtctgtgcaccagctggtggagaacacagatgagacctactgcatcgacaatgaggccctgtatgacatctgcttccgcaccctgaagctgaccacccccacctacggggacctgaaccacctggtgtctgccaccatgtctggagtgaccacctgcctgcgcttccctggccagctgaatgctgacctgaggaagctggccgtgaacatggtgcccttcccccggctgcacttcttcatgcctggctttgcccccctgaccagccggggcagccagcagtaccgggccctgactgtgcctgagctgacccagcaggtgtttgatgccaagaacatgatggccgcctgtgaccccaggcatggccgctacctgactgtggccgctgtgttccggggccgcatgtccatgaaggaggtggatgagcagatgctgaatgtgcagaacaagaacagcagctactttgtggagtggatccccaacaacgtgaagacagctgtgtgtgacatccccccccggggcctgaagatggctgtgaccttcatcggcaacagcacagccatccaggagctgttcaagaggatcagcgagcagttcaccgccatgttccggaggaaggccttcctgcactggtacacaggagagggcatggatgagatggagttcacagaagctgagagcaacatgaatgacctggtgtctgagtaccagcagtaccaggatgccacagctgaggaggaggaggactttggagaggaggccgaggaggaggcctag

SEQ ID NO: 111408 - DNA, 1062 bp, Artificial Sequence
  derived and/or modified sequence
atgagggagatcgtgcacatccaggccggccagtgtggcaaccagatcggggccaagttctgggaggtgatcagtgatgagcacggcatcgaccccaccggcacctaccatggagacagcgacctgcagctgacccacagcctgggcggcggcaccggcagcggcatgggcaccctgctgatcagcaagatccgggaggagtacccagaccgcatcatgaacaccttctctgtggtgcccagccccaaggtgtctgacacagtggtggagccctacaatgccaccctgtctgtgcaccagctggtggagaacacagatgagacctactgcatcgacaatgaggccctgtatgacatctgcttccgcaccctgaagctgaccacccccacctatggagacctgaaccacctggtgtctgccaccatgtctggagtgaccacctgcctgcgcttccctggccagctgaatgctgacctgaggaagctggccgtgaacatggtgcccttcccccggctgcacttcttcatgcctggctttgcccccctgaccagccggggcagccagcagtaccgggccctgactgtgcctgagctgacccagcaggtgtttgatgccaagaacatgatggccgcctgtgaccccaggcatggccgctacctgactgtggccgctgtgttccggggccgcatgtccatgaaggaggtggatgagcagatgctgaatgtgcagaacaagaacagcagctactttgtggagtggatccccaacaacgtgaagacagctgtgtgtgacatccccccccggggcctgaagatggctgtgaccttcatcggcaacagcacagccatccaggagctgttcaagaggatcagcgagcagttcaccgccatgttccggaggaaggccttcctgcactggtacaccggggagggcatggatgagatggagttcacagaggccgagagcaacatgaatgacctggtgtctgagtaccagcagtaccaggatgccacagctgaggaggaggaggactttggagaggaggccgaggaggaggcctag

SEQ ID NO: 111409 - DNA, 624 bp, Artificial Sequence
  derived and/or modified sequence
atgggcaccctgctgatcagcaagatccgggaggagtacccagaccgcatcatgaacaccttctctgtggtgcccagccccaaggtgtctgacacagtggtggagccctacaatgccaccctgtctgtgcaccagctggtggagaacacagatgagacctactgcatcgacaatgaggccctgtatgacatctgcttccgcaccctgaagctgaccacccccacctacggggacctgaaccacctggtgtctgccaccatgtctggagtgaccacctgcctgcgcttccctggccagctgaatgctgacctgaggaagctggccgtgaacatggtgcccttcccccggctgcacttcttcatgcctggctttgcccccctgaccagccggggcagccagcagtaccgggccctgactgtgcctgagctgacccagcaggtgtttgatgccaagaacatgatggccgcctgtgaccccaggcatggccgctacctgactgtggccgctgtgttccggggccgcatgtccatgaaggaggtggatgagcagatgctgaatgtgcagaacaagaacagcagctactttgtggagtggccccagcagtgccaggacagccggctgtag

SEQ ID NO: 111410 - DNA, 1119 bp, Artificial Sequence
  derived and/or modified sequence
atggacagcgtgcggagcggccccttcggccagatcttccggcccgacaattttgttttcgggcagtcaggcgcgggaaacaactgggcaaaaggacactacacagagggtgcggaactggtggattccgtgcttgacgtggttaggaaagaagcagaatcttgtgactgcctgcaaggtttccagctcacacattcactcggcgggggaactgggagcggcatgggaactctcttgatttcaaagatccgggaggagtatccagatagaatcatgaatacattctcagtggttcctagccccaaagtgtctgacaccgttgtggaaccctacaacgcgaccctgtcggttcaccaactggttgaaaacactgacgaaacctactgcattgacaatgaggccctctatgatatctgcttccgtacgctgaagctaaccacccctacttatggtgatcttaaccacttggtaagcgctaccatgagtggtgtcacaacctgcctgcggttcccaggccagttgaacgccgatttaagaaagctggccgtcaatatggtcccctttcctaggctccacttcttcatgccaggattcgccccgctcacatcacgggggtctcagcaatatagagcgctcaccgttccggagctaacgcaacaggtgttcgatgccaagaatatgatggcggcttgcgatccccggcacggccgctatctcactgtcgcagctgtctttcgcggaaggatgagcatgaaagaggtggacgaacagatgctgaacgtccagaacaagaacagctcttacttcgtcgagtggattcctaataatgtcaaaaccgccgtctgcgatattccaccccgcgggttgaagatggccgtcacattcatcgggaactctacagctatacaagaactgtttaagcggatttctgaacagtttactgctatgttcagacggaaggccttccttcactggtacaccggcgaagggatggacgaaatggagttcacagaagcagaatctaacatgaacgatcttgtatccgagtaccagcagtatcaggacgcaaccgccgaggaggaggaagacttcggagaagaagccgaagaagaggcctag

SEQ ID NO: 111411 - DNA, 1119 bp, Artificial Sequence
  derived and/or modified sequence
atggacagcgtgcggagcggccccttcggccagatcttccggcccgacaactttgtgttcggccagagcggagcgggcaacaattgggcgaaggggcattatactgagggcgccgagcttgtggactcagtcctggacgtggttcgaaaggaggccgagtcgtgcgactgcctacagggcttccagttgacccacagcctgggtgggggaaccggaagcggcatgggtacactactgatttccaaaatcagagaggagtacccagatcgtataatgaatacattttccgtcgtaccttcccctaaggtgagcgatacagtagtggagccgtacaacgcaaccttgtcagtccaccagctagttgaaaatactgacgagacgtactgtatagataacgaggcactctatgacatctgtttccgaacgctcaaactgaccacaccgacctatggggacctgaatcatcttgtaagcgctactatgtcaggagttaccacatgtctgcggttccccggacagctgaatgccgatcttcgcaagctggccgtcaatatggttcccttcccccggctgcacttcttcatgcctggcttcgcccctctgactagccgggggagccagcagtatcgcgcactgacagtccctgagctgacacagcaagtgtttgacgcaaagaatatgatggctgcatgtgatcccaggcatggtcgctatctgactgtggcagcggtctttcgaggaaggatgtctatgaaagaggtggatgagcagatgctgaatgtgcagaacaagaattcctcgtatttcgttgagtggatacccaacaacgtcaaaaccgcagtgtgtgatatcccaccccggggactcaaaatggcagtgacatttatcggcaactctaccgccatccaggagttgttcaaacgtataagtgaacagtttaccgccatgtttagaaggaaagcctttctgcattggtatacaggtgaggggatggatgagatggagtttactgaagctgagtctaatatgaatgatctcgtgagcgagtaccagcaatatcaggatgccacggccgaagaggaagaagactttggtgaggaagccgaggaagaggcctag

SEQ ID NO: 111412 - DNA, 1119 bp, Artificial Sequence
  derived and/or modified sequence
atggacagcgtgcggagcggccccttcggccagatcttccggcccgataatttcgtctttggccaatcaggcgccggcaataattgggcaaaggggcactataccgagggagcagagctggtggattctgtgttggacgtggtacgcaaggaggcagagagttgcgattgcctgcagggatttcaattgactcacagtctgggagggggcactggatcaggcatgggcaccctgctcattagcaagatacgcgaggagtatcctgaccgaatcatgaacactttctctgttgtgcccagccccaaagttagcgacaccgtggtcgaaccctacaacgccacactgtctgtgcaccagctcgttgagaacactgacgagacgtactgcatagacaatgaagctctgtatgatatctgtttccgcaccctgaaactgacaaccccaacttatggcgacttaaaccacttggtgagtgccaccatgtctggcgtcactacatgtcttcggtttcctggacagctgaatgctgacttgcgaaagcttgcagtgaacatggtgcctttcccaaggcttcactttttcatgccagggttcgcaccgttaacttcaaggggatcccagcagtatagggctttaactgtcccagaactaacccagcaggtgttcgacgctaagaatatgatggctgcctgtgacccgaggcacggccggtatcttacagtggcggccgtgttccggggtaggatgtcgatgaaggaggtcgatgaacaaatgcttaatgtgcagaataaaaactcctcctactttgtggagtggatcccaaacaacgtgaaaacagccgtctgtgatatccctcctcggggcctaaaaatggcagtcacgttcatcggcaatagtacagccattcaggaactgtttaagagaatttctgaacagttcacagcaatgtttcggagaaaggcctttctgcattggtacactggagagggaatggatgagatggaattcactgaggctgaaagcaatatgaacgacctggtgtctgaatatcagcaataccaggacgctacagccgaggaggaagaggatttcggagaagaggccgaggaggaagcctag

SEQ ID NO: 111413 - DNA, 1119 bp, Artificial Sequence
  derived and/or modified sequence
atggacagcgtgcggagcggccccttcggccagatcttccggcccgataactttgtgttcggacaatctggagctgggaacaattgggctaaaggtcactatacggagggtgctgagctggtagactccgttctggacgtcgtgcgcaaggaggcagaaagctgcgactgcctccagggatttcagctgactcattctttaggagggggaacgggtagcggcatgggaaccctgttgattagtaagatccgtgaagagtatcccgataggataatgaacactttctctgtcgtacctagccccaaagtaagcgacacagtggtggagccatataatgcgaccctttccgtgcaccagttggtagagaacacagacgagacttattgtattgataacgaggcattatacgacatctgctttcggactctcaaactgacgactcccacttatggggacctgaaccacctggtgtccgccacaatgtccggtgtgacgacatgcctacggtttccgggacagctgaatgctgacctcaggaaactggccgtaaacatggtcccatttccacgactccacttttttatgcctggtttcgccccactgactagtagggggtcgcaacagtaccgtgccctgactgtgcctgagctgacccagcaggtgttcgatgcaaagaatatgatggccgcatgtgatccccgacacggccgatatctgacagtcgcagcggtgtttcgaggccggatgtccatgaaagaagtggatgaacagatgctgaatgtgcagaacaagaattcgtcatacttcgttgagtggataccgaacaacgtgaaaaccgccgtgtgcgatatacctcctagggggctgaaaatggccgtcacgttcataggaaactccactgccatacaggagttatttaaaagaattagcgagcaattcacagccatgttccgacgcaaagccttcctgcattggtacaccggggagggcatggacgagatggaatttacggaggctgaaagcaatatgaatgacctagtcagcgaataccagcagtaccaggatgcaactgcagaagaggaagaggattttggcgaggaagccgaagaggaagcctag

SEQ ID NO: 111414 - DNA, 1119 bp, Artificial Sequence
  derived and/or modified sequence
atggacagcgtgcggagcggccccttcggccagatcttccggcccgacaacttcgtttttggccagagcggtgctggaaacaattgggctaagggacattacaccgaaggagctgaattggtcgatagcgtcctggacgtcgtgcgtaaagaggcagagtcttgtgattgcctccagggctttcagctcacccactcattgggcggtggaactggcagcggtatgggcacactgttgatcagcaagatccgggaggagtaccccgataggataatgaatacctttagtgtggtgcccagccctaaagtgtccgatactgtagttgaaccctataacgcaacactcagtgtgcaccagctggtagagaacacagatgaaacatattgtattgataacgaagccctttacgatatctgttttcggacacttaaactcacaacgcccacttatggggatctcaaccacttagttagcgccactatgagcggcgttacaacatgtctgaggtttcccggccagttgaatgctgacctgaggaagcttgcagtcaatatggttcccttcccaaggctccacttctttatgccaggattcgcgcctctgacttccagagggagccagcaatatagggcgctgaccgtgcccgaactgacccagcaggtcttcgatgctaagaatatgatggctgcatgcgatccccgtcacggtcggtacctcacagtggccgccgtctttagggggaggatgtcaatgaaggaggttgatgagcagatgctcaacgtacagaacaagaactcaagctacttcgtagaatggataccaaataacgtcaaaacagccgtctgtgacattccccccaggggcttgaaaatggcagtaacattcataggcaacagcacagctattcaggagctcttcaaacgcatttccgagcagtttaccgccatgttccggcgcaaggcctttctccactggtatactggcgagggaatggacgagatggagttcactgaggcagagtccaatatgaacgacctggtcagtgaataccagcagtaccaggacgccacagcggaggaagaggaagatttcggagaggaagccgaggaggaggcctag

SEQ ID NO: 111415 - DNA, 1119 bp, Artificial Sequence
  derived and/or modified sequence
atggacagcgtgcggagcggccccttcggccagatcttccggcccgataactttgtgtttggtcagtcaggagccggtaataattgggctaaaggccattatactgagggcgccgaattagttgacagtgtgctggatgtagtcagaaaagaggcggagagctgcgattgtctgcaaggattccaactcacccattctctgggaggcggtacaggaagcgggatggggactctgctcattagtaagattcgcgaagaatatccagataggattatgaacacattttccgtggtcccttctcctaaagtgtcagataccgtagtcgaaccctataacgctacgttatccgtccaccagcttgtagaaaataccgatgagacttactgcatcgacaacgaagccctgtatgacatttgctttcgaactctgaaactgacaaccccgacgtatggcgatctcaatcacttggtctcggctactatgtccggagtgactacctgcttaagattccccggccagcttaacgctgatttacggaagttggcagtaaacatggtcccatttccaaggctgcatttcttcatgccgggcttcgccccactgaccagcaggggttctcagcagtacagggcactgactgtgcctgaattgacacaacaggttttcgacgcaaagaacatgatggccgcgtgcgacccaagacatggccgctacctgaccgtcgctgctgtgtttaggggtagaatgagcatgaaggaagtggatgaacagatgctgaacgtgcaaaacaaaaatagttcttacttcgtcgaatggattccgaataatgtgaaaaccgcagtgtgtgacattccaccacgcggactaaagatggcagtaacctttattggcaatagcaccgctattcaagagttattcaagagaatcagcgaacaattcactgcgatgttccgtaggaaagcctttctacattggtacactggggagggcatggacgaaatggaattcactgaggctgagagtaacatgaacgacctcgtgtctgagtatcagcaatatcaggatgcaaccgctgaggaagaggaagactttggtgaggaggccgaggaggaggcatag

SEQ ID NO: 111416 - DNA, 1062 bp, Artificial Sequence
  derived and/or modified sequence
atgcgggagatcgtgcacatccaggccggccagtgcggcaaccagatcggggccaagttctgggaggttattagcgatgagcacggaatcgaccctactgggacttatcacggggacagcgacctgcagctgacccacagcctcggcggtggcaccggttcaggcatggggacactcctgatcagtaagatccgtgaggaataccccgatagaattatgaatacattttcagttgtaccaagtcctaaggtctcagacacggtggtagaaccatataacgccactcttagtgtacatcaactcgttgaaaatacagacgaaacgtattgcatcgacaatgaggcactctacgacatttgttttaggacacttaaactcactacacccacttacggagatctcaatcatttggtttcagcaaccatgagcggagtgacgacatgcctgaggtttccgggacagttaaatgccgatcttcggaagttagccgtgaacatggtacctttccctcgattacatttcttcatgcctgggtttgctccccttacatctcgtgggagtcagcagtacagggccctgaccgtgcctgaattgactcagcaggtcttcgacgcaaagaacatgatggctgcctgcgaccctcggcatggccggtacctaaccgtcgccgccgtttttagaggtcgcatgtccatgaaggaggtggatgaacaaatgctcaacgtgcaaaacaagaatagttcctacttcgttgaatggataccaaacaatgtgaagacagccgtctgcgatattcccccgagggggttgaaaatggcggttacctttattggcaatagcacagcaatacaggagctttttaagcggatctctgagcagtttactgccatgttccggagaaaagctttccttcattggtacacgggggagggcatggatgaaatggagtttaccgaagcagaatccaacatgaacgacctcgtttcagagtatcagcagtaccaggatgccacagcagaggaagaggaggatttcggagaggaggctgaagaagaagcttag

SEQ ID NO: 111417 - DNA, 1119 bp, Artificial Sequence
  derived and/or modified sequence
atggacagcgtgcggagcggccccttcggccagatcttccggcccgacaacttcgtgttcggtcagtcaggagcaggtaataactgggcaaagggtcattatacagaaggagccgagctagtggatagtgtgctcgacgtagtaaggaaagaggctgagtcctgcgattgcctgcagggcttccagctcactcatagtctgggtggagggaccgggtcgggaatgggtacgctactgatttccaagatccgtgaggagtatcccgatcgaataatgaacacattcagcgttgttccatcccctaaggtttcggataccgtcgtggaaccgtataatgcgacgctgtcggtgcaccagctagtcgaaaacacagatgaaacatactgtatcgacaacgaggctttatacgacatatgcttcagaacactgaaattgacaaccccaacctatggggacctcaaccatctggtgtctgcaactatgtctggtgtgactacctgcctgagatttccaggacagctgaacgcagatcttaggaagctggcagtgaacatggtccctttcccacggctgcatttctttatgcctggattcgcacctttaacgagtcgaggctcacaacagtatagggccctgaccgtgccagaattgacccaacaggtgttcgacgcaaaaaatatgatggcagcctgcgaccccagacacggccgctatctgaccgtggcagccgtttttaggggccgaatgtcaatgaaagaggtggatgagcagatgctgaatgtccagaataagaactcctcatattttgtcgagtggatcccaaacaacgtgaaaacagcagtctgtgatatccctccaagaggcctgaaaatggccgtcacatttatcgggaacagtaccgctattcaggagctgtttaagcggatctcagaacagtttaccgcgatgtttcggagaaaggcatttctgcattggtacacgggcgaggggatggatgagatggagttcacggaggctgaatcaaacatgaacgacctcgtgtcagagtatcagcagtaccaggacgctaccgccgaggaagaagaagacttcggagaggaggctgaagaggaggcatag

SEQ ID NO: 111418 - DNA, 1119 bp, Artificial Sequence
  derived and/or modified sequence
atggacagcgtgcggagcggccccttcggccagatcttccggcccgacaacttcgtgtttggccaatcaggcgccggcaataattgggcgaagggacactacacagagggcgccgagttggtggattctgtgctggatgttgtgaggaaggaagccgaatcttgtgactgcctgcagggattccaattgacacacagcctggggggtgggacagggagtggtatgggcacccttctgatcagcaagattagagaggagtatcccgacagaatcatgaatacattttcagtggttccttcacccaaggtaagcgacaccgtggttgagccttataacgcaaccttgagcgtgcaccagctggtggagaatacggatgaaacatattgtatcgataacgaggcactctacgacatctgctttcgaaccttgaaactcaccaccccaacatacggcgatctgaatcacttggtcagcgccacgatgtccggcgtgacaacatgcctccgttttccaggccagcttaacgcagatctgaggaagcttgctgtaaatatggtgcctttcccaaggttacacttttttatgccgggcttcgcaccactcacgagccgggggtctcagcagtaccgggccctgacggtgcccgaactaacacagcaagttttcgacgctaagaatatgatggctgcctgtgatccacgtcacggacgatatctgacagtggccgctgtctttagggggaggatgtccatgaaagaagtggacgagcaaatgctgaacgtccagaataagaactcctcctatttcgtagagtggatcccaaacaacgtcaagaccgccgtatgtgatatacccccacggggcctgaaaatggcagtgacctttatcgggaacagcaccgccattcaggagctatttaaaagaataagcgaacagtttactgcgatgtttcgtaggaaagctttcctccattggtacaccggggaaggaatggatgaaatggagttcacagaagcagaatctaacatgaatgatttagtatcagaataccagcaatatcaggacgccacagcagaagaagaggaggactttggggaggaagctgaggaggaggcttag

SEQ ID NO: 111419 - DNA, 1119 bp, Artificial Sequence
  derived and/or modified sequence
atggacagcgtgcggagcggccccttcggccagatcttccggcccgataattttgtttttgggcagagcggagcagggaataattgggctaaaggacattataccgaaggcgcagaacttgtggactccgtgcttgacgtggtgcgaaaggaagccgagtcttgcgactgtttacagggattccagcttacccactcattggggggaggaactggcagcggaatgggaactctattgattagtaagattagggaggagtaccctgacaggataatgaatacgttttccgtggtgcccagccctaaagtgtccgacactgttgtggagccctacaatgctacattatccgtgcaccagttagtagagaacacagacgagacttattgtatagacaatgaggcgctatatgacatttgttttaggacacttaagctgacaaccccgacctacggtgacctgaatcatttggtgtctgcaacgatgtcaggagtaacaacgtgtttgagattccctggccagctcaacgccgaccttcgcaagctagccgtgaatatggtgccttttcctcggcttcactttttcatgcctggattcgcccctctgacctccaggggtagccagcagtatcgagcactgacagtgcccgagctgactcagcaggtcttcgacgcaaagaatatgatggctgcatgtgaccccagacacggccggtacctgacagtagctgcggtgttccgcggcagaatgtcaatgaaagaggttgacgaacagatgctgaacgtacagaacaaaaactcttcttactttgttgagtggataccaaacaatgttaagacggcggtgtgcgacatcccacccaggggcctcaaaatggcagttacctttattggcaactctacagccatccaggagctatttaaaaggatcagcgagcagtttaccgctatgttccgccggaaggccttccttcattggtacactggagaggggatggacgaaatggagttcacggaggctgagtctaacatgaatgatctggtgtctgagtaccagcaatatcaggatgccaccgcagaggaagaggaggacttcggggaggaggccgaggaggaagcgtag

SEQ ID NO: 111420 - DNA, 1119 bp, Artificial Sequence
  derived and/or modified sequence
atggacagcgtgcggagcggccccttcggccagatcttccggcccgataactttgtgttcgggcagtctggggccggtaacaactgggcaaaaggtcactacaccgagggagccgaactcgttgattccgttctcgacgtggtgaggaaagaagccgaaagctgcgactgcctccaggggttccagcttacccattccttgggaggaggaaccggaagcgggatgggcaccctgttaataagcaaaattcgggaagagtacccagacagaatcatgaacaccttcagcgtcgtcccctctcctaaagtcagtgatactgttgtggagccatacaacgctactttgtccgtgcatcagctagttgaaaatacagatgaaacatattgcatcgacaatgaagcgttatatgatatatgcttcaggacgctgaagcttaccaccccaacctatggtgacttgaaccacttagtgtccgctaccatgagcggggtcacaacgtgcctgagatttcctggccagctgaatgccgacctgaggaagctggccgtcaacatggtccctttccccagactgcattttttcatgcccggcttcgctcctctgaccagccgcgggtcccagcaatatagagccctgacagttccggagctgacgcagcaggtatttgatgccaagaatatgatggccgcttgcgatccgagacatggtagatacctcaccgtggccgctgtttttaggggtcgcatgagcatgaaggaagtggatgagcagatgctgaatgtgcagaacaaaaactcctcctattttgtagagtggatcccgaacaatgtgaaaacagctgtttgcgacatccccccccggggtctgaagatggccgtaacgtttatcggaaactccaccgctatccaggaactcttcaaacgcatttctgaacagttcacggctatgtttcgacggaaagcctttctccattggtacacgggcgagggtatggacgagatggaatttactgaagcagagtctaatatgaacgatttggtgagcgaatatcagcagtaccaggatgctacagcagaggaggaggaagattttggcgaagaggctgaggaggaagcttag

SEQ ID NO: 111421 - DNA, 1119 bp, Artificial Sequence
  derived and/or modified sequence
atggacagcgtgcggagcggccccttcggccagatcttccggcccgacaacttcgtctttggccaatctggtgccggaaataactgggctaagggtcactatactgagggagcggaattagtcgactcagtgctggatgtggtgcggaaggaagccgagtcttgtgattgcctccagggatttcagctaacccatagtctcggaggaggcactggatcagggatgggaaccctcctgatcagcaaaattcgcgaggagtatcccgaccggatcatgaacactttcagcgtcgtgccaagccccaaggtgtccgataccgttgttgaaccatataacgccaccttaagcgtacatcagctggtcgagaataccgatgaaacctactgtatcgataacgaagctctgtacgatatttgtttccggacgttgaagctaaccaccccgacatatggcgatctcaaccacctagtgagtgcgaccatgtcaggcgtcaccacctgcttacgttttcccggacagctgaacgcggacctgagaaaacttgcagtgaacatggttcccttcccaagattgcacttcttcatgcctggtttcgcccccttgacttcacgggggtcccagcaataccgggcattgaccgtgcctgagctaactcagcaggtgttcgacgccaaaaatatgatggctgcctgcgacccacgtcacggacgctatctgaccgtggcagcggtgtttagaggaagaatgtcgatgaaggaggttgacgagcagatgttaaacgtgcagaacaagaactcgtcatacttcgtggagtggatccccaacaacgtgaagacagctgtttgcgatataccacctcgggggttaaagatggccgtcaccttcatcggaaatagcactgccattcaggagttattcaagagaatcagcgagcagttcaccgccatgttccgccgcaaagccttcctgcactggtataccggcgagggcatggatgaaatggagttcacggaagcagagtcgaacatgaacgatctcgtgagtgaatatcaacagtaccaggatgctactgctgaagaagaggaagactttggcgaggaggctgaggaggaggcctag

SEQ ID NO: 111422 - DNA, 1119 bp, Artificial Sequence
  derived and/or modified sequence
atggacagcgtgcggagcggccccttcggccagatcttccggcccgacaatttcgtgtttggccagtcgggcgctgggaataattgggcaaaagggcactatacagagggagctgaacttgtcgattccgtgctcgacgtcgtgagaaaagaggccgagagctgtgattgcctgcagggtttccagcttacccacagtctgggaggagggaccggatctggtatgggtactctgttaatttctaaaatcagggaggagtatcctgacaggattatgaataccttttctgttgttccgtccccaaaggtaagcgataccgtggtagagccttacaatgcaactctttcggtccaccaactcgttgagaatacagacgagacatactgcatcgataatgaggctctatatgacatttgctttcggactttgaagctgactacgcctacatatggcgacttgaatcaccttgtgtctgctacaatgtctggggtgacaacctgcctgagatttcctggacagttgaatgccgaccttaggaaactggctgttaacatggtgccattccctcgcttgcatttcttcatgcctggattcgcccctctgacttcccgagggtctcaacagtacagggctttgacagtgccagaattgacacagcaggtgttcgacgccaaaaacatgatggccgcatgtgacccccggcatggcaggtatctgacagtggccgcagtctttaggggtagaatgtctatgaaggaagtggatgagcagatgctgaacgtccagaacaaaaactcctcctacttcgtggagtggattccaaataacgtgaaaacagccgtgtgcgatatccctccccgcggcctgaagatggcagtgactttcatcgggaacagtaccgccatccaggagctctttaagagaatttcagagcaatttacagccatgtttcgtcgaaaagccttcctgcactggtataccggggaaggcatggatgaaatggagtttactgaggctgagtccaacatgaacgatctggtctccgaatatcaacagtaccaggatgccaccgcggaagaggaggaagacttcggcgaagaggcagaagaagaagcatag

SEQ ID NO: 111423 - DNA, 1119 bp, Artificial Sequence
  derived and/or modified sequence
atggacagcgtgcggagcggccccttcggccagatcttccggcccgacaacttcgtctttggtcaatccggcgcaggaaataactgggccaaaggacactataccgaaggagcagagctcgtagacagcgtgctggacgtcgttcggaaggaagccgagtcttgtgattgcctgcagggctttcagctcacccatagccttggcggcggtacagggagcggcatgggtaccctgctaatctccaaaatacgggaggagtatcccgacaggatcatgaatacctttagtgtcgtgccaagccccaaggtatctgacacagtggtagaaccctacaatgcaactctttccgtgcaccagctggtggaaaacacggacgagacctattgtatcgacaacgaagcactgtacgatatctgttttaggactctcaagctcacaacgccaacttatggcgacctgaaccacctggtgagcgccactatgtccggcgtgacgacctgtctcagatttccgggccagctcaacgcggacttgagaaagctcgccgtaaatatggttccatttcctaggctgcacttcttcatgcctgggttcgcgccactcacttcacgcggctctcagcaataccgggcacttacagtcccagagctgactcagcaagtctttgatgcgaaaaacatgatggcggcctgtgatccccggcacgggcgatatctcaccgtggccgcggtctttagaggccgaatgagtatgaaagaggtcgacgagcagatgcttaacgtgcagaacaagaactcctcttatttcgtagagtggatccccaataatgtgaagactgccgtgtgtgacatcccaccgcgaggattaaagatggctgtgacatttatcgggaattctacagctatacaggaactgtttaaacgcatttccgagcaattcaccgccatgtttcgacggaaagctttccttcattggtatactggagaaggcatggacgagatggagtttacggaagctgagtcaaatatgaacgatctcgttagtgaatatcaacagtatcaggatgcaaccgccgaggaggaggaggattttggggaggaggctgaagaggaggcctag

SEQ ID NO: 111424 - DNA, 1119 bp, Artificial Sequence
  derived and/or modified sequence
atggacagcgtgcggagcggccccttcggccagatcttccggcccgacaacttcgtctttgggcagtctggcgcagggaacaattgggcaaagggtcattacacagagggggctgaactggttgactcggtactagacgtagtgcggaaagaggcagagagctgcgactgcctgcagggatttcagctcacacacagccttggggggggaactggctccggcatggggacactcctgataagcaagatccgtgaagaatacccagatagaatcatgaacaccttcagcgtggtcccgagcccaaaggtgagcgacaccgtggtggaaccatataatgcgaccctgagcgtgcatcaactcgtagaaaacaccgacgaaacatactgtattgacaacgaagcattgtatgatatctgttttaggactctcaagctcacaacccctacatatggggatctcaaccatctggtatcagccactatgtctggggtgacgacttgcctccggttccccggacagttgaacgccgacctgcggaaactggcagtcaacatggtgccttttccacggcttcacttttttatgcccgggtttgccccgctcacttctcgcggtagccagcaatatagggccctgaccgtgcctgagcttactcagcaagtcttcgacgccaagaacatgatggctgcatgcgatccccgacatggtcgatacctgactgttgccgcagtgtttaggggtcggatgtccatgaaggaggtggatgagcagatgttgaacgtccagaacaagaatagcagctactttgtggagtggattcccaataacgtcaagactgctgtttgcgacatccctccccgtgggctgaaaatggccgttaccttcatcggaaactccacagcaattcaagagctttttaaaaggataagcgagcaattcactgcgatgttccgccgcaaagcctttctccattggtacacaggcgaggggatggatgaaatggagttcacagaagcagaaagcaatatgaatgacttggtatcggagtatcaacagtatcaagacgccacagctgaagaggaggaagattttggtgaggaggcagaagaggaagcatag

SEQ ID NO: 111425 - DNA, 1119 bp, Artificial Sequence
  derived and/or modified sequence
atggacagcgtgcggagcggccccttcggccagatcttccggcccgataacttcgtgttcggacagtcaggcgcagggaacaattgggccaagggtcactataccgaaggggccgaattggtggacagtgtcctggatgtggtccgcaaggaggcagagtcttgcgattgccttcaaggtttccagctgacacactcactaggaggaggcacaggaagcggcatggggaccctacttatatccaagatccgggaggagtatcctgaccggattatgaatacattcagcgtggtcccatcacctaaggtcagcgatacagtagtcgaaccctataacgccacactcagtgtccatcagctcgtcgaaaacacggatgagacctactgtattgataacgaggcactctatgatatatgcttccggaccctgaaactgacgacccccacctatggcgatctcaaccacctggtaagtgccacaatgtctggagtgactacatgcctccggtttcccgggcagctgaatgctgatcttcggaagctggctgttaacatggtacctttccccaggctgcacttctttatgcccggctttgcgcccctcacatctcggggatctcagcagtacagggcattgactgttccggagctgacccaacaggtctttgatgccaagaatatgatggctgcctgcgatccaagacacggccgctatctgaccgtcgccgccgtctttagaggtcggatgtccatgaaggaagtagatgagcagatgctaaatgtgcagaataagaactccagctacttcgtcgaatggattcctaacaatgttaaaactgcggtgtgcgatatccctcctagggggttgaagatggcggtcaccttcatcggaaactcaactgctatacaggagcttttcaagcgaattagtgagcagttcactgccatgtttaggaggaaggcatttctgcactggtacacaggtgagggaatggatgaaatggagttcacagaagctgaatccaacatgaacgatttggttagcgagtaccagcagtaccaggatgcaaccgcagaggaggaggaggactttggcgaagaggctgaagaagaggcgtag

SEQ ID NO: 111426 - DNA, 1119 bp, Artificial Sequence
  derived and/or modified sequence
atggacagcgtgcggagcggccccttcggccagatcttccggcccgataactttgttttcgggcagagtggagctggcaacaattgggcaaaaggccactacactgaaggcgccgaactggtggactcagttctggacgtggtccgaaaagaggccgagtcatgtgattgcctacagggttttcagctgacacattctctggggggcggtaccggtagcggcatggggacacttctcatttctaagattagagaggaatatccagataggattatgaataccttctccgtcgtgccgagccccaaggtctcagacaccgttgtcgagccttacaatgcaacgctgtccgtgcatcagctcgttgaaaacacagatgagacctactgcatcgataacgaagcgctgtacgacatctgtttccggacgttgaagctgaccacccctacctacggcgatctcaatcacctggtgagcgccaccatgtctggcgtgactacatgcctaagatttcctggccagcttaacgcagaccttcgtaagcttgccgtcaatatggtgccattcccccgccttcacttcttcatgccggggtttgcccccctgacatccagagggtcacaacagtaccgcgcattgacggtcccagaacttacccagcaggtgttcgacgccaaaaatatgatggctgcttgcgacccccgccatggccggtatctgaccgtcgcagctgtgttccggggacgcatgtctatgaaggaggtggacgagcaaatgctgaatgtacagaacaaaaattcttcgtacttcgtggagtggattccaaacaacgtcaagaccgctgtgtgtgacattccaccgagaggtctgaaaatggctgttacctttatcgggaacagcaccgcaatccaggaactgttcaaaagaatcagcgagcagttcacagcgatgtttagacgtaaagctttcctgcattggtacaccggcgaaggcatggacgaaatggaatttaccgaggcagagtccaatatgaacgaccttgtctccgagtaccagcagtaccaggacgctaccgctgaggaggaagaggactttggggaggaagctgaggaggaagcatag

SEQ ID NO: 111427 - DNA, 624 bp, Artificial Sequence
  derived and/or modified sequence
atgggcaccctgctgatcagcaagatccgggaggagtaccccgacaggatcatgaacacattctcagtcgtgccaagtccgaaggtgagtgacactgtggtcgagccatacaacgcaacattgtctgtgcaccagctcgtcgagaataccgatgaaacgtactgcatcgataatgaggccctctatgatatttgttttcggacccttaaactgaccaccccaacctacggagatctaaatcacctcgtgagcgcaactatgtcaggcgtgactacctgcctacgtttccccgggcagcttaacgcagaccttaggaagctagctgtgaatatggtgcccttcccacgcttgcacttcttcatgcccggctttgctcctttaactagtaggggaagccagcaataccgagctctgaccgtgcccgaattgactcagcaggtgtttgacgcaaagaacatgatggctgcatgtgacccaaggcacggacggtatctgacagtcgccgcggtcttcagaggcaggatgtccatgaaggaagtcgacgagcagatgttgaatgtccagaataagaattcatcctactttgtggagtggcctcagcagtgtcaggactcccgcctctag

SEQ ID NO: 111428 - DNA, 1062 bp, Artificial Sequence
  derived and/or modified sequence
atgcgggagatcgtgcacatccaggccggccagtgcggcaaccagattggcgcaaaattctgggaggtcataagcgatgagcatggaattgatccaacagggacttaccacggggacagcgatctacagcttacacacagtctcgggggaggaacaggcagtggaatgggtacattgttaatctccaaaattcgcgaggagtaccccgatagaattatgaatactttttccgtggtcccatcaccaaaagtaagcgacaccgtcgttgagccttataacgcaaccctttccgtccatcaactcgtggagaacacagacgagacttactgtattgataacgaggcactatacgacatctgtttcagaacactgaagttaaccactcccacttacggcgacctgaaccatctcgtctcagctactatgtctggtgtgactacctgtctccgattccccggacaactgaacgccgatttgcgtaaattggcagttaacatggtaccgtttcctaggcttcacttttttatgcccggatttgcgccactaacaagccgggggtcgcagcagtatcgagcactcaccgtgcccgagctgacccaacaggtctttgacgctaagaacatgatggcagcatgtgaccccaggcacggacgttacctcactgttgcagctgtgttcaggggcaggatgtctatgaaggaggttgacgagcagatgttgaacgtccagaacaaaaattctagttattttgttgaatggattcccaataatgtgaagaccgcagtgtgtgacatccctccaaggggcctcaagatggccgtgacctttattggcaactctactgctatccaggaactcttcaaaagaatttctgaacaatttaccgccatgttcaggcgaaaagcgtttctacattggtatacgggcgaagggatggatgagatggaattcacggaggccgaatctaacatgaacgatcttgttagcgaataccagcagtaccaagacgccaccgcagaggaggaggaggattttggtgaggaggctgaagaagaggcctag

SEQ ID NO: 111429 - DNA, 1062 bp, Artificial Sequence
  derived and/or modified sequence
atgcgggagatcgtgcacatccaggccggccagtgcggcaaccagatcggggcgaaattctgggaggtgatctcggatgagcatggaatagatcctacgggaacttatcatggtgattccgatctccaattgactcactcgttaggcggggggacaggatccgggatgggcactctcctgatatcaaaaatacgggaggaataccccgaccggataatgaacaccttctccgtcgtccccagccctaaagtttccgacacagtcgtcgagccctataacgccacgctaagcgtgcaccaactcgtggagaacacagacgagacttactgcatcgacaacgaagccctctacgacatttgcttcagaacgttgaagcttactacacctacgtacggcgatctcaatcacctagtcagtgccacaatgagcggcgttactacctgtctgcggttccctggccagctaaacgctgacctgcggaagctggcagtgaacatggtgccttttccccgtctccatttttttatgccgggctttgccccgcttacctcacgggggagccagcagtaccgggccctgacggtgcccgagctcacccaacaagtgttcgacgcaaaaaatatgatggcagcctgtgatccaagacatggcaggtacttaaccgtcgccgcagtgtttcgggggcgcatgtctatgaaagaggtagacgaacagatgctaaacgtgcaaaacaagaactcgtcatattttgttgagtggattccgaacaatgttaaaaccgcggtgtgcgacatcccccctcggggcctcaaaatggctgtcacgttcattgggaactccactgccatccaggagctattcaagcggatttctgaacagttcacagctatgttccggcggaaagctttcctgcattggtatacgggcgaggggatggacgagatggaattcactgaggccgaatccaacatgaatgatttggtcagtgaatatcaacaataccaagacgccaccgctgaggaagaggaggactttggggaggaggccgaggaggaggcctag

SEQ ID NO: 111430 - DNA, 1062 bp, Artificial Sequence
  derived and/or modified sequence
atgcgggagatcgtgcacatccaggccggccagtgcggcaaccagatcggagctaagttctgggaggttatctccgatgagcatggcatcgacccaaccggcacatatcacggagatagtgatctgcaactgactcactcattgggtggaggaacaggaagcggcatggggacactgctcatcagtaaaatccgtgaggagtatccggaccgcattatgaataccttctccgttgtgccgtcccctaaagtgagcgacactgtagtagagccctacaatgccaccctgagtgtccatcaactcgttgagaatacggacgaaacctattgcatcgacaacgaggctctgtacgatatttgctttagaacattgaaactaacaacccccacatacggggatctcaaccatcttgtgtccgcgactatgtctggggtcaccacttgtctccggtttccgggacaactgaacgccgatctgaggaagttggctgtcaatatggttccattcccaagactacacttttttatgcccgggtttgcgcctctgacaagtcggggatcccaacaatatagagcacttactgtgccggaactgacacaacaggtgttcgacgcgaaaaacatgatggcagcttgtgatcccagacatggcagataccttacggtcgccgcggtgttccgaggcagaatgagtatgaaggaagttgatgaacagatgctgaatgtacagaacaaaaattcttcttactttgtggagtggatcccaaataacgtgaaaactgccgtgtgcgatattcctcctagaggactgaaaatggctgtaacattcatcggcaactccaccgccatccaggagttgtttaagcgcatttcggagcagtttacggctatgttccgcagaaaggcgttccttcactggtataccggtgaaggaatggatgaaatggagtttactgaagcagagtctaatatgaacgacctggtgtcggagtatcaacagtaccaggatgcgactgcagaagaggaagaagacttcggcgaggaggccgaagaggaggcatag

SEQ ID NO: 111431 - DNA, 1062 bp, Artificial Sequence
  derived and/or modified sequence
atgcgggagatcgtgcacatccaggccggccagtgcggcaaccagatcggggccaagttttgggaggtgataagcgacgagcacgggatcgacccaacgggtacataccacggggatagcgatttacagcttacccattctttaggaggaggaacgggctctgggatggggacgctcctgattagcaaaattcgcgaggagtacccagatcgaatcatgaatacatttagtgtggtgcccagccccaaagtgtctgacacagtggtggaaccttataacgctactctatctgtccaccagctcgtggagaacacagatgaaacctattgtatcgacaacgaggccttgtatgacatctgcttcaggaccttgaagttaacaactcccacctacggtgacttgaaccacttagttagcgcaacaatgtctggggtgacaacatgcctgcggtttcctgggcagctgaacgccgacctgcggaaactggctgtcaatatggtgcctttcccccggctgcattttttcatgccaggctttgcccccttaacctcccgaggttcacagcagtaccgggcgttaaccgttcccgaactgacccagcaggtattcgacgctaaaaatatgatggctgcctgcgacccgcgccacgggagatatttaactgtcgccgccgtattccgaggaagaatgtccatgaaagaggtggacgaacagatgctgaacgtgcagaataaaaactcgtcctacttcgtggaatggatccctaataatgttaagaccgctgtctgcgacatcccaccaaggggcctgaaaatggccgtcacattcatcggtaattctaccgctattcaggagcttttcaagagaatcagtgaacagttcactgccatgttccgtcggaaggctttcctacattggtacaccggggagggcatggacgagatggagtttacagaggccgagtcaaacatgaacgacttggtatccgagtatcagcagtaccaggatgccaccgccgaagaagaggaggactttggcgaggaggccgaggaggaagcatag

SEQ ID NO: 111432 - DNA, 1062 bp, Artificial Sequence
  derived and/or modified sequence
atgcgggagatcgtgcacatccaggccggccagtgcggcaaccagataggcgccaagttttgggaggtgatcagcgatgaacacggcatcgatcctaccggcacctaccacggcgattcagacctccagctcactcattcacttggcggtggaaccggcagcgggatgggtaccctgctcattagtaaaatacgtgaggagtatcccgatagaataatgaacaccttctctgtggttccaagcccgaaggtgtccgataccgtcgtggaaccctataacgctactctctcagtacaccagctggttgagaacaccgacgagacttactgtattgataatgaagccctgtatgacatctgtttccgcacactgaaactcacaaccccaacatatggtgacctgaatcacctggtttccgccaccatgtcaggagtgacaacatgcctgagatttcccgggcagctgaacgctgacctccgtaaattggccgtaaacatggttccctttcccagattgcactttttcatgcccggttttgccccgctaacttcccgtgggagtcaacagtaccgcgccctcactgtgccagagctcacccagcaggtctttgacgccaagaacatgatggctgcttgcgacccccgccacggaagatacctaaccgtggcagctgtgttccgaggtaggatgtctatgaaggaggttgacgagcagatgctgaatgttcagaacaagaacagtagctattttgtagagtggattcccaataacgtcaaaactgccgtctgcgacatccctcccagaggattgaaaatggccgtcacattcatcgggaatagtactgccattcaagagttgttcaagcgaatcagcgaacagtttacagccatgtttagacgtaaagcatttcttcattggtataccggagagggaatggatgaaatggagtttactgaagctgagtcaaatatgaacgacctggtgagtgaatatcaacagtatcaagacgcaacagccgaggaagaggaggatttcggggaggaggccgaagaggaggcatag

SEQ ID NO: 111433 - DNA, 1062 bp, Artificial Sequence
  derived and/or modified sequence
atgcgggagatcgtgcacatccaggccggccagtgcggcaaccagattggagccaaattttgggaggtgatcagtgatgaacatggaattgatcccaccggaacttatcacggggatagcgatcttcagctgacccactccctgggcggagggactggttcgggcatgggaacgcttctcatatctaaaatccgagaggagtatcctgatagaattatgaacaccttttcggttgtgccaagcccgaaagtctcagataccgtggtcgaaccatacaacgccaccctttccgtacaccagctggttgaaaacaccgatgagacatactgtattgataatgaggcattgtacgacatttgcttcaggacccttaaactaactacaccaacgtatggtgacctgaaccaccttgtgagcgccacaatgtcaggcgtcaccacttgtctgagattccctggacagctcaacgccgaccttcgaaagctcgccgtaaacatggtgccgttccctcgtctgcactttttcatgcctggttttgcaccgctgacctcaagagggagtcagcaatacagagcactgactgtgcctgagctgactcagcaggtatttgatgctaagaatatgatggccgcttgcgatcccaggcatggcagataccttacggtggctgctgtattcagagggaggatgagtatgaaagaagtggacgagcagatgttgaacgtacaaaataagaactctagttattttgttgaatggattccaaacaatgtgaaaacagccgtctgcgacatccctcccagaggtttgaaaatggccgtcacgtttataggtaacagcaccgccatccaggagctctttaagaggatctccgaacagttcacagccatgttcaggcggaaggccttcctccactggtatactggggagggtatggatgaaatggagttcacagaggcggagtctaacatgaatgacctggtaagcgagtaccaacagtatcaagacgccacagcagaggaggaggaggactttggggaggaagccgaggaagaagcctag

SEQ ID NO: 111434 - DNA, 1062 bp, Artificial Sequence
  derived and/or modified sequence
atgcgggagatcgtgcacatccaggccggccagtgcggcaaccagattggagctaagttctgggaggtgatatcggacgagcatgggattgaccccacgggaacttaccacggcgactccgatttacagctgactcattcccttggcggaggtacaggctcaggcatgggaaccctattgatctcaaaaatccgagaagagtatcctgacaggattatgaacacattctctgtggtcccctctcctaaggtgtcagatactgtggttgaaccttacaacgctacactctctgtgcatcagctggtcgaaaacacggatgaaacttactgtatcgacaatgaggccctgtacgacatctgcttccgtaccctgaagttgactacacctacctatggagatctgaatcacctggtctctgcaaccatgagtggcgttaccacatgcctaagatttccgggccaactgaatgccgatcttaggaagctggccgttaacatggtgcccttccctagacttcattttttcatgccggggttcgcaccccttaccagtagaggctcgcagcagtaccgagcacttacagttcccgaacttactcagcaggttttcgacgcaaaaaatatgatggcggcttgcgatccaaggcatggtcgctatcttacggtggccgctgtgtttagaggccgaatgtctatgaaagaggtcgatgagcagatgttaaacgtccagaataaaaattcctcctatttcgtagaatggatcccaaataatgtgaagactgcggtgtgcgacattcccccaaggggcctgaaaatggccgtgacctttattgggaatagtaccgcaatccaagaattgttcaagagaatctcagagcagtttacagctatgttcagacggaaggcctttctgcattggtacactggagaggggatggacgagatggagttcactgaggctgaatccaacatgaatgacctcgtgagtgaatatcagcagtatcaagacgctactgctgaggaggaagaagatttcggtgaggaagccgaggaagaggcctag

SEQ ID NO: 111435 - DNA, 1119 bp, Artificial Sequence
  derived and/or modified sequence
atggactcagtgcgatcagggcctttcgggcaaattttccgacccgataacttcgtttttggccagtcaggagctgggaacaactgggcaaaaggtcactacacagagggggcagagttggtagacagtgttctcgacgttgtcagaaaagaagctgagagctgtgattgtctgcagggctttcagctgacccattcactgggcggaggcaccggatccggcatgggaaccctcttgatctccaagattcgagaggagtatcccgaccgaatcatgaacacatttagcgtggtcccctcacccaaggtaagcgacactgttgtcgaaccatataatgctaccctctccgtgcatcagttggtcgagaatacggacgagacttactgtatcgataacgaagccctatatgacatatgctttagaacgctgaagcttacaactcctacctacggggacctgaatcacctggtgtccgcgactatgagcggcgtcacaacgtgccttcgatttcctgggcagttaaacgcggaccttcggaaactggccgtaaacatggtgcccttccccaggcttcatttcttcatgccaggatttgccccacttacaagccggggttcccagcagtaccgcgctctaacagtgcccgagttaacccagcaggtgttcgacgctaagaacatgatggcagcatgtgaccccaggcatggccgatacctcaccgtggctgctgtattcaggggaagaatgagcatgaaggaggtggacgagcagatgttgaatgtgcaaaataagaactcttcctatttcgtcgagtggatccccaataatgtaaaaaccgctgtttgcgacattcctccgagggggctgaagatggcggtgacgttcattgggaacagtactgcaattcaagaacttttcaagcgtattagtgagcagtttactgccatgtttagaaggaaggcctttctacattggtatacaggggagggaatggacgagatggaattcacagaggccgaaagcaatatgaatgacctggtgtctgaataccagcagtatcaagatgccacagctgaagaggaggaggatttcggggaggaggccgaagaggaggcttag

SEQ ID NO: 111436 - DNA, 1119 bp, Artificial Sequence
  derived and/or modified sequence
atggattcagtgcgaagtggcccattcggacagattttccggcctgataactttgtgttcgggcaaagtggcgcagggaataactgggccaagggccactacacagagggggctgagctggtggactcagtcctcgatgtcgtgagaaaggaggctgagtcttgtgactgtctgcagggttttcagctgactcactccctggggggagggaccggtagtggcatgggtactctcttgatctcaaagatcagagaggaataccccgaccggatcatgaacacctttagcgttgtgccgtctccaaaagtaagcgacacagttgtcgaaccatataacgccacactcagcgtgcatcagttagtggagaataccgacgaaacttactgcattgataatgaagccctttatgacatttgcttcagaaccctgaagctcaccacaccaacttacggggatctcaatcacctggtgagcgcaactatgtcaggagtcactacctgcctgaggtttccgggtcagctgaatgctgatctgaggaagctcgccgtgaatatggtgccctttccccgattacactttttcatgccagggttcgcacccttaacctcgaggggctctcagcagtatcgggcactgactgtccccgaacttactcagcaagtatttgacgctaaaaatatgatggctgcctgtgacccacgtcatggtaggtacttgaccgtggcagccgtgttccgaggccgtatgtctatgaaagaagtggacgaacaaatgctaaatgttcaaaacaaaaattccagctactttgtcgagtggattcctaataacgttaagactgctgtgtgtgatattcccccaagaggtctgaagatggccgtgacatttatcggtaactcaacggctatacaggaactcttcaagcggatctcagaacaattcactgccatgtttagacgtaaagcctttttgcactggtacaccggcgagggcatggacgagatggagttcaccgaagcggagtccaacatgaacgacctggttagcgagtaccaacagtatcaggatgcaacagccgaagaggaagaagatttcggtgaagaggcagaggaagaggcttag

SEQ ID NO: 111437 - DNA, 1119 bp, Artificial Sequence
  derived and/or modified sequence
atggattcggtgaggtccgggcctttcggccaaattttcaggccggataatttcgtttttggtcaatctggcgctggcaataactgggccaaaggccattacactgagggggcagagctggtcgactctgtgttagatgtcgttagaaaggaagccgaatcttgtgactgtcttcaaggtttccagctcacgcacagcctgggcggtggcacgggctctggaatgggaactctgctcatcagcaaaattcgggaggagtatccagataggataatgaatacattctcggttgtgccttcccccaaggtgtcagatacagtggtggagccttacaatgcaaccttgtccgtacaccaactcgttgaaaacacagatgaaacgtactgcatcgataacgaggccctgtacgacatttgcttccgcactctgaagctgactacacccacttatggcgacctcaaccatttggtttcggcaaccatgtccggagtcaccacgtgtctgcgatttcccggtcaactcaacgccgatctgcgaaagttggctgtaaacatggtgccgtttccccgtctgcacttctttatgccagggttcgccccactgacttcaaggggctcccaacaatacagggctcttactgtcccagagctgacacagcaggtgttcgacgctaagaacatgatggccgcatgcgacccaaggcacggtcgatacctgacagtggcggctgttttccgcggaagaatgagtatgaaggaagtggacgaacagatgcttaatgttcagaacaagaatagctcttattttgtcgagtggattcccaacaacgtgaagaccgcagtgtgtgatatccctccaaggggcctcaagatggcggtgacatttattggaaattcaactgcaatccaagagctgtttaaaaggattagcgaacagttcacggccatgttcaggcgaaaggcctttttgcactggtacactggagaagggatggatgagatggaatttactgaggcagagtccaatatgaacgatctggtctccgagtaccaacagtaccaggatgctacagcagaagaagaggaagacttcggagaagaggctgaggaggaggcctag

SEQ ID NO: 111438 - DNA, 1119 bp, Artificial Sequence
  derived and/or modified sequence
atggacagcgtgcgaagcggtcccttcggacagatttttaggccagacaacttcgtgttcggccagtcgggggctggcaacaactgggctaaggggcactacaccgagggcgcagagctggtcgactccgtgctggacgtcgtccggaaggaggccgaaagctgtgactgccttcaaggatttcagttgacccacagtttgggcggtgggactggttccgggatgggaaccctcctgattagtaaaatccgggaggagtacccggatcgcattatgaacacattcagcgtcgtgcccagccctaaagtcagtgatactgtcgtcgagccatacaacgcaaccttgtccgtgcatcagctggtggaaaatactgacgagacttattgcattgataacgaggctctttatgacatctgctttcgcactttgaaactcactactccgacatatggtgatctgaatcatctggttagcgccacaatgtcaggagttaccacttgtctgagattcccaggacagctgaacgctgacctccgtaagctcgcagtgaatatggtcccttttccacgcttacactttttcatgcccggattcgctcctctcacctcacggggatcacagcagtatcgggctctgaccgtgcctgagctgacacagcaagtgtttgatgcaaaaaatatgatggctgcttgtgacccacgacatggacgctacctgaccgtagccgctgtgtttcggggtcggatgtctatgaaggaggtggatgaacagatgctcaacgtgcagaataagaattcgtcctacttcgtggagtggattccaaacaacgtgaaaaccgccgtgtgtgacataccgcctcgtgggctcaagatggctgtgacctttatcgggaactccactgcaatccaggagctcttcaaaagaatttcagagcaatttaccgcgatgtttcggaggaaggccttcttacattggtacaccggggaaggtatggatgagatggagttcactgaagccgagagtaatatgaacgatctggtgagcgaatatcagcaatatcaagacgcaacagctgaagaggaggaggatttcggggaggaggccgaggaggaggcgtag

SEQ ID NO: 111439 - DNA, 1119 bp, Artificial Sequence
  derived and/or modified sequence
atggactctgtgagatctggaccttttggccagatcttccgcccagataatttcgtgttcggacagagcggtgcaggcaataactgggctaagggccattatactgagggcgcagaattggtggactcagtgctggatgtggtgcgcaaggaagcagaaagttgcgattgtctgcaaggatttcagttaacccatagcctgggcggtggtacaggttctgggatgggcacgctgttaattagcaagatccgggaagaatacccggaccggataatgaatactttctccgtcgtcccctcccctaaagtttctgacacagtggtggaaccgtataacgcaactctatcagtccatcagttagtggaaaacactgatgaaacatactgcattgacaacgaggcactgtatgacatatgttttcgaacactgaaactgaccacgccgacatatggcgatctgaaccacctcgtatcagccaccatgagcggtgtgactacctgtctaaggttcccaggtcagctaaatgccgatcttcggaagctagctgtaaatatggtgccatttccacgcctgcatttcttcatgcctggtttcgcccctcttacaagccggggatctcagcaatacagggctttaactgtccccgaactcactcagcaggtgtttgacgccaagaacatgatggcagcatgcgatccgaggcacggcagatacctcaccgtggcagcagtctttagggggcgaatgtctatgaaggaagtggacgaacagatgctgaacgtgcagaacaagaatagcagttattttgtagaatggatcccaaataacgttaagaccgccgtttgcgacattcccccaaggggactgaaaatggccgttactttcatcggaaattcgaccgctattcaggaattattcaagaggatttccgaacagttcacggcaatgttccgtagaaaggcattcttgcactggtacactggggagggcatggatgagatggagttcaccgaagctgaatcaaacatgaacgacttggtaagcgagtatcaacagtatcaggacgctacggccgaggaggaagaggacttcggagaagaagcagaggaagaagcatag

SEQ ID NO: 111440 - DNA, 1119 bp, Artificial Sequence
  derived and/or modified sequence
atggattctgtccgctcagggccatttgggcagatattcagacccgataacttcgtattcgggcaatccggtgcagggaacaactgggcaaagggacactatactgagggcgcagaactggtcgactccgtgctggatgtcgtgcgcaaagaggctgaatcctgcgactgtctgcagggctttcagctgacacattccctggggggtggcacaggctctggtatgggaaccttgttgatcagcaaaatccgggaagagtatcccgatcgcatcatgaataccttcagcgttgtgccctctccgaaagttagcgacacggtcgtggagccatataatgctacactgagcgtgcaccaactggtcgagaataccgatgaaacatattgcattgataatgaagccctctatgatatctgttttcgaactttgaagctgacgactcccacttatggcgatctgaatcacttggtgagcgctactatgagtggcgtgacaacctgcctgagatttcctggccagttgaacgccgatctccgtaagctggcagtgaacatggtgcccttccctcgcctgcacttttttatgccaggctttgcacctctgacgtccagggggtcccagcagtaccgcgctctgaccgtcccagagctgacacagcaagtgtttgacgccaagaacatgatggccgcttgtgaccctcgacatggtaggtacttgactgtggccgcagtgtttaggggcaggatgtccatgaaggaggtagatgagcagatgctcaatgtgcagaataaaaactccagctactttgtggaatggatacctaataacgtgaagaccgcggtttgtgacatcccaccccgtggactcaagatggccgtaacgtttatcgggaattctactgcgatccaagagctgttcaaacggattagtgaacagttcacagccatgtttcgaagaaaggcattcctacattggtatactggagagggaatggacgaaatggagtttactgaagccgaatccaatatgaacgatttggtgtcggagtatcagcagtatcaagatgcgaccgcggaggaagaagaggacttcggcgaggaagcagaagaagaggcttag

SEQ ID NO: 111441 - DNA, 1062 bp, Artificial Sequence
  derived and/or modified sequence
atgcgggaaattgtccatatacaagctggccagtgcgggaaccagattggtgccaagttttgggaggtgatttcagacgagcatggcattgatcccactggcacctaccacggcgattccgacctgcagcttacacatagtctggggggtggcaccggcagcggtatggggaccctgttgatcagcaagattagggaggaatacccggacaggattatgaatactttcagcgttgtgcccagcccaaaggtatctgacaccgttgtggaaccctataacgcgacgctctcggtccaccagctcgtggaaaatacagacgaaacctattgtattgacaacgaggcactatacgatatttgctttcgtacactcaaactcactacgcctacatatggggatctcaatcacctggtgtccgccaccatgtctggggtgacaacatgcttgagattcccagggcaattgaacgctgatttgcggaaactggctgtgaacatggttcctttcccacgtctgcatttttttatgccagggttcgcccctctgacgtctcgtggttcacagcaatatcgcgcacttaccgtccctgagctgacacagcaggtgttcgatgctaaaaatatgatggccgcttgcgatccacgccacgggagatacctgaccgttgctgccgtgtttaggggcagaatgtccatgaaggaggtcgatgagcagatgctgaatgtgcaaaacaagaattcgagttatttcgtggagtggatccctaacaacgtaaagacagcagtgtgcgacatccccccacggggtctaaagatggcagtgaccttcatagggaattccacggctattcaggagctgttcaaacgcattagcgagcaatttaccgccatgttccgaagaaaggcctttctccattggtataccggtgaggggatggacgaaatggagttcaccgaggccgagtctaacatgaatgacctcgtttcggagtaccagcagtaccaagacgcaacggctgaggaagaggaggatttcggggaggaggctgaggaagaggcctag

SEQ ID NO: 111442 - DNA, 1119 bp, Artificial Sequence
  derived and/or modified sequence
atggacagtgtgcgcagtggacctttcgggcaaatctttcgtccagataattttgttttcgggcagagcggagccggtaataattgggcaaagggccattatactgaaggggcagagctggttgacagtgtcctggacgtcgttcgaaaagaggcagaatcttgtgattgcctccaaggatttcaattgactcatagcctgggcggtggcacagggtctggtatgggtactctgctcatatctaagattcgcgaggaataccccgacaggatcatgaatactttcagcgtggtaccgagtcccaaggtgtccgatactgtggttgaaccctacaacgccaccctgtccgtgcatcagctggtagaaaacaccgacgagacttattgcatagataatgaagctctctatgacatatgcttccgcaccctaaagctgacaacacccacctacggagatctgaaccacctggtatccgccactatgagcggcgttactacctgtttacgctttcctggccaactaaacgccgaccttcggaaattggcagtaaacatggtaccattcccacggcttcacttcttcatgccaggtttcgcccctcttacctctcgcggaagtcaacagtatcgggctctgaccgttccagaactcacccagcaggtgttcgacgctaagaacatgatggcagcatgtgatccgaggcacggtagatacttaaccgtcgcagctgtcttcaggggaaggatgagtatgaaagaggtggacgagcaaatgctgaatgtgcagaacaagaattcttcatatttcgtggagtggattcccaataatgtgaagactgccgtttgcgacatacctccacggggtctgaaaatggctgtgacctttataggcaattcaacagcaattcaggagttattcaaacgaatttccgagcagttcacggctatgtttcgacgaaaagcatttctccactggtacacgggcgaaggaatggacgagatggagtttactgaagccgagtccaacatgaatgaccttgtcagcgagtatcaacagtaccaggacgccactgccgaggaggaggaggatttcggcgaggaggcagaggaagaggcttag

SEQ ID NO: 111443 - DNA, 1119 bp, Artificial Sequence
  derived and/or modified sequence
atggatagcgtgaggtcaggccctttcgggcagatcttccggcctgataactttgtgtttgggcagagtggggctggcaataactgggcaaaggggcactatacagaaggcgctgaacttgtggattctgttctggacgttgttcgcaaggaagctgagtcttgtgattgcctgcagggatttcagctcacacactctctagggggtggtacgggaagcgggatgggaaccctgctgatttcaaaaattagggaggaatatcctgacaggattatgaacactttttccgtcgtgccttcgcccaaagtgagtgacaccgtcgtggagccttacaatgcaacgttatcagtgcaccagctggtggagaacaccgacgagacctattgcatcgacaacgaagcattatacgacatctgcttccgaaccttgaaactgactactcctacatacggtgatctcaaccacctggtttccgcaacaatgagtggagtgaccacgtgtttgcgtttccccggtcagttgaacgcggacttaaggaaactggctgtgaacatggttccgtttccacgcctacactttttcatgcctggattcgcaccattaacttctcggggatcacagcagtatagagctttaaccgtgcctgaactgacacagcaagtgttcgatgccaagaacatgatggcggcttgtgatccgcgtcatggccgatacttgacagttgcagccgtgttcaggggaagaatgtccatgaaggaagtggatgaacagatgctgaacgttcagaacaaaaacagctcttacttcgtggagtggatacctaataatgtgaaaactgcagtttgcgacattccgcctaggggattgaagatggctgtgactttcattggcaatagtaccgcgatccaggagctgtttaagaggatcagtgaacagttcaccgctatgtttagaaggaaggccttcctgcattggtatacgggtgaaggaatggacgagatggaatttactgaagctgaaagtaacatgaatgatttggtttcagaataccagcagtaccaggacgccacagcagaagaagaagaggacttcggagaggaagccgaggaggaggcttag

SEQ ID NO: 111444 - DNA, 1119 bp, Artificial Sequence
  derived and/or modified sequence
atggattctgtgagaagcggacctttcggccagattttccggccagataactttgttttcgggcaaagcggcgctgggaataactgggctaaaggccactacaccgaaggcgctgagctggtggacagcgtcttggatgtggttcggaaggaggccgagtcctgtgattgtctgcaaggcttccaattaacccactcactcgggggaggaacagggtcaggtatggggaccctgttgatctctaagattcgtgaagagtaccccgaccgcatcatgaacactttctcagttgtgcccagcccaaaggtttccgacactgtggttgagccctacaacgctacactcagcgtccatcagctcgtcgaaaacactgatgagacctactgtatcgataacgaagctctctacgatatctgcttcagaactctcaagcttactacaccaacatacggagacctcaaccatttagtctccgctacaatgtctggagtgacaacatgcctgcgcttccctggccaactgaatgcagaccttaggaaactcgccgtgaacatggtgcctttccctcgccttcatttcttcatgcctggcttcgctccactcaccagccggggaagtcaacagtatagagcactgacggttcctgagctcactcaacaagtttttgacgcaaaaaatatgatggcagcctgcgatccaagacacggtcgttaccttaccgtcgcagctgtcttcagaggtcggatgtctatgaaagaagtcgatgagcagatgttgaatgtccagaacaaaaacagctcatactttgtcgagtggatcccaaataacgtgaagaccgccgtttgtgacatccccccaaggggcctgaaaatggccgtgaccttcatcggtaattccaccgcaattcaggaacttttcaaacgcattagtgaacagttcactgccatgtttagacgaaaggcctttctgcactggtataccggcgagggcatggatgagatggagttcacagaggcagagtcaaatatgaacgatctcgtctccgaatatcagcagtaccaagacgccaccgcagaagaagaggaggatttcggggaggaggcggaagaagaggcgtag

SEQ ID NO: 111445 - DNA, 1119 bp, Artificial Sequence
  derived and/or modified sequence
atggacagtgttcgatccgggccttttgggcagatttttagacccgacaactttgtcttcggtcagtcaggcgctggtaataactgggctaagggacattacactgagggagcggagcttgtcgactcggttctcgacgtggtcagaaaagaggccgagagctgcgattgcctgcagggtttccaactgacccactccctgggcggaggaactggctctggcatgggaacgcttctcatctctaagatcagggaggagtacccagacagaatcatgaataccttctccgtagtgccctctcccaaggtgtcggatacagtcgtggagccatacaacgctacactgtcagtccatcagctcgttgagaataccgatgagacatactgtatcgataatgaggcactgtacgatatctgcttcaggaccctgaagctgactacgccaacatatggggacctgaatcatctcgtctccgctactatgagtggtgtcaccacctgcttgcgctttcccggtcagctgaatgctgatctgagaaagttagcggtgaacatggtgcctttccctagattgcacttttttatgcccggattcgcacccttgacctctcgcggttcacagcagtaccgggctctgaccgtgccggagctgacacagcaggtcttcgacgctaagaacatgatggcagcatgtgacccgaggcatgggaggtaccttaccgttgctgccgttttccgtggcagaatgtctatgaaagaagtagatgagcagatgttgaacgtacagaacaaaaattctagctacttcgtggagtggatcccaaacaacgttaagacagcagtgtgcgatattccaccaagaggattaaagatggctgtgacttttattggcaactccacagcaattcaagagctcttcaagcgcatctccgagcagtttaccgccatgtttaggagaaaggctttcttgcactggtatacaggagaaggaatggacgagatggaatttactgaggccgaatccaatatgaatgatctggtgtcagagtaccagcagtaccaagacgctaccgcggaggaagaggaagactttggagaagaggccgaggaggaggcatag

SEQ ID NO: 111446 - DNA, 1119 bp, Artificial Sequence
  derived and/or modified sequence
atggatagtgttcgaagtggtccgtttggacagatttttaggcctgacaacttcgtctttggccagtctggcgcagggaacaactgggccaagggtcactacactgagggtgcagagctcgtggacagtgtcttagatgtcgtccggaaggaagcagaatcctgcgattgccttcaggggttccagcttacccatagtctgggtgggggaactggctctggaatgggtactctgcttatttctaaaattagggaggagtaccctgaccgcattatgaacaccttctccgtggttccgtcccccaaggtctccgacaccgtggttgagccttacaacgctactttgtcagtgcaccagctggttgagaataccgacgaaacctattgtatagacaacgaggcattgtatgatatctgttttcgcacactcaaactgactactcctacatatggtgacctcaatcacctggtgtccgccacaatgagtggcgtgacaacctgcttgagatttccgggacaactcaacgccgacctgaggaagctagcagtgaacatggttcctttcccaagattgcatttctttatgccgggttttgccccactgaccagtcgcggatcgcagcagtacagggcactgacagttcccgagctaacccagcaagtgtttgatgcaaagaatatgatggcggcatgcgaccccaggcatgggagataccttactgtggctgctgtatttagaggtagaatgtcgatgaaggaagtggatgagcagatgctcaacgtccagaacaaaaacagctcatacttcgtagagtggattccaaacaacgtgaaaacagccgtctgcgatatcccccctcggggtttaaaaatggctgtgacattcattggcaacagcacagcaatccaagaactgttcaagcgtattagcgagcagttcacagccatgttcaggcgtaaagcttttctgcattggtatacaggagagggaatggatgagatggaatttactgaagccgagtccaacatgaacgatcttgtgagcgagtaccagcagtaccaagatgccacagccgaagaggaagaagacttcggagaggaagcagaagaggaggcttag

SEQ ID NO: 111447 - DNA, 1119 bp, Artificial Sequence
  derived and/or modified sequence
atggacagcgtgaggtccgggccttttggacaaatttttaggcctgataacttcgtcttcggccagtcaggtgccggtaacaactgggctaaaggtcactatacagagggcgcagagttggttgattccgttctggacgttgtgcgaaaggaagccgaatcctgtgactgcttacagggcttccagctcacacatagccttggcggtgggacaggaagcgggatgggaactcttctgatttccaagatacgtgaggaatatcccgacagaatcatgaatacttttagcgttgtgccatcaccgaaggtgagcgacacagtggtagagccatacaatgccaccctgagtgtgcaccagctggtcgaaaacactgatgaaacctactgcatagacaacgaggctttatatgatatatgcttccgcactctcaaattaaccacgcctacttatggggacctgaaccatcttgtgtctgcgacgatgagcggagttaccacctgcctgcgtttccccggtcagctgaacgccgatcttcgaaagcttgctgtgaatatggttcctttcccgcgtctgcatttctttatgcccggtttcgcccctctgacctcccggggaagtcaacagtaccgagcattaactgtcccggaattaacccagcaggtgttcgatgccaaaaatatgatggctgcttgtgatcctaggcatgggaggtacttaacggtggcggcagttttccgcggaaggatgtccatgaaagaagtggatgagcagatgttaaatgttcagaataagaacagttcttatttcgttgagtggattccgaacaacgttaagaccgcggtttgtgatattcctccgagaggcctgaagatggccgtgacattcatcggcaactcgaccgctatacaagagctgttcaagaggatcagcgagcagtttaccgctatgtttagacggaaagccttcttgcactggtacaccggggaagggatggatgagatggagttcacagaggcggagagcaacatgaatgatttagtatccgaataccagcagtatcaggatgcaacggccgaggaagaagaagacttcggagaagaagcagaagaggaggcgtag

SEQ ID NO: 111448 - DNA, 1119 bp, Artificial Sequence
  derived and/or modified sequence
atggattccgttcgatcgggaccattcggccagattttcaggcccgacaattttgtttttgggcagtcaggcgcagggaacaattgggctaagggtcactataccgaaggcgcagagctggtggacagtgtgctggacgtggtacggaaggaggctgagtcctgcgattgtttgcagggattccagctgacccacagtctaggcggtgggacggggagtggcatgggaacactactgatcagtaagattcgggaggaatatcccgacagaatcatgaacacctttagcgtggtgcctagtcccaaggttagtgacacggtagtagagccgtataatgctacactgtctgtccaccagcttgtcgagaacactgacgaaacatattgtattgataatgaagctctgtacgatatttgcttccgcactcttaaactgaccacccccacttacggagaccttaatcacctggtctcagcaaccatgagcggagttaccacatgcctccgtttccccggacagttaaatgccgacctgcgaaagctggctgttaacatggtgcctttcccacgcttgcatttctttatgccagggttcgcacctctgacttcccggggaagtcagcagtatcgggctctgaccgtcccggagttgactcagcaggtgtttgatgccaaaaatatgatggcagcatgtgacccccgacacgggcgttacctcacagtcgctgctgtgtttaggggtaggatgtccatgaaggaggtggatgaacaaatgttgaatgttcagaacaaaaacagctcctacttcgttgagtggataccaaacaacgtgaaaaccgcagtatgtgacatccctccaagagggctgaaaatggcagtcacctttatcggcaatagcaccgccatccaggagctcttcaagcgcataagcgaacagttcacggcaatgttccggagaaaggcttttctgcactggtacactggcgagggtatggatgagatggagttcactgaggccgagtctaatatgaacgacctggtttccgaatatcaacagtaccaggatgcaaccgcggaagaagaggaagactttggagaagaggcggaggaggaggcctag

SEQ ID NO: 111449 - DNA, 1119 bp, Artificial Sequence
  derived and/or modified sequence
atggattcggtgcggtccgggcctttcggtcagatctttcgccctgacaacttcgtgttcgggcagtccggcgctggaaacaactgggctaagggccattatacagagggagcagagttggtcgactccgtcctggacgtggtccggaaggaggctgaaagctgcgattgtttacaggggtttcagcttacccattcccttggaggcggaacaggcagtggaatgggtacacttctgattagcaagatcagagaagaatacccagatcgaataatgaacacatttagtgttgtgccttcaccaaaggtctctgatacagttgttgagccctacaatgctacattaagtgtccaccagttagtggaaaacaccgacgagacttactgtatcgacaatgaagctctgtacgatatttgtttcaggacactcaagctgactactcctacctatggcgacctcaaccatctggtcagcgcaacaatgagcggagtcacaacctgcttacgcttcccgggacagctgaatgcagacctaagaaagctggctgtgaacatggtgccgttcccaagactgcacttctttatgccgggtttcgccccactcacctctcggggttcccaacagtacagggccctgacggtgcccgagctgacacagcaggtcttcgacgctaagaatatgatggcggcttgtgacccccgtcatggacgatacctgactgtggctgcagtgttccggggaagaatgagtatgaaagaagtggatgagcagatgttgaatgtccagaataaaaattctagctactttgtggaatggatccccaataacgtgaagacagctgtgtgtgatattcccccaaggggcctgaaaatggctgtgacttttattggtaactccactgccatccaggaattattcaagagaatatcagaacagtttaccgctatgttccgacgcaaggccttccttcactggtacaccggagaaggcatggatgaaatggagttcacagaggcagaatcaaacatgaacgatctggttagtgagtatcagcagtaccaggatgctaccgccgaagaggaggaagattttggtgaagaagctgaggaggaggcttag

SEQ ID NO: 111450 - DNA, 1119 bp, Artificial Sequence
  derived and/or modified sequence
atggacagcgttcggagtggtccgttcgggcagatctttcgccctgataattttgtattcgggcagtccggagccggaaacaactgggcgaaaggacactataccgagggcgctgagcttgtggactctgtcctggatgtggtgcgtaaggaagccgaatcttgtgattgcctgcagggctttcagctcacacactccctcggaggtggcacaggtagcggtatgggaaccttactaatttctaagatacgggaggagtaccctgatagaataatgaataccttcagcgtcgtgcccagtccaaaggtgtccgacactgtcgtggagccttacaacgctacactatccgttcatcagttagtcgagaatacagacgagacatattgcattgataatgaggcgctttatgatatttgctttcggacactgaagctgactacccctacctacggagatctaaaccacctggtgtcagccactatgagcggcgtgaccacatgcctgcgatttcccggtcagctgaacgctgacttaaggaaactggcagtgaacatggtgccattcccacgattgcatttctttatgccgggattcgctcctttaacaagccgtggaagtcagcagtatagagcacttaccgtaccggaactcacacagcaagttttcgatgccaagaacatgatggccgcttgcgacccccgacacgggagatacctcactgtggcggcagtcttcagaggtagaatgtctatgaaagaggtggatgaacagatgctgaacgtacaaaacaaaaacagctcatacttcgtcgagtggattcccaacaatgttaaaaccgctgtttgtgacatacctcctcgaggattgaagatggccgtgacctttatcgggaattctaccgcaattcaggagctgttcaaacggatctcagagcagttcactgcaatgtttcggagaaaagctttcttgcactggtataccggtgaaggcatggacgagatggaatttacagaagccgaaagcaacatgaacgaccttgtcagcgaataccagcagtatcaagacgcgactgctgaggaagaggaggacttcggagaagaagccgaagaagaagcctag

SEQ ID NO: 111451 - DNA, 1119 bp, Artificial Sequence
  derived and/or modified sequence
atggattctgtcaggtcagggccattcggacaaatcttccgcccagataattttgtgttcggacagagcggcgctggcaacaattgggcgaagggacattacaccgagggagctgagttagtggattcagtcctggacgtcgtacgcaaggaggcagaaagctgcgactgtctgcagggcttccagctcacccattccctaggcggaggaacaggttctgggatggggactttgttgatctccaagatcagggaagagtaccccgatagaatcatgaacactttctcggtggtgccctctcctaaggtcagcgataccgtggttgaaccttataatgccaccctgtccgtccatcagctcgtggagaacaccgatgagacatactgcattgacaatgaggccctctacgatatctgtttccggacactcaaattaactactcccacttacggagacttgaaccacctggttagcgctacaatgtccggggttaccacgtgtctgcgattcccaggacagctgaacgcagatctgcggaaactcgcagtcaacatggtgccgtttcccaggttacacttttttatgccaggatttgccccattgacatctcggggaagccagcagtatagggcactaacagtcccggaactgacgcagcaggtattcgacgccaagaatatgatggctgcttgcgatcccagacatggcagatatctgaccgtcgctgctgtattccgaggtcggatgagcatgaaggaggtcgacgagcagatgctgaacgttcaaaataaaaatagttcatactttgtagagtggatcccaaacaacgtaaaaacagcagtttgcgatataccaccgaggggcctcaagatggccgtaacttttattggcaacagcactgccatccaggagctcttcaagaggatttccgaacagtttactgcgatgtttcgccgaaaggcgttcctgcattggtacaccggtgagggcatggatgagatggagttcaccgaagcagagtctaatatgaacgacctggtaagtgagtaccaacagtatcaggatgctactgctgaagaagaggaggacttcggcgaagaggccgaagaggaagcctag

SEQ ID NO: 111452 - DNA, 624 bp, Artificial Sequence
  derived and/or modified sequence
atgggcacactgctcatatccaaaatccgcgaagaatatccggatcgcattatgaatacattttcagtggttccatcgccaaaggtcagtgacacagtcgtggagccgtataatgctacgctctcagttcatcagctggtggaaaataccgatgaaacttactgcattgacaacgaggccctatacgacatctgcttcaggacactaaaattgaccactccaacttacggcgacttgaaccaccttgtcagtgccaccatgagtggcgtgacaacgtgcctgaggttccctgggcagctgaatgccgacctgagaaagttggctgtgaacatggtgccgttcccacgccttcacttttttatgcctgggttcgcccctctgacttcgcggggttcccaacagtaccgcgcactgactgtgcccgaacttacccagcaggtttttgatgcaaagaatatgatggctgcctgtgatccccgtcatggcagatacctgactgtggctgccgtgttcagaggaagaatgtcaatgaaagaggtcgacgagcaaatgcttaacgttcagaataagaatagtagttatttcgtcgaatggcctcaacagtgccaggactcccgactatag

SEQ ID NO: 111453 - DNA, 1062 bp, Artificial Sequence
  derived and/or modified sequence
atgcgcgagattgtgcacatacaggcgggtcagtgtggcaatcagatcggcgcaaaattttgggaggtgattagcgatgaacatggcatcgaccccacaggaacataccacggcgattccgacttgcagctgacccattcccttgggggaggcactggcagcgggatgggcacccttcttatcagcaagatcagagaagaatatccagatcgcatcatgaatacattttcagttgttccatcacctaaggtcagcgacactgtggtcgagccctataacgccacactctctgtccaccagctggtggagaatacggatgagacatactgtatagacaatgaggcactgtacgacatatgttttaggaccttaaaacttacaacgcctacctacggggaccttaaccatttggtgtctgccactatgtctggtgtcacaacctgcttgcggttccctggccagctgaacgccgacctccggaaactggcagtgaacatggttccttttcccagacttcacttttttatgcccggattcgccccactgacctccaggggctctcagcaataccgggctctgacagtgccggagcttacacaacaggttttcgatgcaaagaatatgatggcagcctgcgatccgaggcatgggcgatacctgactgtagccgctgtgtttcggggaaggatgtcaatgaaagaagtggacgagcagatgcttaacgtgcagaacaagaatagttcatattttgtcgagtggatcccaaataatgtaaagacagccgtgtgtgatatcccccctcggggactaaaaatggccgtgacctttatcggcaactctacggcaatacaggagctgtttaagagaatttctgagcaatttacagccatgtttagaaggaaagcctttctccactggtacacgggggagggtatggacgagatggagttcacagaagctgaatcgaatatgaatgatctggtaagtgagtatcagcaataccaggatgccactgccgaagaggaggaagacttcggagaggaggcagaagaggaggcatag

SEQ ID NO: 111454 - DNA, 1062 bp, Artificial Sequence
  derived and/or modified sequence
atgcgtgagatcgttcacatccaggctggccagtgcggcaatcagattggagccaaattctgggaagtgattagtgatgagcacgggatcgaccctactggtacataccatggtgactccgacctgcaactgacgcacagccttgggggtggaactggcagtggtatggggacacttctaatcagcaaaattagagaagagtatcccgaccgaataatgaacacatttagcgtggtgccaagtcccaaggtttctgatacagtggtggagccatataacgctactctcagcgtgcatcagctggttgaaaacacagacgagacctattgcatcgataatgaggcactctatgatatttgctttcgtacgctcaagctaacaacaccaacatacggggatttgaaccaccttgtgtcagccacaatgagtggagtgactacttgcctgagatttccaggacagcttaacgccgacctgcggaagctggccgtgaacatggtccccttccccaggcttcacttttttatgccgggattcgctccgctcactagtagggggagccagcagtatcgggcactcacagtgccggagctgacccagcaggttttcgatgccaaaaatatgatggccgcttgcgatcccaggcacggtcgctacctgacagttgcagccgtgtttaggggccgaatgtcaatgaaggaagtggacgaacagatgcttaatgtccaaaacaaaaatagctcgtattttgtcgaatggatccctaataatgtgaaaactgcagtctgtgacatccctcctcgtggcctcaaaatggccgtcacatttattggcaatagcaccgccattcaggagctgtttaagcgcatctctgaacagttcacggccatgtttcggagaaaggcttttctacattggtacacaggagagggcatggacgagatggagtttacagaagctgagtccaatatgaatgacctggtgtccgagtaccaacaatatcaggacgcaacggctgaggaagaggaagatttcggggaagaagccgaggaagaggcctag

SEQ ID NO: 111455 - DNA, 1062 bp, Artificial Sequence
  derived and/or modified sequence
atgcgagagatcgtgcatattcaagctggacagtgcggtaaccaaataggcgctaaattctgggaagtgatctcagacgagcatgggattgaccccaccggcacataccatggggattcggatcttcagctaactcatagtctcgggggagggacagggtctggaatgggaacactgcttatctcaaaaattagagaagagtatcccgaccgcatcatgaacacattttccgtcgtcccatcacccaaagtaagcgacacagttgtcgagccatacaacgccacactttcagtccaccaactggtggaaaacactgatgaaacatactgtattgataacgaagccctctacgatatttgctttagaacacttaagttgaccacccctacgtacggcgacctcaaccacctcgtatccgctaccatgagtggagtgacaacatgcctgagatttcctggacagttgaatgcagatttaagaaaactcgccgttaacatggttccttttcctcgcctccacttttttatgccgggtttcgcacccctgacctcccggggttcgcagcaataccgggctctgacagtgcccgagctaacgcagcaggtcttcgatgccaaaaacatgatggctgcctgtgatcccagacacgggagatacctgaccgtggccgcagttttccgcggtcgtatgagtatgaaggaggtggatgaacagatgttgaatgtccaaaacaagaatagttcttacttcgtcgaatggatacctaacaacgtgaagaccgccgtgtgtgacataccgccacgaggcctgaagatggcggtgaccttcatcggcaatagtacggccatccaggaactcttcaagcggatttccgagcagttcaccgcgatgttccggagaaaagccttcctacactggtacacgggagaaggaatggatgaaatggagttcacagaggcagagagcaatatgaacgaccttgtaagtgaatatcagcagtatcaggacgccacagcagaagaggaagaagatttcggcgaggaggccgaggaggaagcgtag

SEQ ID NO: 111456 - DNA, 1062 bp, Artificial Sequence
  derived and/or modified sequence
atgcgagagatcgtgcacatccaagctggccaatgcggaaatcaaatcggcgctaagttctgggaagttatctccgatgagcatggaatcgatcctacgggaacctaccatggtgattctgatctgcagctcacccactcactcggcggaggtactgggtctgggatgggaaccctgctgatatcgaaaattcgagaggagtatcccgacaggattatgaacaccttcagtgtagtcccctctcctaaggtgagtgataccgttgtggaaccctacaatgctacacttagcgtgcaccagctggtggagaacaccgatgaaacctactgtattgataatgaagccctgtacgatatatgtttccggactctgaagctcacaactccaacatacggggaccttaaccacctcgtgtctgcaaccatgtcaggcgtcactacttgtctgcgatttccaggtcagctgaatgccgacttacgcaagctggccgtgaacatggtcccattcccgagactccattttttcatgcccggtttcgctcccctgacatctagaggatctcaacaatatagggcgttgactgtgccggagctgacacagcaggtgtttgacgctaaaaacatgatggctgcttgtgatccccgtcatggccgttacctgacagtagccgctgtgtttaggggacgcatgtccatgaaagaggtggatgaacaaatgttgaacgtgcaaaataaaaacagttcatattttgtggagtggatccccaataatgtcaaaacagctgtttgtgacatacccccaaggggcttaaaaatggccgtgacgttcatcggcaattccactgccattcaggaattattcaaacgtatttctgagcaattcacggccatgttccgtcggaaagcctttcttcattggtacactggcgaggggatggacgaaatggagtttaccgaggcagagagcaacatgaacgatctggtttcagagtaccagcagtatcaggatgccactgcggaagaagaagaggattttggcgaggaagccgaggaagaggcctag

SEQ ID NO: 111457 - DNA, 1062 bp, Artificial Sequence
  derived and/or modified sequence
atgcgagagattgtgcacatccaggctggacaatgcggcaatcagataggggcaaagttctgggaggtgatcagcgacgagcacgggatcgatccaacaggaacctaccacggagactcagacctgcaactaacacacagtctcggtggagggacagggtccgggatggggacactcctcatcagcaagatccgcgaggagtatcccgatcggattatgaacacctttagtgtggtgccatccccaaaagtttctgatacagtagtggaaccctacaacgctacgttatccgtgcaccagctcgtggagaacacggacgagacctactgtattgataatgaagcactttatgacatatgctttcgtacattgaagctaaccaccccgacttatggtgatctcaaccatttggtcagtgcaacaatgtcaggagtgacaacatgcctgcggttccctggtcagctaaatgccgacctcaggaagcttgccgtgaacatggtgccatttccccgactgcacttctttatgccaggcttcgccccattgacttcccggggatctcagcagtaccgcgcactcacagtcccagaactaacacagcaggttttcgacgccaagaatatgatggccgcttgcgatcctcgtcacgggaggtacttgactgtggcagcagtttttagaggccgaatgagtatgaaggaggtagacgagcagatgttgaatgtccaaaacaagaacagtagctacttcgttgagtggatccccaataatgtgaagacggcggtctgcgatattccaccaagggggcttaaaatggcagtcacatttatcgggaactcaaccgccattcaggaactattcaaacgaatttcggagcaattcacagcaatgtttaggcggaaggcttttttgcactggtataccggggaaggcatggatgagatggaatttacagaagccgagagtaacatgaatgacttggtttctgaataccagcaataccaagacgctaccgcagaggaggaggaagattttggcgaagaggctgaggaggaggcctag

SEQ ID NO: 111458 - DNA, 1062 bp, Artificial Sequence
  derived and/or modified sequence
atgagagagatcgtgcacatacaggcaggccaatgtggaaaccaaattggggctaaattctgggaggtaattagcgatgagcacgggattgaccctacaggcacctaccacggtgacagtgacctgcaattaacacactccctggggggtggtactggcagcggcatgggtaccctcctgatatctaaaataagagaagaatatcctgaccgaatcatgaataccttcagcgttgtcccgtcacctaaagtttctgacactgtagtggagccatacaatgcgaccctgagtgtgcaccagctcgtggaaaacaccgatgagacatactgcattgacaatgaagcactctatgacatctgtttcagaacacttaagctgacaactccgacttatggcgatctgaatcacttagtctcagctacaatgtcaggggtcaccacgtgtctaaggtttccaggacagctcaacgcagatctgcgtaagctggcagtgaatatggtgccctttcccagacttcactttttcatgccgggattcgcccctctgaccagtcgcggaagccaacagtatcgagctctgacagtgccggagctcacccaacaagtgttcgatgccaagaacatgatggccgcttgcgacccacgccacggcagatatctgactgtggctgctgtgttccgaggcaggatgagtatgaaggaggtcgatgagcaaatgctgaacgtacagaacaagaattcatcctattttgtcgagtggataccaaataatgtgaagaccgccgtatgcgatatcccgcctcgcggactgaagatggcagttactttcattgggaatagcaccgcaattcaagagctgtttaagagaatcagcgagcaatttacagccatgttccgccgtaaggccttccttcactggtatacaggcgaggggatggacgaaatggagttcaccgaagccgagtctaatatgaacgacctcgtcagtgaataccagcaataccaggacgctacggcagaggaagaggaggacttcggagaagaggctgaagaggaagcatag

SEQ ID NO: 111459 - DNA, 1062 bp, Artificial Sequence
  derived and/or modified sequence
atgcgcgagatcgtgcacattcaagccggacaatgtggcaaccagattggcgcaaagttttgggaggtgattagtgacgagcacggcatagaccccaccggcacgtaccatggcgattctgacctgcagctgacacatagtctgggaggtggaactgggtccggtatgggcaccctcttaatatccaagatccgtgaagagtaccccgatagaataatgaacacattcagcgtggtgccatcccctaaggtcagtgataccgtcgtggagccctataatgctaccctctctgtccatcagctggtcgaaaacactgatgagacatactgtattgacaacgaggcgctctatgatatctgttttcgtaccttgaagctgaccacaccaacatacggcgatctcaatcacctcgtgtcagcaacgatgagcggcgtgaccacctgcttacggtttcctgggcagctgaatgctgacttgcggaagctggccgtgaatatggtcccttttcctaggttacatttttttatgccagggtttgcacccctcactagtaggggatcccagcagtacagggctctgacggtacccgaacttacccagcaggtatttgatgcaaagaacatgatggccgcttgcgatcccagacacgggagatacctcacagttgcggctgtttttcgaggccgaatgagtatgaaggaggtggatgagcaaatgttaaatgtgcagaacaaaaactccagctatttcgtcgagtggatcccaaataacgtcaaaacagctgtgtgtgatattccgccaagaggattgaaaatggccgtgacatttattgggaactctaccgctatacaggagctttttaagagaatcagcgagcagtttacagcaatgttccgccgtaaagcattccttcactggtacaccggggaaggcatggatgaaatggaatttactgaagccgaatcaaacatgaacgatcttgtttccgagtatcagcagtatcaagatgcaaccgccgaagaagaggaggatttcggtgaggaggccgaggaggaggcctag

SEQ ID NO: 111460 - DNA, 1339 bp, Artificial Sequence
  derived and/or modified sequence
ccctctcagaaccttcctgccgtcgcgtttgcacctcgctgctccagcctctggggcgcattccaaccttccagcctgcgacctgcggagaaaaaaaattacttattttcttgccccatacataccttgaggcgagcaaaaaaattaaattttaaccatgagggaaatcgtgcacatccaggctggtcagtgtggcaaccagatcggtgccaagttctgggaggtgatcagtgatgaacatggcatcgaccccaccggcacctaccacggggacagcgacctgcagctgacccactcactgggcgggggcacaggctctggaatgggcactctccttatcagcaagatccgagaagaataccctgatcgcatcatgaataccttcagtgtggtgccttcacccaaagtgtctgacaccgtggtcgagccctacaatgccaccctctccgtccatcagttggtagagaatactgatgagacctattgcattgacaacgaggccctctatgatatctgcttccgcactctgaagctgaccacaccaacctacggggatctgaaccaccttgtctcagccaccatgagtggtgtcaccacctgcctccgtttccctggccagctcaatgctgacctccgcaagttggcagtcaacatggtccccttcccacgtctccatttctttatgcctggctttgcccctctcaccagccgtggaagccagcagtatcgagctctcacagtgccggaactcacccagcaggtcttcgatgccaagaacatgatggctgcctgtgacccccgccacggccgatacctcaccgtggctgctgtcttccgtggtcggatgtccatgaaggaggtcgatgagcagatgcttaacgtgcagaacaagaacagcagctactttgtggaatggatccccaacaatgtcaagacagccgtctgtgacatcccacctcgtggcctcaagatggcagtcaccttcattggcaatagcacagccatccaggagctcttcaagcgcatctcggagcagttcactgccatgttccgccggaaggccttcctccactggtacacaggcgagggcatggacgagatggagttcaccgaggctgagagcaacatgaacgacctcgtctctgagtatcagcagtaccaggatgccaccgcagaagaggaggaggatttcggtgaggaggccgaagaggaggcctaaggcagagcccccatcacctcaggcttctcagttcccttagccgtcttactcaactgcccctttcctctccctcagaatttgtgtttgctgcctctatcttgttttttgttttttcttctg

SEQ ID NO: 111461 - DNA, 624 bp, Artificial Sequence
  derived and/or modified sequence
atgggcactctccttatcagcaagatccgagaagaataccctgatcgcatcatgaataccttcagtgtggtgccttcacccaaagtgtctgacaccgtggtcgagccctacaatgccaccctctccgtccatcagttggtagagaatactgatgagacctattgcattgacaacgaggccctctatgatatctgcttccgcactctgaagctgaccacaccaacctacggggatctgaaccaccttgtctcagccaccatgagtggtgtcaccacctgcctccgtttccctggccagctcaatgctgacctccgcaagttggcagtcaacatggtccccttcccacgtctccatttctttatgcctggctttgcccctctcaccagccgtggaagccagcagtatcgagctctcacagtgccggaactcacccagcaggtcttcgatgccaagaacatgatggctgcctgtgacccccgccacggccgatacctcaccgtggctgctgtcttccgtggtcggatgtccatgaaggaggtcgatgagcagatgcttaacgtgcagaacaagaacagcagctactttgtggaatggccccaacaatgtcaagacagccgtctgtga

SEQ ID NO: 111462 - protein, 283 aa, Artificial Sequence
  derived and/or modified sequence
MVGQLFGGQLGQITGLDPAGPEYTRASVEERLDAGDALFVEAIHTDTDNLGIRIPVGHVDYFVNGGQDQPGCPTFFYAGYSYLICDHMRAVHLYISALENSCPLMAFPCASYKAFLAGRCLDCFNPFLLSCPRIGLVEQGGVKIEPLPKEVKVYLLTTSSAPYCMHHSLVEFHLKELRNKDTNIEVTFLSSNITSSSKITIPKQQRYGKGIIAHATPQCQINQVKFKFQSSNRVWKKDRTTIIGKFCTALLPVNDREKMVCLPEPVNLQASVTVSCDLKIACV

SEQ ID NO: 111463 - DNA, 1456 bp, Artificial Sequence
  derived and/or modified sequence
gaattactccataccagctctgagatttccagctcagcgatgcccccaggtccctgggagagctgcttctgggtggggggcctcattttgtggctcagcgttggaagttcagggttttaggaacaaagccttcctggattgacacatttattagaacccttctgcgtgcaacgaatgctaatgtgattgccgtggactggatttatgggtctacaggagtctacttctcagctgtgaaaaatgtgattaagttgagcctcgagatctcccttttcctcaataaactcctggtgctgggtgtgtcggaatcctcaatccacatcattggtgttagcctgggggcccacgttgggggcatggtgggacagctcttcggaggccagctgggacagatcacaggcctggaccccgctggacctgagtacaccagggccagtgtggaagagcgcttggatgctggagatgccctcttcgtggaagccatccacacagacaccgacaatttgggtattcggattcccgttggacatgtggactacttcgtcaacggaggccaagaccaacctggctgccccaccttcttttacgcaggttatagttatctgatctgtgatcacatgagggctgtgcacctctacatcagcgccctggagaattcctgtccactgatggcctttccctgtgccagctacaaggccttccttgctggacgctgtctggattgctttaacccttttctgctttcctgcccaaggataggactggtggaacaaggtggtgtcaagatagagccgctccccaaggaagtgaaagtctacctcctgactacttccagtgctccgtactgcatgcatcacagcctcgtggagtttcacttgaaggaactgagaaacaaggacaccaacatcgaggttaccttccttagcagtaacatcacctcttcatctaagatcaccatacctaagcagcaacgctatgggaaaggaatcatagcccatgccaccccacaatgccagataaaccaagtgaaattcaagtttcagtcttccaaccgagtttggaaaaaagaccggactaccattattgggaagttctgcactgcccttttgcctgtcaatgacagagaaaagatggtctgcttacctgaaccagtgaacttacaagcaagtgtgactgtttcctgtgacctgaagatagcctgtgtgtagtttaacctgggcaggacacatctccctgcattttttttttttttttgagagagaggtgtgatgagggatgtgtgtgtgcagcttattgtagaccattactactaaggagaaaagcaaagctctttcttattttcctcataatcagctaccctggaggggagggagaactcattttacagaacttggtttcctttgccgatcttatgtacatacccattttagctttcccatgcatacttaactgcact

SEQ ID NO: 111464 - protein, 677 aa, Artificial Sequence
  derived and/or modified sequence
MDVSGQETDWRSTAFRQKLVSQIEDAMRKAGVAHSKSSKDMESHVFLKAKTRDEYLSLVARLIIHFRDIHNKKSQASVSAQLQLQQVALQQQQQQQQFQQQQQAALQQQQQQQQQQQFQAQQSAMQQQFQAVVQQQQQLQQQQQQQQHLIKLHHQNQQQIQQQQQQLQRIAQLQLQQQQQQQQQQQQQQQQALQAQPPIQQPPMQQPQPPPSQALPQQLQQMHHTQHHQPPPQPQQPPVAQNQPSQLPPQSQTQPLVSQAQALPGQMLYTQPPLKFVRAPMVVQQPPVQPQVQQQQTAVQTAQAAQMVAPGVQVSQSSLPMLSSPSPGQQVQTPQSMPPPPQPSPQPGQPSSQPNSNVSSGPAPSPSSFLPSPSPQPSQSPVTARTPQNFSVPSPGPLNTPVNPSSVMSPAGSSQAEEQQYLDKLKQLSKYIEPLRRMINKIDKNEDRKKDLSKMKSLLDILTDPSKRCPLKTLQKCEIALEKLKNDMAVPTPPPPPVPPTKQQYLCQPLLDAVLANIRSPVFNHSLYRTFVPAMTAIHGPPITAPVVCTRKRRLEDDERQSIPSVLQGEVARLDPKFLVNLDPSHCSNNGTVHLICKLDDKDLPSVPPLELSVPADYPAQSPLWIDRQWQYDANPFLQSVHRCMTSRLLQLPDKHSVTALLNTWAQSVHQACLSAA

SEQ ID NO: 111465 - protein, 637 aa, Artificial Sequence
  derived and/or modified sequence
MESHVFLKAKTRDEYLSLVARLIIHFRDIHNKKSQASVSAQLQLQQVALQQQQQQQQFQQQQQAALQQQQQQQQQQQFQAQQSAMQQQFQAVVQQQQQLQQQQQQQQHLIKLHHQNQQQIQQQQQQLQRIAQLQLQQQQQQQQQQQQQQQQALQAQPPIQQPPMQQPQPPPSQALPQQLQQMHHTQHHQPPPQPQQPPVAQNQPSQLPPQSQTQPLVSQAQALPGQMLYTQPPLKFVRAPMVVQQPPVQPQVQQQQTAVQTAQAAQMVAPGVQVSQSSLPMLSSPSPGQQVQTPQSMPPPPQPSPQPGQPSSQPNSNVSSGPAPSPSSFLPSPSPQPSQSPVTARTPQNFSVPSPGPLNTPVNPSSVMSPAGSSQAEEQQYLDKLKQLSKYIEPLRRMINKIDKNEDRKKDLSKMKSLLDILTDPSKRCPLKTLQKCEIALEKLKNDMAVPTPPPPPVPPTKQQYLCQPLLDAVLANIRSPVFNHSLYRTFVPAMTAIHGPPITAPVVCTRKRRLEDDERQSIPSVLQGEVARLDPKFLVNLDPSHCSNNGTVHLICKLDDKDLPSVPPLELSVPADYPAQSPLWIDRQWQYDANPFLQSVHRCMTSRLLQLPDKHSVTALLNTWAQSVHQACLSAA

SEQ ID NO: 111466 - protein, 189 aa, Artificial Sequence
  derived and/or modified sequence
MQQQFQAVVQQQQQLQQQQQQQQHLIKLHHQNQQQIQQQQQQLQRIAQLQLQQQQQQQQQQQQQQQQALQAQPPIQQPPMQQPQPPPSQALPQQLQQMHHTQHHQPPPQPQQPPVAQNQPSQLPPQSQTQPLVSQAQALPGQMLYTQPPLKFVRAPMVVQQPPVQPQVQQQQTAVQTAQAAQMVAPGVQ

SEQ ID NO: 111467 - protein, 106 aa, Artificial Sequence
  derived and/or modified sequence
MEPPIPQSAPLTPNSVMVQPLLDSRMSHSRLQHPLTILPIDQVKTSHVENDYIDNPSLALTTGPKRTRGGAPELAPTPARCDQDVTHHWISFSGRPCSATCLPPAA

SEQ ID NO: 111468 - protein, 50 aa, Artificial Sequence
  derived and/or modified sequence
MEPPIPQSAPLTPNSVMVQPLLDSRMSHSRLQHPLTILPIDQVKTSHVEN

SEQ ID NO: 111469 - DNA, 321 bp, Artificial Sequence
  derived and/or modified sequence
atggagccccccatcccccagagcgcccccctgacccccaacagcgtgatggtgcagcccctgctggacagcagaatgagccacagcagactgcagcaccccctgaccatcctgcccatcgaccaggtgaagaccagccacgtggagaacgactacatcgacaaccccagcctggccctgaccaccggccccaagagaaccagaggcggcgcccccgagctggcccccacccccgccagatgcgaccaggacgtgacccaccactggatcagcttcagcggcagaccctgcagcgccacctgcctgccccccgccgcctag

SEQ ID NO: 111470 - DNA, 900 bp, Artificial Sequence
  derived and/or modified sequence
atggagccccccatcccccagagcgcccccctgacccccaacagcgtgatggtgcagcccctgctggacagcagaatgagccacagcagactgcagcaccccctgaccatcctgcccatcgaccaggtgaagaccagccacgtggagaacgactacatcgacaaccccagcctggccctgaccaccggccccaagagaaccagaggcggcgcccccgagctggcccccacccccgccagatgcgaccaggacgtgacccaccactggatcagcttcagcggcagacccagcagcgtgagcagcagcagcagcaccagcagcgaccagagactgctggaccacatggcccccccccccgtggccgaccaggccagccccagagccgtgagaatccagcccaaggtggtgcactgccagcccctggacctgaagggccccgccgtgccccccgagctggacaagcacttcctgctgtgcgaggcctgcggcaagtgcaagtgcaaggagtgcgccagccccagaaccctgcccagctgctgggtgtgcaaccaggagtgcctgtgcagcgcccagaccctggtgaactacggcacctgcatgtgcctggtgcagggcatcttctaccactgcaccaacgaggacgacgagggcagctgcgccgaccacccctgcagctgcagcagaagcaactgctgcgccagatggagcttcatgggcgccctgagcgtggtgctgccctgcctgctgtgctacctgcccgccaccggctgcgtgaagctggcccagagaggctacgacagactgagaagacccggctgcagatgcaagcacaccaacagcgtgatctgcaaggccgccagcggcgacgccaagaccagcagacccgacaagcccttctag

SEQ ID NO: 111471 - DNA, 153 bp, Artificial Sequence
  derived and/or modified sequence
atggagccccccatcccccagagcgcccccctgacccccaacagcgtgatggtgcagcccctgctggacagcagaatgagccacagcagactgcagcaccccctgaccatcctgcccatcgaccaggtgaagaccagccacgtggagaactag

SEQ ID NO: 111472 - DNA, 321 bp, Artificial Sequence
  derived and/or modified sequence
atggagcccccaattccccagtctgctccactcacccctaacagtgtaatggtccagccgttgttggactcaagaatgtcacattcaagactgcagcatcctctcactatcctccccatagatcaggtcaagactagtcatgtcgagaatgactatattgataatccctccctggcccttacaacagggccaaaaagaacgcgcggcggcgcccctgagttggcccccacaccagctagatgcgaccaggatgtcacccaccactggatctccttcagcggcagaccctgttcagctacatgcctccccccagctgcttag

SEQ ID NO: 111473 - DNA, 900 bp, Artificial Sequence
  derived and/or modified sequence
atggaaccacccatcccgcagtccgctcccttgaccccgaacagtgttatggtccagcccctactggactcacgcatgtctcacagcagactccaacatcctctcaccatattaccaattgatcaggtgaagacatcacacgttgagaatgactacattgacaatccctccctcgccctgacaaccggacctaaaaggacacgaggaggagcacccgaattagccccgactcccgcacgatgtgaccaagacgtcacacatcactggatctcattttcaggccgcccatcgagcgtgagctcatcttcctccacatcctccgaccaacgactgcttgaccatatggcccctccccctgtggccgatcaggcgtcaccgcgggctgtccgaatccaacctaaggtcgtgcactgccagcccttggatctgaaaggccccgcagtcccaccggagctggacaagcacttcctgctttgtgaagcctgcggtaagtgtaaatgcaaagagtgcgcatcccccaggacattaccttcatgctgggtgtgtaatcaggagtgcctctgttccgcacagaccctggttaactatggtacttgcatgtgcttagtgcaaggcattttttaccattgtactaatgaagatgacgaaggcagctgcgccgaccacccatgttcttgtagccggtctaactgctgcgcacgctggagctttatgggagccttgtcagtggtgttgccgtgtctcctgtgctacctgcccgcgacaggttgtgttaaacttgcgcagcgagggtacgatcggctcagaagaccaggctgtcgctgtaagcacaccaatagcgtcatctgcaaagccgcatccggagatgcgaaaacatcacggccagacaagcctttttag

SEQ ID NO: 111474 - DNA, 153 bp, Artificial Sequence
  derived and/or modified sequence
atggaaccccctattcctcagagcgcgcccctgacccccaactcggtcatggtacaaccactgttggattcacggatgagccacagccgcctccagcatccactcactatacttcccatcgaccaggtgaaaaccagccatgtggaaaattag

SEQ ID NO: 111475 - DNA, 321 bp, Artificial Sequence
  derived and/or modified sequence
atggagccccccatcccccagagcgcccccctgacccccaacagcgtgatggtgcagcccctgctggacagcaggatgagccacagccggctgcagcaccccctgaccatcctgcccatcgaccaggtgaagaccagccacgtggagaatgactacatcgacaaccccagcctggccctgaccaccggccccaagaggacccggggcggggcccctgagctggcccccaccccagcccgctgtgaccaggatgtgacccaccactggatctccttcagcggccggccctgcagcgccacctgcctgcccccagctgcctag

SEQ ID NO: 111476 - DNA, 900 bp, Artificial Sequence
  derived and/or modified sequence
atggagccccccatcccccagagcgcccccctgacccccaacagcgtgatggtgcagcccctgctggacagcaggatgagccacagccggctgcagcaccccctgaccatcctgcccatcgaccaggtgaagaccagccacgtggagaatgactacatcgacaaccccagcctggccctgaccaccggccccaagaggacccggggcggggcccctgagctggcccccaccccagcccgctgtgaccaggatgtgacccaccactggatctccttcagcggccggcccagctctgtgagcagcagcagcagcaccagcagtgaccagaggctgctggaccacatggcccctcctcctgtggccgaccaggccagccccagggctgtgcgcatccagcccaaggtggtgcactgccagcccctggacctgaagggccctgctgtgcccccagagctggacaagcacttcctgctgtgtgaggcctgtgggaagtgcaagtgcaaggaatgtgccagccccaggaccctgcccagctgctgggtgtgcaaccaggagtgcctgtgcagcgcccagaccctggtgaactacggcacctgcatgtgcctggtgcagggcatcttctaccactgcaccaatgaagatgatgagggcagctgtgccgaccacccctgcagctgcagccgcagcaactgctgtgcccgctggagcttcatgggcgccctgtctgtggtgctgccctgcctgctgtgctacctgcctgccaccggctgtgtgaagctggcccagaggggctatgaccggctgcggcggcccggctgccgctgcaagcacaccaacagcgtcatctgcaaggccgccagcggagatgccaagaccagcaggccagacaagcccttctag

SEQ ID NO: 111477 - DNA, 153 bp, Artificial Sequence
  derived and/or modified sequence
atggagccccccatcccccagagcgcccccctgacccccaacagcgtgatggtgcagcccctgctggacagcaggatgagccacagccggctgcagcaccccctgaccatcctgcccatcgaccaggtgaagaccagccacgtggagaactag

SEQ ID NO: 111478 - DNA, 321 bp, Artificial Sequence
  derived and/or modified sequence
atggagccccccatcccccagagcgcccccctgacccccaacagcgttatggttcagccactcctggattcacgcatgtcacatagtaggcttcagcatccccttacaattctgccaatcgaccaagtgaagacctctcatgtcgaaaacgactacatagataacccgtctctggccctgactacagggccaaagcgcacacgaggaggggcacctgaactcgcacctactcccgcaagatgtgatcaagacgtgacgcaccactggatctcattttctggacggccgtgctccgctacatgtctgcctcccgccgcctag

SEQ ID NO: 111479 - DNA, 900 bp, Artificial Sequence
  derived and/or modified sequence
atggagccccccatcccccagagcgcccccctgacccccaacagcgttatggtgcaacctctcctggatagccggatgagtcactcccgtctgcagcaccctcttacaatcctgccgatcgatcaggttaagacgtcgcatgtcgaaaatgattacatcgataatccatcccttgcccttaccacaggtccaaagcgcacacggggaggcgccccagagctagctccaaccccagcacgatgcgaccaggatgtgactcatcactggatcagtttctctggacgccctagctctgtgagcagctccagctctacttcgagtgaccagcgcttactggaccatatggctccaccacccgtcgctgatcaggctagcccccgcgctgtcaggatccaacctaaagtggtccattgtcagcctctggacttgaagggcccagccgtccctcctgaactagacaagcactttctgttgtgcgaagcttgcggaaaatgcaagtgtaaggaatgtgcatccccccgcacccttcctagttgttgggtgtgcaaccaggagtgtctgtgttccgcacagactttggttaattacggcacgtgtatgtgtctggtgcaaggtattttctatcattgcacgaacgaagatgatgaggggtcgtgtgccgaccatccttgctcttgctcccgcagcaactgttgtgcacgctggagtttcatgggagcactgtccgtggttctcccttgtttactgtgttacctccctgcgactgggtgcgtgaagctggctcagagaggatatgatcggttacggaggccaggatgccgatgcaagcacaccaacagcgttatctgtaaggccgcttcaggggatgccaagactagtcggccagataagcccttttag

SEQ ID NO: 111480 - DNA, 153 bp, Artificial Sequence
  derived and/or modified sequence
atggagccccccatcccccagagcgcccccctgacccccaacagcgtcatggtgcagccacttctggactcaaggatgagccactcccgactgcaacatccgctgacaattctgcccatcgatcaagtgaagacatcacatgttgagaattag

SEQ ID NO: 111481 - DNA, 321 bp, Artificial Sequence
  derived and/or modified sequence
atggaacctccaattccacaatcagcccctttaactcctaacagcgtaatggtgcagcccctgctagacagtcggatgagtcactccagactccaacatcccctgacaattctgccaatagaccaggtgaaaacttcgcatgtcgagaacgactacattgacaatccctcattggctctgacgaccggccctaagcggacacgtggaggagctccagagctagcacctaccccggcaaggtgcgatcaggacgtcacacatcactggattagcttttctggtcggccttgtagtgctacctgcctgccacccgctgcctag

SEQ ID NO: 111482 - DNA, 900 bp, Artificial Sequence
  derived and/or modified sequence
atggagcctcctattcctcagagtgccccattaacacccaattctgtgatggtgcaacccctgctcgattcacgaatgtcacactcaagacttcaacatcctcttactatactgccaatcgaccaggtcaagacttctcatgtggagaacgattacattgataatccatccctcgctttaactactggccctaaacggacacggggaggagcccctgagttagccccaactcccgcaaggtgcgatcaggacgtcacacaccactggatctctttctccggaagaccatccagtgtgtcttcctcatcatctacaagctccgatcagagactgctggaccacatggcgcctccaccagtcgctgatcaagcgagccctagggcagtccgtatccagcccaaggtcgttcattgtcaaccactagacctgaaaggacccgctgtgccccctgaactcgataaacacttcctgctgtgcgaggcgtgcgggaagtgcaaatgtaaagagtgtgccagccccagaacactccctagctgctgggtgtgcaatcaagaatgcctttgctccgcccagacactcgtaaattacggtacctgcatgtgtctggtgcagggcatcttttaccactgcactaacgaggatgacgagggatcctgtgccgaccacccatgttcatgtagccggtctaactgctgcgctcggtggtctttcatgggcgctctgtcagtggtacttccgtgcctcctgtgttatctgccggcaacagggtgcgtcaagctagcacagagagggtacgatcgtctgcgaaggccagggtgccgttgtaaacatacgaatagcgtgatttgcaaggccgcatccggggatgctaagacatcccgccctgataaacccttctag

SEQ ID NO: 111483 - DNA, 153 bp, Artificial Sequence
  derived and/or modified sequence
atggaaccccctatcccacagagcgctcccttaacccctaattccgtgatggttcaacctctcctggactcccggatgtcccactccagactgcagcatccactcactattctgcccatagaccaagtcaagacatcccacgttgagaactag

SEQ ID NO: 111484 - DNA, 321 bp, Artificial Sequence
  derived and/or modified sequence
atggagcccccgatcccacagagcgcccccttgactcccaactcagtcatggtccagccccttcttgacagccggatgtcccacagccggctccagcacccactcaccatcctacccattgaccaggtgaagaccagccatgtggagaatgactacatagacaaccctagcctggccctgaccaccggcccaaagcggacccggggcggggccccagagctggccccgacgcccgcccgctgtgaccaggatgtcacccaccattggatctccttcagcgggcgcccctgctctgctacctgcctgccaccggctgcgtga

SEQ ID NO: 111485 - protein, 313 aa, Artificial Sequence
  derived and/or modified sequence
MALRICVTYTPALPIGLCTRCCLCLEQSPSWCHCLRGVSFLTFHLHQSVPLGDRDSLLMFTRQAGHFVEGSKAGRSRGRLCLSQALRVAVRGAFVSLWFAAGAGDRERNKGDKGAQTGAGLSQEAEDVDVSRARRVTDAPQGTLCGTGNRNSGSQSARVVGVAHLGEAFRVGVEQAISSCPEEVHGRHGLSMEIMWARMDVALRSPGRGLLAGAGALCMTLAESSCPDYERGRRACLTLHRHPTPHCSTWGLPLRVAGSWLTVVTVEALGGWRMGVRRTGQVGPTMHPPPVSGASPLLLHHLLLLLLIIILTC

SEQ ID NO: 111486 - DNA, 942 bp, Artificial Sequence
  derived and/or modified sequence
atggctcttcgaatatgcgtgacatatactcccgcgcttcccatcgggctgtgcacaaggtgttgcctgtgtctggagcaatcaccgtcttggtgccattgcctgagaggggtcagctttcttacctttcacctccaccagtccgttcctctgggggatcgcgatagtctcctgatgtttacgagacaggccggccatttcgtggaaggatcaaaggccggtaggtcccgcgggcgcctctgtctaagccaggcgctgagagttgccgttaggggggccttcgtttcgttatggtttgccgccggggcgggggaccgcgaaagaaacaagggcgacaagggggcccagactggtgctggcctgtctcaggaggctgaggatgttgacgtgtctagagctagacgagtaaccgatgcaccccagggtacactttgcggcaccggaaatagaaactcaggcagccagtctgccagagtcgtcggcgtggctcatctgggcgaagctttccgagtgggcgtcgagcaggccatcagctcctgccctgaggaagtgcatgggcgccacggtctttctatggaaattatgtgggcacgcatggacgtggcactgcgatcccccggtagaggattgctggctggcgctggcgccctatgcatgaccctcgcagaaagctcatgcccagactacgagcgcggacgtcgcgcctgtttaacacttcacagacaccccaccccccattgttccacctggggcctccccttaagggtggcaggtagctggctgactgtcgtgacggtggaggccctcggggggtggagaatgggcgtgcgccgcactgggcaggtagggcccactatgcaccctcctcccgtaagcggtgcgtccccactcttgcttcaccatctgttactcctgttacttattattatactgacctgttag

SEQ ID NO: 111487 - DNA, 942 bp, Artificial Sequence
  derived and/or modified sequence
atggccctgcgaatatgcgtcacttatacgcctgcccttccaattggcctctgcacccggtgctgcctgtgcctggagcagagcccgagttggtgccactgtttacgtggcgtgtcctttcttactttccatctccatcagtcggtgccactgggagacagagatagcctgttaatgttcactaggcaggccggccacttcgtggaaggctcaaaagcaggaagatccaggggccgcctctgcctgagtcaggccctgcgggtggctgtgcgaggagccttcgtgtcattgtggtttgcagcaggggccggcgaccgggagcggaataagggtgacaagggggcccagactggagcaggacttagccaagaagccgaagacgtcgacgtgagtcgcgcccgcagagtgacagacgcaccccagggcactttgtgcgggaccggcaatcgcaattcaggttcacagtccgcccgtgtggtaggcgtagcacatctgggagaggccttcagggtgggagtggagcaggctatctcaagctgtcccgaagaagtgcatggccgccacggactgtccatggaaatcatgtgggcgaggatggacgtggccctgagatcacctggacgtgggctgttagctggcgccggcgcactctgcatgacgcttgctgagtcatcttgcccagactatgagcgcggtcggagggcctgcctgactttgcataggcaccctactccacactgttctacatggggtttacccctaagagtggctgggtcttggcttactgtggtaacggtggaagccctcggagggtggaggatgggggtcaggagaacgggtcaggtaggtcctacaatgcacccccctcccgtaagtggcgcttcccctctactgctacaccatctgctgctgttgctgctcattatcattttgacttgttag

SEQ ID NO: 111488 - DNA, 942 bp, Artificial Sequence
  derived and/or modified sequence
atggccctgcgcatctgtgtgacctacaccccagccctgcccatcggcctgtgcacccgctgctgcctgtgcctggagcagagccccagctggtgccactgcctgcggggcgtgtccttcctgaccttccacctgcaccagagcgtgcccctgggggaccgggacagcctgctgatgttcacccggcaggccggccactttgtggagggcagcaaggccggccgcagccggggccgcctgtgcctgagccaggccctgcgggtggccgtgcggggggcctttgtgtccctgtggtttgctgctggagctggggaccgggagaggaacaagggggacaagggggcccagacaggagctggcctgagccaggaggccgaggatgtggatgtgtcccgggcccggcgggtgacagatgccccccagggcaccctgtgtggcactggaaacagaaacagcggcagccagagcgcccgggtggtgggcgtggcccacctgggggaggccttccgggtgggcgtggagcaggccatcagcagctgcccagaggaggtgcacggccgccacggcctgtccatggagatcatgtgggccaggatggatgtggccctgcggagccctggccggggcctgctggccggggccggggccctgtgcatgaccctggccgagagcagctgcccagactatgagcggggcagaagagcctgcctgaccctgcaccgccaccccaccccccactgcagcacctggggcctgcccctgcgggtggccggctcctggctgactgtggtgacagtggaggccctgggcggctggaggatgggcgtgagaagaacaggccaggtgggccccaccatgcaccccccacctgtgtctggggccagccccctgctgctgcaccacctgctgctgctgctgctgatcatcatcctgacctgctag

SEQ ID NO: 111489 - DNA, 2287 bp, Artificial Sequence
  derived and/or modified sequence
gttactgtcccgcgaacccacatccctacaaagcaggaaagtatgcttgggagaggccaagtgagtggggaatcagcccaaagccaggcgtccagggtctccctcacctgaagctgactttttccccaccttggacagagggcgggagatgccatccccactgaacccagtgctttcaccagccatattagctcccactcaccccccgtcgtggaagcctcggccgtcacacctgcagggccggggcgtgcatggcctcagggatggcctgttcagctgctgggtgactcgggtccaggtgcctcaccacctgctgagctctgtgtgatttctggacacttctgctcgttgcctttgggctcagtgaagagtctggagtttatctggagtgaggtggccggttcttggtgggatctgagcaggacagcgtctggctccttccctcggctcatggccctcagaatctgcgtcacatacaccccagctctcccgataggtctctgcactcgctgttgcctctgcctggaacagtctccctcctggtgtcattgtctccgtggtgtgtccttcctgaccttccacctccaccagtctgtcccccttggggacagggactcgttgctcatgttcacccggcaggctggacacttcgtggagggctccaaagccggcagatcccggggccgcctctgtctctcccaggccctgcgtgttgcggtgagaggagcatttgtgtctctgtggtttgctgctggagctggtgaccgggagagaaacaagggagacaagggtgcccagacaggtgcggggctcagccaggaggcagaagacgtggacgtgtcccgggccaggagggtcacagatgcaccacaaggcactctgtgtggcactgggaacaggaattctgggagtcagtctgcaagggtggtgggcgttgctcacctgggagaagcctttagagtgggcgttgagcaggccattagctcgtgccctgaggaggtgcatgggcggcatgggctctccatggaaattatgtgggcgcgaatggatgtggctctgcgctcacctgggcgaggacttctggccggtgccggggcactctgcatgaccctggcagaatcgagctgccctgactatgaaaggggaagaagagcatgcctgaccctccaccggcaccccacccctcactgctccacctggggcctgcctctgcgggtggctgggtcctggctgactgttgtgactgttgaggccctgggggggtggcgcatgggagttaggaggactggccaggtggggcccactatgcacccacccccagtgtcaggtgcttctcctctcctcctccaccacctcctcctcctcctcctcatcatcatcctcacttgttgaggacgtcctgtgtgccaagtggtttatatgcccagcctcatttaatcctcagaatgactccatgaggtagctactaaaaccccccacttaacagatgaggaaactgaggcctagagaagctcaacaagttgcctaagttccaagtttcctctcccaactctcctaccctctcctcttccttctcctttctcccattcttccctgcctcttccctaactagacaattttttattgagtgtctcccaggtgcaggcatgagccaggtgctgggaaaatcatgataacccagctccttctggtcattttctcagctggttagaggctgggaggacacgcaagttcagctccagccgactggggcattggtggtagcccctggagacattgtgcaatggggctacgaggctgcatctggctccagggaagcgtgttgcaatccatgagtgatgtctgccatgcgtacaggcatggagagtgaggcgcctgtactgtctttctgtagaccctagactggtggggcctctgaaatgcatccagacactgtgctgggtgtgttgcatggccctcccaaccaattcagtatttttctccccattttccagggagaaatctaaggcgtcagaatgtaaggttcttattggaacccaggctccagggtccctggttttctgtgacatcatgctgcaggaccctgtttctctctttgctttggctgctggggagctcagaagggagctttaggcttgctctcagtcaccacattagctcaggggtttgggcatttttgtcgccgtctcctttgggctctgtctcctccctgctgtgcttcctgaggagcaggccggatgtaagttatcaactataaataaaaccaagacttccgttctggctctca

SEQ ID NO: 111490 - DNA, 1996 bp, Artificial Sequence
  derived and/or modified sequence
cttgccttgattctcctgttactgtcccgcgaacccacatccctacaaagcaggaaagtatgcttgggagaggccaagtgagtggggaatcagcccaaagccaggcgtccagggtctccctcacctgaagctgactttttccccaccttggacagagggcgggagatgccatccccactgaacccagtgctttcaccagccatattagctcccactcaccccccgtcgtggaagcctcggccgtcacacctgcagggccggggcgtgcatggcctcagggatggcctgttcagctgctgggtgactcgggtccaggtgcctcaccacctgctgagctctgtgtgatttctggacacttctgctcgttgcctttgggctcagtgaagagtctggagtttatctggagtgaggtggccggttcttggtgggatctgagcagagtccattcaggagcaggaaagttcatctcagaccctaaatccagccacgtcatgccacgcttaacacctctaacaacttcccctggcacttaggacagcgtctggctccttccctcggctcatggccctcagaatctgcgtcacatacaccccagctctcccgataggtctctgcactcgctgttgcctctgcctggaacagtctccctcctggtgtcattgtctccgtggtgtgtccttcctgaccttccacctccaccagtctgtcccccttggggacagggactcgttgctcatgttcacccggcaggctggacacttcgtggagggctccaaagccggcagatcccggggccgcctctgtctctcccaggccctgcgtgttgcggtgagaggagcatttgtgtctctgtggtttgctgctggagctggtgaccgggagagaaacaagggagacaagggtgcccagacaggtgcggggctcagccaggaggcagaagacgtggacgtgtcccgggccaggagggtcacagatgcaccacaaggcactctgtgtggcactgggaacaggaattctgggagtcagtctgcaagggtggtgggcgttgctcacctgggagaagcctttagagtgggcgttgagcaggccattagctcgtgccctgaggaggtgcatgggcggcatgggctctccatggaaattatgtgggcgcgaatggatgtggctctgcgctcacctgggcgaggacttctggccggtgccggggcactctgcatgaccctggcagaatcgagctgccctgactatgaaaggggaagaagagcatgcctgaccctccaccggcaccccacccctcactgctccacctggggcctgcctctgcgggtggctgggtcctggctgactgttgtgactgttgaggccctgggggggtggcgcatgggagttaggaggactggccaggtggggcccactatgcacccacccccagtgtcaggtgcttctcctctcctcctccaccacctcctcctcctcctcctcatcatcatcctcacttgttgaggacgtcctgtgtgccaagtggtttatatgcccagcctcatttaatcctcagaatgactccatgaggtagctactaaaaccccccacttaacagatgaggaaactgaggcctagagaagctcaacaagttgcctaagttccaagtttcctctcccaactctcctaccctctcctcttccttctcctttctcccattcttccctgcctcttccctaactagacaattttttattgagtgtctcccaggtgcaggcatgagccaggtgctgggaaaatcatgataacccagctccttctggtcattttctcagctggttagaggctgggaggacacgcaagttcagctccagccgactggggcattggtggtagcccctggagacattgtgcaatggggctacgaggctgcatctggctccagggaagcgtgttgcaatccatgagtgatgtctgccatgcgtacaggcatggagagtgaggcgcctgtactgtc

SEQ ID NO: 111491 - DNA, 942 bp, Artificial Sequence
  derived and/or modified sequence
atggccctgcggatctgcgtgacctacacccccgccctgcccatcggtctctgcacacggtgttgtctgtgtctggaacaaagtcctagctggtgtcactgtctccgcggcgtgtcgttcctcacattccacctgcatcagagcgttccattgggcgatcgtgactccctgctgatgtttacacgccaagcaggtcacttcgtggaaggttctaaggcaggcaggagccgaggccggttgtgcctttcacaggcactccgcgtcgccgtgcgtggcgcattcgtctccctctggttcgcagccggggcaggggatcgcgagcgtaataaaggggataagggagcacagaccggtgccggcctctctcaagaggctgaggatgtagacgtgtcacgtgcccgtcgggtgaccgacgctccccaagggaccctctgtggaaccggaaaccgaaactccgggtcacagagtgctcgtgtggtgggtgtggctcacttgggggaagcgtttcgcgtcggcgtggagcaggccatcagctcctgcccggaagaggtacatggtcgccatggattgtcaatggagatcatgtgggccaggatggacgtcgccctcaggagtcctggacgaggcctcctggccggcgctggagcgttgtgcatgactctggcagagagttcttgtccagattatgagcggggtcggcgggcatgtcttacgctgcatagacacccaactcctcactgctcgacatggggcctgccattacgggtcgctggatcatggctgaccgtggtcacagtggaggccctcggcgggtggaggatgggtgtgcggcgcaccggtcaagttggaccaactatgcacccaccaccagtgtccggcgcctcacccctgttacttcaccatctattgcttctcttgctgattataattctcacttgttag

SEQ ID NO: 111492 - DNA, 942 bp, Artificial Sequence
  derived and/or modified sequence
atggccctgcggatctgcgtgacctacacccccgccctgcccatcggcctatgcaccagatgctgcttatgtctggaacagtcaccctcctggtgtcactgtctgcgaggtgtgagcttccttacctttcacctgcatcagagcgtgcccctgggcgaccgtgatagcttactcatgtttacaaggcaagccggtcacttcgtggaagggagtaaggctggtagatctcgaggcaggctctgcttgtcacaggcactgcgagtggcggtccgcggagccttcgtgtcactatggtttgcagccggagctggggaccgggaacgcaataagggagacaagggcgcccaaactggcgcgggcttatcccaggaagctgaggatgtggatgtgagccgtgcgcgaagagtgactgatgcgcctcaagggacgctttgtggcactgggaaccgaaattctggatcacaaagtgctcgcgtcgtcggtgtggcacatttgggagaggcgtttagagttggcgttgaacaggcaatcagtagttgccccgaggaagtccacggccgccatggcctgtcgatggaaatcatgtgggcccgaatggacgtggcactccggagtcccggccgcgggttgctggccggagcgggcgcactttgtatgactctcgccgagtcctcctgccccgattatgagcgcggtaggcgagcctgcttgacgctgcaccggcatcccacaccccactgcagcacttggggcttaccactccgggtggctggctcttggctgacagttgtaactgtggaggcccttggaggatggcgaatgggcgtccggcggactggccaggtgggtcctaccatgcacccccctcccgtgtcaggtgccagcccactcctgctccaccatctcctcctgttactgctaatcatcattttaacatgctag

SEQ ID NO: 111493 - DNA, 942 bp, Artificial Sequence
  derived and/or modified sequence
atggccctgaggatttgtgtgacgtatacccctgcactgcccatcggtctctgtacaaggtgctgtttgtgtctggagcaatcaccgtcctggtgccactgcttgcggggtgtgagctttctcacctttcacctccatcagagcgtccccctgggcgacagagactctctgctgatgttcaccaggcaagcgggtcacttcgtagagggatcgaaagctgggaggtcacggggacgtctgtgcctgtctcaagcattacgcgtggcagtcagaggagcattcgttagcctgtggtttgcggcaggtgccggagaccgtgagcggaataagggggataagggagcacagactggggctggactgtcccaggaggcagaagatgtcgatgtatcgagagccagacgagtgacagacgctccccagggcacactttgcggaacgggtaataggaacagcggcagtcaatctgctcgtgtggtcggtgtggctcaccttggggaagccttccgtgtaggagtggagcaggcaatctccagctgcccagaggaagttcatgggcgtcatggtttatccatggaaattatgtgggcccgaatggacgtagcgttgcggtctcctggacgtggcctactggcaggagctggcgctctctgtatgacgctcgccgagagtagctgcccggactatgagcgaggaagacgcgcatgccttacactgcacaggcacccgacgccacactgttcaacatggggactgccgctgcgcgtggcgggtagctggctgactgttgtcactgtagaggctctcgggggttggcggatgggcgtccgcaggactggtcaggtcgggcctaccatgcaccccccacccgtgtctggagcttccccactcctgctacatcacctgctactactgctgttgattattatccttacctgttag

SEQ ID NO: 111494 - DNA, 942 bp, Artificial Sequence
  derived and/or modified sequence
atggctctgagaatctgtgtcacctatactcccgcattacccatcggcctgtgcactaggtgttgcctatgtttggaacagtctccgagctggtgccactgcttgcgtggggtttcattccttacatttcacctgcaccagtctgtacccctgggtgatagagactcactgctgatgttcaccagacaggcgggtcactttgtggagggaagcaaggcagggaggtccagaggccgtctctgtttgagtcaagcacttcgagttgccgtcagaggggcattcgtgtcgttgtggtttgccgctggcgctggggatcgcgaaaggaacaaaggcgacaagggcgcacagaccggggcaggcctgagccaggaggctgaagacgtggatgtgtctagagctaggcgcgtcactgacgcgcctcaaggcaccctgtgtggtaccggtaatcgcaacagtggatcccaatctgccagagtggtcggtgtcgcccaccttggcgaggcttttcgagtcggggttgagcaagccatcagctcctgccctgaagaggttcacgggaggcacgggctgtccatggaaatcatgtgggctaggatggatgtggcccttcgtagtcctggacgcggattgctcgctggggcaggcgcattatgcatgaccctggccgagtcgtcttgcccagactatgaacgaggtaggagggcatgcctgacactacaccgccatccaacaccccattgttctacttgggggttgcctttgcgggttgcaggtagctggctcacggtagtgacagttgaagccttggggggatggcgcatgggggtccgcaggactggacaggtgggacccaccatgcatcctccacccgtgtctggggcatcaccactattgctccatcacctgctgcttttgttacttatcataattctgacatgttag

SEQ ID NO: 111495 - DNA, 942 bp, Artificial Sequence
  derived and/or modified sequence
atggccctgagaatctgcgtgacctacacccccgccctgcccatcggcctgtgcaccagatgctgcctgtgcctggagcagagccccagctggtgccactgcctgagaggcgtgagcttcctgaccttccacctgcaccagagcgtgcccctgggcgacagagacagcctgctgatgttcaccagacaggccggccacttcgtggagggcagcaaggccggcagaagcagaggcagactgtgcctgagccaggccctgagagtggccgtgagaggcgccttcgtgagcctgtggttcgccgccggcgccggcgacagagagagaaacaagggcgacaagggcgcccagaccggcgccggcctgagccaggaggccgaggacgtggacgtgagcagagccagaagagtgaccgacgccccccagggcaccctgtgcggcaccggcaacagaaacagcggcagccagagcgccagagtggtgggcgtggcccacctgggcgaggccttcagagtgggcgtggagcaggccatcagcagctgccccgaggaggtgcacggcagacacggcctgagcatggagatcatgtgggccagaatggacgtggccctgagaagccccggcagaggcctgctggccggcgccggcgccctgtgcatgaccctggccgagagcagctgccccgactacgagagaggcagaagagcctgcctgaccctgcacagacaccccaccccccactgcagcacctggggcctgcccctgagagtggccggcagctggctgaccgtggtgaccgtggaggccctgggcggctggagaatgggcgtgagaagaaccggccaggtgggccccaccatgcaccccccccccgtgagcggcgccagccccctgctgctgcaccacctgctgctgctgctgctgatcatcatcctgacctgctag

SEQ ID NO: 111496 - protein, 1361 aa, Artificial Sequence
  derived and/or modified sequence
MGAAGRQDFLFKAMLTISWLTLTCFPGATSTVAAGCPDQSPELQPWNPGHDQDHHVHIGQGKTLLLTSSATVYSIHISEGGKLVIKDHDEPIVLRTRHILIDNGGELHAGSALCPFQGNFTIILYGRADEGIQPDPYYGLKYIGVGKGGALELHGQKKLSWTFLNKTLHPGGMAEGGYFFERSWGHRGVIVHVIDPKSGTVIHSDRFDTYRSKKESERLVQYLNAVPDGRILSVAVNDEGSRNLDDMARKAMTKLGSKHFLHLGFRHPWSFLTVKGNPSSSVEDHIEYHGHRGSAAARVFKLFQTEHGEYFNVSLSSEWVQDVEWTEWFDHDKVSQTKGGEKISDLWKAHPGKICNRPIDIQATTMDGVNLSTEVVYKKGQDYRFACYDRGRACRSYRVRFLCGKPVRPKLTVTIDTNVNSTILNLEDNVQSWKPGDTLVIASTDYSMYQAEEFQVLPCRSCAPNQVKVAGKPMYLHIGEEIDGVDMRAEVGLLSRNIIVMGEMEDKCYPYRNHICNFFDFDTFGGHIKFALGFKAAHLEGTELKHMGQQLVGQYPIHFHLAGDVDERGGYDPPTYIRDLSIHHTFSRCVTVHGSNGLLIKDVVGYNSLGHCFFTEDGPEERNTFDHCLGLLVKSGTLLPSDRDSKMCKMITEDSYPGYIPKPRQDCNAVSTFWMANPNNNLINCAAAGSEETGFWFIFHHVPTGPSVGMYSPGYSEHIPLGKFYNNRAHSNYRAGMIIDNGVKTTEASAKDKRPFLSIISARYSPHQDADPLKPREPAIIRHFIAYKNQDHGAWLRGGDVWLDSCRFADNGIGLTLASGGTFPYDDGSKQEIKNSLFVGESGNVGTEMMDNRIWGPGGLDHSGRTLPIGQNFPIRGIQLYDGPINIQNCTFRKFVALEGRHTSALAFRLNNAWQSCPHNNVTGIAFEDVPITSRVFFGEPGPWFNQLDMDGDKTSVFHDVDGSVSEYPGSYLTKNDNWLVRHPDCINVPDWRGAICSGCYAQMYIQAYKTSNLRMKIIKNDFPSHPLYLEGALTRSTHYQQYQPVVTLQKGYTIHWDQTAPAELAIWLINFNKGDWIRVGLCYPRGTTFSILSDVHNRLLKQTSKTGVFVRTLQMDKVEQSYPGRSHYYWDEDSGLLFLKLKAQNEREKFAFCSMKGCERIKIKALIPKNAGVSDCTATAYPKFTERAVVDVPMPKKLFGSQLKTKDHFLEVKMESSKQHFFHLWNDFAYIEVDGKKYPSSEDGIQVVVIDGNQGRVVSHTSFRNSILQGIPWQLFNYVATIPDNSIVLMASKGRYVSRGPWTRVLEKLGADRGLKLKEQMAFVGFKGSFRPIWVTLDTEDHKAKIFQVVPIPVVKKKKL

SEQ ID NO: 111497 - protein, 993 aa, Artificial Sequence
  derived and/or modified sequence
MGAAGRQDFLFKAMLTISWLTLTCFPGATSTVAAGCPDQSPELQPWNPGHDQDHHVHIGQGKTLLLTSSATVYSIHISEGGKLVIKDHDEPIVLRTRHILIDNGGELHAGSALCPFQGNFTIILYGRADEGIQPDPYYGLKYIGVGKGGALELHGQKKLSWTFLNKTLHPGGMAEGGYFFERSWGHRGVIVHVIDPKSGTVIHSDRFDTYRSKKESERLVQYLNAVPDGRILSVAVNDEGSRNLDDMARKAMTKLGSKHFLHLGFRHPWSFLTVKGNPSSSVEDHIEYHGHRGSAAARVFKLFQTEHGEYFNVSLSSEWVQDVEWTEWFDHDKVSQTKGGEKISDLWKAHPGKICNRPIDIQATTMDGVNLSTEVVYKKGQDYRFACYDRGRACRSYRVRFLCGKPVRPKLTVTIDTNVNSTILNLEDNVQSWKPGDTLVIASTDYSMYQAEEFQVLPCRSCAPNQVKVAGKPMYLHIGEEIDGVDMRAEVGLLSRNIIVMGEMEDKCYPYRNHICNFFDFDTFGGHIKFALGFKAAHLEGTELKHMGQQLVGQYPIHFHLAGDVDERGGYDPPTYIRDLSIHHTFSRCVTVHGSNGLLIKDVVGYNSLGHCFFTEDGPEERNTFDHCLGLLVKSGTLLPSDRDSKMCKMITEDSYPGYIPKPRQDCNAVSTFWMANPNNNLINCAAAGSEETGFWFIFHHVPTGPSVGMYSPGYSEHIPLGKFYNNRAHSNYRAGMIIDNGVKTTEASAKDKRPFLSIISARYSPHQDADPLKPREPAIIRHFIAYKNQDHGAWLRGGDVWLDSCRFADNGIGLTLASGGTFPYDDGSKQEIKNSLFVGESGNVGTEMMDNRIWGPGGLDHSGRTLPIGQNFPIRGIQLYDGPINIQNCTFRKFVALEGRHTSALAFRLNNAWQSCPHNNVTGIAFEDVPITSRVFFGEPGPWFNQLDMDGDKTSVFHDVDGSVSEYPGSYLTKNDNKWHSLASKAASGPSG

SEQ ID NO: 111498 - DNA, 4086 bp, Artificial Sequence
  derived and/or modified sequence
atgggtgcggccggtagacaggattttctgtttaaggccatgctcacaatctcatggcttactctgacttgtttccctggagcaacatcgaccgtagcggcaggttgcccagatcaaagcccagagcttcagccttggaaccctgggcacgatcaggaccatcacgtgcacattgggcaggggaaaactcttctgctcacctctagcgctactgtgtattctatccacatttctgagggcgggaaattagtcatcaaggatcatgacgagcccatcgtcctgcgcactaggcacatccttatcgacaatggaggagagctgcacgctggatcagccctttgtccattccagggtaattttaccatcattctgtatggacgcgctgacgagggtattcaaccagatccctactatggtctaaagtatattggcgtagggaaaggtggagcgttggagctgcacggtcagaagaaactgagctggacgtttctgaataagacactgcaccctggggggatggccgaaggaggatacttctttgagcgctcctggggtcaccggggagtgatcgtgcacgttatcgacccaaaatcaggaacagtgattcattcagacagattcgacacatatcgaagtaaaaaagagtccgagcggctggtgcaatacttaaacgccgtccctgacgggcgcatcttgagcgtcgcagttaatgacgagggatcaaggaaccttgatgacatggcgaggaaggcaatgacgaaactcggtagcaaacacttcctacacttgggcttccggcacccatggagctttctgacagtgaaaggaaatcctagctcgagtgtagaggaccacatagaatatcacggacaccggggaagcgccgccgcccgagtctttaaactgtttcagactgaacatggcgaatattttaacgtgtcgctgagctctgagtgggtgcaggacgtggagtggaccgaatggttcgatcacgataaggtctcccaaacgaagggaggggaaaaaataagcgatctttggaaggcacatccaggtaagatttgtaaccggcctattgatatacaagccactaccatggacggtgtaaacctgtccacagaggtggtgtacaaaaagggacaagactatcgattcgcctgttacgatcgaggacgcgcttgtcgcagctacagagtgagatttctgtgcggcaagcctgtgaggccgaagctcaccgtgacgattgacactaatgtgaattccacgatcttgaatctggaagataatgtgcagagttggaagcctggagacaccctggtgatcgcttctactgattacagtatgtaccaagctgaagagttccaggtcctgccttgccgcagttgcgcgccgaatcaggtgaaggtggctgggaagcctatgtacttgcatataggcgaagagatcgacggtgtcgacatgagagccgaagtgggcttactgtcacggaacattattgtgatgggtgagatggaggacaaatgctacccataccgaaatcatatttgcaattttttcgatttcgacactttcggtggacacatcaaatttgcccttgggttcaaagccgcacacctagagggaacagagctgaagcacatggggcaacagcttgttgggcaatacccgattcacttccacctcgcaggagatgttgatgagagaggtggctacgaccccccaacttacattagagacctctccatccaccacaccttttccaggtgtgtgaccgtgcatggcagtaacgggctcctgatcaaagacgtggtggggtacaatagtttaggccattgcttctttaccgaagatggtcctgaagagcgcaacaccttcgatcattgtcttggactgctggtgaaatcgggcacgttgctgccttccgaccgtgactcaaagatgtgtaagatgatcacagaagacagttatccgggctacatcccaaagcctagacaggattgtaatgctgttagtacattctggatggcgaaccccaacaataacctgattaactgcgctgcagcgggcagtgaggagaccggcttctggtttatcttccaccatgttccaacaggtcctagcgtggggatgtactcccccggctactcagaacacatccccctcggcaagttttacaataatcgcgcacactctaactatcgggccggcatgattattgacaacggagtgaagacaaccgaagcgtctgctaaagataagcgcccgtttcttagcatcatctcagcccggtactccccccatcaggatgccgatcccctcaagcctcgggaacctgctattataaggcattttatcgcatacaaaaaccaagatcatggagcatggctccggggcggcgacgtgtggctagactcctgtcgtttcgcagataacggaattgggctgacgctcgccagcggcggaacattcccgtacgatgatgggtccaaacaggagattaaaaactcattattcgtcggagaatctggaaatgtggggactgaaatgatggacaaccggatttggggacctggcggcctggatcactccggcagaacccttcctataggacagaacttccctatccgaggaatccagctgtacgatgggcctatcaatattcagaactgtactttccgaaagttcgtggccttagaagggagacatacttccgcactggcttttcgactgaataacgcctggcaatcttgtccccataataacgtgacggggatcgccttcgaagacgtccccattactagcagggtgttttttggcgaacccgggccctggtttaatcagttggacatggacggagacaaaaccagcgtgtttcacgatgtggatggtagcgtaagtgaatatcccggatcatatctcacaaaaaacgataattggctggtgcgtcatcctgactgcattaacgtgcccgactggagaggggcaatctgctctggctgctatgcccagatgtatatccaggcctacaagacttcaaatctccggatgaagatcattaagaatgatttccctagccatcccctttacctggaaggtgctctgacccgatctactcactatcaacagtatcaacccgtggttacactgcagaaggggtataccatccactgggatcagacggcccctgcagaactggccatatggctcataaactttaataagggcgactggatcagagtaggcctgtgttatcccaggggaaccacgttttctatcctgagtgacgttcataatcggctcctgaagcagacttcaaaaacaggtgtttttgtgagaacattgcagatggacaaggtcgagcaatcctacccgggtaggtcccattactattgggatgaagatagtggattgctcttcctgaagcttaaggctcaaaatgaacgcgaaaagttcgccttttgtagcatgaaaggttgtgagaggatcaagatcaaggcactgatccccaaaaacgccggagtgtctgattgcactgctacggcctatcctaagtttaccgaacgtgccgtggtggacgtcccaatgccaaagaagctttttggcagccagttgaagacaaaagatcactttctggaggtcaagatggaatcctcaaaacagcactttttccacttgtggaatgactttgcgtatattgaggtcgatggcaaaaagtacccctcctccgaagatggcattcaggtagtcgtaatcgacggtaaccagggcagagtggtcagccatacatctttccggaactctattctgcagggaattccctggcagttattcaattatgtggctacgatcccagacaatagcatcgtcctaatggcctcaaagggcagatatgtatcaagaggcccgtggacaagagtgctggaaaagctcggcgcggacaggggtcttaaactgaaggagcagatggccttcgtgggcttcaagggcagctttcgaccaatatgggtaacactcgataccgaggatcacaaggccaaaatatttcaagtcgttcccattcctgtcgttaagaagaaaaagctctag

SEQ ID NO: 111499 - DNA, 4086 bp, Artificial Sequence
  derived and/or modified sequence
atgggtgccgcgggtaggcaggactttctgtttaaggctatgttgactatcagctggcttacactgacatgttttcccggtgcaacctctactgtcgccgcgggctgtcctgatcagagccctgaactccagccttggaacccgggacacgatcaagaccatcatgtgcacataggccagggaaagacactgttgctgacaagctctgccaccgtgtatagtatccacataagtgagggcggaaagctcgttatcaaagaccacgatgagccaattgtactccgtactagacacattctgattgacaacggcggggagttgcatgcagggagtgccctctgtccgttccaaggaaatttcaccattatcctttacggccgagccgatgagggcatacagccagatccttactacgggctgaagtatattggagtgggcaaaggcggagcactagaactgcatggacaaaagaaactctcgtggacattcctgaacaagacgctgcatccaggaggtatggctgagggtggatactttttcgagcgctcatggggccatagaggagttattgtgcacgtgatcgaccctaagtctggcaccgtgatccatagtgaccgattcgatacttacaggtcgaaaaaggaaagcgagcgactggtccagtacctcaatgccgtccccgacgggagaatcctgagcgtggctgtaaacgatgagggcagccggaacctggacgatatggcgaggaaggctatgactaaacttggaagcaagcatttccttcatcttgggtttaggcacccatggtcgttcctgaccgtcaagggaaatccttcctctagtgtcgaagatcacatcgagtaccacgggcaccgtggctcggcagcagcaagagtgtttaagttgttccaaactgagcacggcgaatatttcaacgtttcactaagctcagagtgggtgcaggacgtggaatggaccgagtggttcgaccatgataaggtgtcccagaccaagggcggggagaagatctctgatttgtggaaagctcacccagggaaaatttgcaatagacctatagatatccaagcaacaactatggatggagtaaatctttctaccgaggtggtgtacaaaaaaggacaggattatcgattcgcatgttatgaccggggacgagcgtgtcggagctacagagtccgcttcctttgcggtaaacccgttcgccctaagttgacggtaactattgatactaacgtcaacagtactatcttaaacctggaagacaatgtgcagtcatggaagcctggggatacattggtcatcgcaagcaccgactactctatgtatcaggcagaggagtttcaggtcttaccctgcaggagctgcgcacccaatcaggtgaaggtcgctggcaagcctatgtacctgcatataggagaagagattgacggtgtcgacatgagagcagaggtgggcctgttgtcgaggaacatcatagttatgggtgaaatggaggataagtgctatccatataggaaccacatatgcaactttttcgacttcgatacttttggcgggcatatcaagttcgccttgggcttcaaagccgcccatcttgaaggcaccgagctgaagcacatggggcagcagctcgtgggtcagtaccctatacatttccacctggcaggggacgttgatgaacgcggcggctacgaccccccaacttatatcagggatctgtcaatccaccatacgtttagccggtgcgtgactgttcacggatccaacggactactgatcaaagacgtcgttgggtataattctctgggccactgcttcttcaccgaagacggtcctgaggaaagaaatacatttgatcactgcctggggctcctagtgaaatcgggcaccctgctcccttctgaccgcgactcaaaaatgtgtaagatgattaccgaggattcgtaccccggctacatcccgaagcctcgccaggactgcaacgctgtatcaacattttggatggctaacccaaataataacctcataaattgcgcagccgccggaagtgaggagacaggattttggtttatctttcaccacgtaccaaccgggccttcagttgggatgtatagtccagggtactctgaacacatccccttgggtaagttttataacaatcgtgcccacagtaactatagagccggaatgatcatcgataacggcgttaagacgacggaagcttccgcaaaagacaagagacctttcctatccatcatttccgcgaggtacagcccgcaccaagacgccgatccactgaagcctcgggagccagcaattatccggcactttatagcatacaagaatcaggaccacggtgcctggttaaggggaggcgatgtttggctggattcttgtcggtttgctgataacgggattgggttgaccctcgcaagtggcggcacattcccgtatgacgacggttcaaagcaggagatcaagaattcgctgtttgtcggggaatctggcaacgtagggactgaaatgatggacaacaggatctggggcccggggggacttgatcactccggtaggaccctacctattggccagaacttcccgattagaggcattcagttgtatgacgggccaattaatattcagaattgtacttttcgcaagtttgtggctctcgaagggagacatacatctgctctagcgttccgcctgaataacgcttggcaatcttgcccacataataacgtgacgggtattgctttcgaagatgtgcctatcacttcccgggtgttttttggtgagccgggcccatggttcaatcaactcgacatggacggagacaagaccagcgtgttccacgatgttgacggcagtgtcagcgagtaccctggcagttacctgacaaaaaatgataactggctcgtgcgccatccagactgcattaatgtaccagactggcgtggcgcaatttgctccggctgctacgcacaaatgtatatacaggcctataagaccagcaatctgcgcatgaagatcattaagaacgattttccctcccatcctctttatctggaaggcgcactcaccagatctacccattaccagcagtaccagccagtggtcaccctgcaaaagggctatactattcattgggaccagactgcccctgctgaactagcaatatggctcatcaacttcaacaagggtgactggattcgagtcggattgtgctacccgcgagggacaaccttcagtattctctctgacgtgcacaacaggctgctgaagcaaacatctaaaaccggagtctttgtgcgcacattgcagatggacaaggtggaacagtcataccccggcaggagtcactattattgggacgaggattctggcctcttgttccttaaactgaaggcacagaatgaacgggagaaattcgccttttgcagcatgaaaggctgtgagaggatcaagatcaaagcactcattcctaagaacgccggggtgtccgactgcacagccacagcttaccccaagtttacggagcgcgctgtcgtggatgtgcctatgccaaaaaaactgttcggttcacagctgaaaaccaaagaccacttcctcgaagtaaagatggagtcaagtaagcagcacttctttcatctgtggaacgactttgcttacattgaggtggatggcaaaaagtatccatcaagtgaagatgggatccaagtcgtggttatagacggtaatcaagggagagtagtgagccacaccagctttcggaattccatcctccagggaatcccctggcagctttttaattacgtggcaacaattccagataacagcattgttctgatggcatctaaaggcaggtatgtgtcccggggaccgtggactagagtgttggagaagctgggcgcggacagaggactcaaactcaaggaacaaatggcattcgtcgggttcaaaggtagctttagacccatctgggtgacgctcgacaccgaggaccataaagccaagatattccaggtggttcccattcccgtggtgaaaaagaagaagctgtag

SEQ ID NO: 111500 - DNA, 2982 bp, Artificial Sequence
  derived and/or modified sequence
atgggagcagcaggtcggcaggactttctgtttaaggccatgcttacaatctcttggctgaccctgacatgcttccctggagcaaccagcacagtggccgcagggtgtccagaccagagcccggagctgcaaccttggaacccgggacacgaccaggaccaccacgttcacattggccaaggtaaaacattgctactaacctcctcggctactgtgtactccatacacatctcagaagggggcaagttggtgattaaggaccatgatgagccgattgtactcaggactcgacacatattaattgataatggaggcgagctgcacgccggaagcgccctctgtccttttcagggcaatttcaccatcatcctatatgggcgggctgatgagggcattcagccagacccctactacggtctcaaatacattggcgtggggaaaggtggagctctagaattgcacggacaaaaaaaattgagttggacattcctgaacaagactctgcatccaggcggaatggccgaaggaggctatttcttcgagagaagctgggggcataggggtgtgattgtgcatgtgatcgatcctaagtctggaaccgtcatccactccgaccgctttgatacttatcggtctaagaaggaatccgagagactagtccagtacttaaatgccgtcccagatggaagaattctcagcgtcgccgtgaatgacgaggggtctagaaacctagatgatatggccaggaaggctatgaccaaactcgggtctaaacacttcctccatctgggctttaggcacccttggagcttcctgaccgtgaagggcaatcccagcagctctgtggaggatcatattgaataccatggccaccggggttcagcagccgctagggttttcaagctctttcagacagagcacggcgagtattttaatgtgtcactgtcctctgagtgggtccaggacgtggagtggacagagtggttcgatcatgataaagtcagccagacaaaaggaggggagaaaatttccgacctctggaaagcccaccccgggaagatttgtaaccgccctatcgacatccaggccactacgatggacggtgtgaatttgtccacagaggtggtgtacaagaaaggccaggactatcgtttcgcctgctacgatcgcggacgggcctgtcggagctatcgcgtcagattcttgtgtgggaagccggtgaggccaaagcttacagttaccatcgacacaaacgtaaatagcaccattttaaacctggaagacaatgttcagagttggaagcctggggatactttagtgatcgcaagcactgattactcaatgtaccaggcagaggagttccaggtgcttccctgcagatcatgcgcacctaaccaggtaaaagtggcaggcaaaccgatgtatctgcatataggcgaggaaatcgacggcgttgatatgcgggccgaggtcgggctgctgtcaagaaatattatcgtcatgggagagatggaagataagtgctatccttatcggaatcatatttgtaatttcttcgacttcgatacatttgggggtcacattaagtttgcactcggatttaaagctgctcacctcgagggcactgagttgaagcatatggggcaacagttagtcggacagtaccccatccattttcacttggcaggagatgtggatgagcgtggaggctacgatccaccaacctacatccgcgatctgagcattcaccacaccttctcccggtgtgtgactgttcacggcagcaacggcctgttgattaaagacgtggtcggatacaatagcctgggacactgcttctttactgaggacggccctgaggagaggaatacattcgatcactgtcttggactgctcgtgaagtccggaactctgcttccctccgatagagactccaagatgtgcaagatgattactgaggactcataccccggatatataccaaagccgcggcaagactgcaatgctgtatcaactttttggatggccaacccaaacaacaacctaattaactgtgcagcagccgggagcgaagagactggcttttggttcatcttccaccacgtaccgactgggccatccgtcgggatgtattctccgggctatagcgagcacatcccattaggcaagttctataacaaccgggcacattcaaactaccgtgccgggatgatcattgacaacggcgtgaagacaacagaggcaagtgccaaagataaacggccctttctgtcaatcataagtgcccggtattcccctcatcaggacgccgatcccctcaaacccagagagccggctatcatcagacactttatcgcttacaaaaaccaggatcacggcgcgtggctgagaggtggggacgtgtggctcgactcgtgtaggttcgccgataatgggattgggctcaccctcgctagcggcggcacgtttccctacgacgacggcagcaagcaggaaataaagaattctctgttcgtgggtgaaagcgggaacgttggcacagagatgatggacaatagaatctggggtcctggcgggcttgatcactccgggaggacgctgccgatagggcagaatttccctattcgaggtatccagctgtacgatggtccaatcaatatccagaactgcacgttccgaaagtttgttgctctcgaagggagacacacctctgcattggcctttcgcctgaataacgcatggcagtcttgtccccacaataacgtgacaggcattgcattcgaagatgtgcctatcacctcaagagtgttcttcggtgagcctggcccatggttcaaccagctcgacatggacggtgacaagacttcagtgttccatgatgtagacggatcggtttcagaataccctggctcctatctgactaaaaacgataacaaatggcactcccttgccagcaaagcggcatcaggcccatcggggtag

SEQ ID NO: 111501 - DNA, 4086 bp, Artificial Sequence
  derived and/or modified sequence
atgggcgccgcagggagacaagacttcctcttcaaggccatgctgaccatttcctggctaactcttacctgttttcctggtgccacaagcacggtggccgccggctgtcctgatcaatctcccgaattacaaccatggaatccaggacacgatcaggaccaccacgtacatatcggccagggcaagactttgcttctgacttcatcagcaacggtgtatagtatccatattagcgaggggggtaagctggttattaaagaccatgatgaacccattgtgctacggacaagacatattctcatcgataacgggggtgagcttcacgccgggagtgcactgtgcccgttccagggaaactttactattatcctgtacggtagagccgacgagggcatacagccagatccgtattacgggttgaaatatattggtgtgggtaaaggcggcgcactcgaattacacggccagaagaagctttcatggaccttcctcaataagacattacaccccgggggtatggcagaggggggatatttttttgaacgctcttggggccaccgaggagtgatagtacatgtcatcgaccctaagtctggcaccgtgattcattctgaccggttcgatacatatcgctctaagaaagagtccgagagactcgtgcaatacttaaacgccgtcccggacggcaggattctctctgtcgccgttaacgacgaggggtcaaggaatcttgatgacatggctcggaaagccatgacgaaactaggatcaaagcacttcctgcacttagggttcagacacccttggagttttctgactgtgaaaggtaatccaagctccagcgtcgaggatcacattgagtaccacgggcatagagggagtgcagcggctagagtcttcaaactgtttcagaccgagcatggcgaatattttaatgtctctctttcctccgagtgggtgcaggacgtggaatggaccgaatggtttgaccacgacaaagtgtcgcagaccaaaggaggagaaaaaatttctgacctgtggaaagcccatcccggaaaaatctgcaatcggcctattgacattcaggcaacaacgatggatggcgtgaacctgagtaccgaagtagtgtataagaaagggcaagattacaggttcgcgtgctatgatagagggcgtgcttgccgctcctatcgcgtgagattcctctgcggcaagcctgtacggcctaagctcactgtgactatcgacactaatgtcaatagcaccatcctgaatctggaagacaacgtgcagagttggaagcccggcgacacactggtgattgccagcacagactacagcatgtatcaggccgaagagtttcaggtgctaccttgcaggagctgtgcacccaaccaggtcaaagtggctggaaaacccatgtatttgcatattggcgaggagatcgacggggtggacatgcgtgcagaggtcggcctgctcagccgcaacattattgtcatgggcgagatggaagacaaatgctatccataccgcaatcatatttgcaatttcttcgatttcgacaccttcggggggcacataaaattcgctctgggctttaaagcggcacatcttgaaggcaccgagctaaaacacatgggacagcagttagtcggtcagtatcctattcattttcatctcgcaggcgacgtggacgagcgtggagggtatgaccccccaacctatatcagggatctgtccattcatcatactttcagtcggtgcgtgactgttcacggcagcaacggactattgattaaagacgtggtcggctacaatagcctcgggcactgcttcttcacggaggacggaccagaggaacggaatacgtttgaccattgtctggggttattggttaagtccgggactttgctgcccagcgatagggatagcaagatgtgtaaaatgattactgaggattcatatccagggtatatacccaagcccagacaagactgtaacgccgtgtcaacattctggatggctaatcctaataacaacctgatcaactgcgccgctgctggatcggaagagaccggattctggttcatctttcaccatgtgcccaccggcccttccgtcgggatgtatagccccgggtactctgagcatattcccctgggtaaattttataataatcgggcacactctaactacagggctggtatgattattgataacggtgtgaagaccaccgaggcgtctgcgaaagacaagaggccttttctgtcaataattagcgcacggtactcaccccaccaagatgccgaccccctcaaaccaagggagccagccatcattaggcactttattgcctataaaaatcaagaccacggcgcttggctgcgcggcggcgatgtttggctggattcttgccggtttgccgacaacggcataggactgactcttgcatctggcggaacttttccttatgacgacggatctaagcaggagataaagaattctctgtttgtcggcgagtcagggaatgtagggactgaaatgatggacaataggatctggggccccggcgggttggaccattctgggaggacattgcctatcgggcagaatttcccgattcgggggatccaactgtacgatggcccaattaacatccaaaattgcacctttagaaaatttgtagcgcttgaagggcgtcatacctctgcattggctttccgtctgaataatgcctggcagtcctgtcctcacaacaatgtgaccggaatagcgtttgaagacgtacctattacaagccgcgtgttttttggagagccagggccctggttcaaccaactcgacatggacggggataagacctctgtgtttcacgatgtggacgggagcgtgtctgagtatccaggaagctacctcaccaaaaatgacaactggctagtgaggcatcccgactgcatcaacgtgccggattggcgcggtgccatatgttctggctgctatgcccagatgtatattcaggcatacaagaccagcaatctacgaatgaagatcatcaaaaacgacttcccatcacatccgttgtatttagagggcgctcttaccaggtcaactcactaccagcagtatcagcccgtcgtgacattgcaaaagggatataccattcattgggaccagaccgctcccgccgagctggccatctggctcatcaacttcaataagggcgactggatcagggtcgggctctgttacccccggggcactacatttagcatactaagcgacgtccacaacaggcttctgaaacagacctcgaaaaccggagtcttcgtgaggacactgcaaatggacaaagttgagcagtcatatcctggacgttcacactactattgggacgaggactctggtctactctttctgaagctcaaagcccaaaatgagagggaaaagtttgcattttgttcaatgaaaggctgtgaacggataaagattaaggctcttatacccaagaacgcaggagtgtcagattgtactgccacagcatacccaaagtttactgaacgggccgtagtggatgtgcctatgcctaaaaagctctttggaagccagctcaaaacgaaggaccatttcctcgaggtcaaaatggagtcatccaagcagcactttttccatctgtggaacgattttgcctatatcgaagttgacggtaagaagtatccatcctcagaggatgggatacaagtggttgtgatcgacgggaaccagggccgagtcgtgagccatacatctttcagaaactcaatcttgcagggcatcccatggcaactgttcaattatgtagcaacaatcccagacaatagcatagtgctgatggcctccaaggggcgatacgtctcccggggtccctggactcgagtgctggagaagctcggagcggacaggggcttgaaattgaaagaacagatggccttcgtgggttttaaaggttccttccgcccaatctgggtgaccctggatacagaggaccataaggcaaagatattccaggtagtccctattcctgtggtgaagaagaagaaactttag

SEQ ID NO: 111502 - DNA, 4086 bp, Artificial Sequence
  derived and/or modified sequence
atgggcgccgccggccggcaggacttcctgttcaaggccatgctgaccatctcctggctgaccctgacctgcttccctggggccaccagcacagtggccgccggctgcccagaccagagccctgagctgcagccctggaaccctggccatgaccaggaccaccacgtgcacatcggccagggcaagaccctgctgctgaccagcagcgccaccgtgtacagcatccacatcagcgagggcggcaagctggtgatcaaggaccatgatgagcccatcgtgctgcggaccaggcacatcctgattgacaatggaggagagctgcatgctggcagcgccctgtgccccttccagggcaacttcaccatcatcctgtatggccgggcagatgagggcatccagcctgacccctactacggcctgaagtacatcggcgtgggcaaaggaggagccctggagctgcacggccagaagaagctgtcctggaccttcctgaacaagaccctgcaccctgggggcatggccgagggcggctacttctttgagaggtcctggggccaccggggcgtcatcgtgcacgtgattgaccccaagagcggcaccgtcatccacagcgacagatttgacacctaccgcagcaagaaggagagcgagcggctggtgcagtacctgaatgctgtgcctgatggccgcatcctgtctgtggccgtgaatgatgagggcagcaggaacctggatgacatggccaggaaggccatgaccaagctgggcagcaagcacttcctgcacctgggcttccgccacccctggagcttcctgactgtgaagggcaaccccagcagctctgtggaggaccacatcgagtaccacggccaccggggcagcgctgctgcccgggtcttcaagctgttccagacagaacatggagagtacttcaacgtgtccctgagcagcgagtgggtgcaggatgtggagtggacagagtggtttgaccatgacaaggtgtcccagaccaagggcggggagaagatcagtgacctgtggaaggcccaccctgggaagatctgcaaccggcccatcgacatccaggccaccaccatggatggagtgaacctgagcacagaggtggtgtacaagaagggccaggactacagatttgcctgctatgaccggggccgggcctgccgcagctacagagtgcgcttcctgtgtgggaagcctgtgcggcccaagctgactgtgaccatcgacaccaacgtgaacagcaccatcctgaacctggaggacaacgtgcagagctggaagccaggggacaccctggtgattgccagcacagactacagcatgtaccaggccgaggagttccaggtgctgccctgccgcagctgtgcccccaaccaggtgaaggtggccggcaagcccatgtacctgcacatcggggaggagattgatggagtggacatgagagctgaggtgggcctgctgagcaggaacatcatcgtgatgggagagatggaggacaagtgctacccctacagaaaccacatctgcaacttctttgattttgacaccttcggcggccacatcaagtttgccctgggcttcaaggccgcccacctggagggcacagagctgaagcacatgggccagcagctggtgggccagtaccccatccacttccacctggccggagatgtggatgagcggggcggctatgacccccccacctacatccgggacctgagcatccaccacaccttcagccgctgtgtgacagtgcacggcagcaatggcctgctgatcaaggatgtggtgggctacaacagcctgggccactgcttcttcacagaagatggccctgaggagaggaacacctttgaccactgcctgggcctgctggtgaagagcggcaccctgctgcccagcgaccgggacagcaagatgtgcaagatgatcacagaagattcctacccaggctacatccccaagccccggcaggactgcaatgctgtgtccaccttctggatggccaaccccaacaacaacctgatcaactgtgccgccgccggcagcgaggagaccggcttctggttcatcttccaccacgtgcccaccggccccagcgtgggcatgtacagccctggctacagcgagcacatccccctgggcaagttctacaacaacagagcccacagcaactacagagctggcatgatcatcgacaatggagtgaagaccacagaggccagcgccaaggacaagaggcccttcctgagcatcatcagcgcccgctacagcccccaccaggatgctgaccccctgaagccccgggagcccgccatcatccgccacttcatcgcctacaagaaccaggaccacggggcctggctgcggggaggagatgtgtggctggacagctgccgctttgctgacaatggaattggcctgaccctggccagcggcggcaccttcccctatgatgatggcagcaagcaggagatcaagaacagcctgtttgtgggggagagcggaaatgtgggcacagagatgatggacaaccgcatctggggccctgggggcctggaccacagcggccgcaccctgcccatcggccagaacttccccatccggggcatccagctgtatgatggccccatcaacatccagaactgcaccttcaggaagtttgtggccctggagggccgccacaccagcgccctggccttccggctgaacaatgcctggcagagctgcccccacaacaacgtgactggaattgcctttgaagatgtgcccatcaccagcagggtcttcttcggggagcccggcccctggttcaaccagctggacatggatggagacaagaccagcgtcttccatgatgtggatggctctgtgtctgagtacccaggcagctacctgaccaagaatgacaactggctggtgcgccacccagactgcatcaacgtgcctgactggaggggggccatctgcagcggctgctacgcccagatgtacatccaggcctacaagaccagcaacctgaggatgaagatcatcaagaatgacttccccagccaccccctgtacctggagggcgccctgaccaggagcacccactaccagcagtaccagcctgtggtgaccctgcagaagggctacaccatccactgggaccagacagccccagctgagctggccatctggctgatcaacttcaacaagggggactggatccgggtgggcctgtgctacccccggggcaccaccttcagcatcctgagtgatgtgcacaaccggctgctgaagcagaccagcaagacaggagtgtttgtgaggaccctgcagatggacaaggtggagcagagctacccaggccgcagccactactactgggatgaagattctggcctgctcttcctgaagctgaaggcccagaatgaaagagagaagtttgccttctgcagcatgaagggctgtgagcgcatcaagatcaaggccctgatccccaagaatgctggggtgtctgactgcacagccacagcctaccccaagttcacagaaagagctgtggtggatgtgcccatgcccaagaagctgtttggcagccagctgaagaccaaggaccacttcctggaggtgaagatggagagcagcaagcagcacttcttccacctgtggaatgactttgcctacatcgaggtggatggcaagaagtaccccagcagtgaagatggcatccaggtggtggtgattgatggcaaccagggccgggtggtgagccacaccagcttcagaaattccatcctgcagggcatcccctggcagctgttcaactacgtggccaccatcccagacaacagcatcgtgctgatggccagcaagggccgctacgtgtcccggggcccctggaccagggtgctggagaagctgggcgctgaccggggcctgaagctgaaggagcagatggcctttgtgggcttcaagggcagcttccggcccatctgggtgaccctggacacagaggaccacaaggccaagatcttccaggtggtgcccatccctgtggtgaagaagaagaagctgtag

SEQ ID NO: 111503 - DNA, 2982 bp, Artificial Sequence
  derived and/or modified sequence
atgggcgccgccggccggcaggacttcctgttcaaggccatgctgaccatctcctggctgaccctgacctgcttccctggggccaccagcacagtggccgccggctgcccagaccagagccctgagctgcagccctggaaccctggccatgaccaggaccaccacgtgcacatcggccagggcaagaccctgctgctgaccagcagcgccaccgtgtacagcatccacatcagcgagggcggcaagctggtgatcaaggaccatgatgagcccatcgtgctgcggaccaggcacatcctgattgacaatggaggagagctgcatgctggcagcgccctgtgccccttccagggcaacttcaccatcatcctgtatggccgggcagatgagggcatccagcctgacccctactacggcctgaagtacatcggcgtgggcaaaggaggagccctggagctgcacggccagaagaagctgtcctggaccttcctgaacaagaccctgcaccctgggggcatggccgagggcggctacttctttgagaggtcctggggccaccggggcgtcatcgtgcacgtgattgaccccaagagcggcaccgtcatccacagcgacagatttgacacctaccgcagcaagaaggagagcgagcggctggtgcagtacctgaatgctgtgcctgatggccgcatcctgtctgtggccgtgaatgatgagggcagcaggaacctggatgacatggccaggaaggccatgaccaagctgggcagcaagcacttcctgcacctgggcttccgccacccctggagcttcctgactgtgaagggcaaccccagcagctctgtggaggaccacatcgagtaccacggccaccggggcagcgctgctgcccgggtcttcaagctgttccagacagaacatggagagtacttcaacgtgtccctgagcagcgagtgggtgcaggatgtggagtggacagagtggtttgaccatgacaaggtgtcccagaccaagggcggggagaagatcagtgacctgtggaaggcccaccctgggaagatctgcaaccggcccatcgacatccaggccaccaccatggatggagtgaacctgagcacagaggtggtgtacaagaagggccaggactacagatttgcctgctatgaccggggccgggcctgccgcagctacagagtgcgcttcctgtgtgggaagcctgtgcggcccaagctgactgtgaccatcgacaccaacgtgaacagcaccatcctgaacctggaggacaacgtgcagagctggaagccaggggacaccctggtgattgccagcacagactacagcatgtaccaggccgaggagttccaggtgctgccctgccgcagctgtgcccccaaccaggtgaaggtggccggcaagcccatgtacctgcacatcggggaggagattgatggagtggacatgagagctgaggtgggcctgctgagcaggaacatcatcgtgatgggagagatggaggacaagtgctacccctacagaaaccacatctgcaacttctttgattttgacaccttcggcggccacatcaagtttgccctgggcttcaaggccgcccacctggagggcacagagctgaagcacatgggccagcagctggtgggccagtaccccatccacttccacctggccggagatgtggatgagcggggcggctatgacccccccacctacatccgggacctgagcatccaccacaccttcagccgctgtgtgacagtgcacggcagcaatggcctgctgatcaaggatgtggtgggctacaacagcctgggccactgcttcttcacagaagatggccctgaggagaggaacacctttgaccactgcctgggcctgctggtgaagagcggcaccctgctgcccagcgaccgggacagcaagatgtgcaagatgatcacagaagattcctacccaggctacatccccaagccccggcaggactgcaatgctgtgtccaccttctggatggccaaccccaacaacaacctgatcaactgtgccgccgccggcagcgaggagaccggcttctggttcatcttccaccacgtgcccaccggccccagcgtgggcatgtacagccctggctacagcgagcacatccccctgggcaagttctacaacaacagagcccacagcaactacagagctggcatgatcatcgacaatggagtgaagaccacagaggccagcgccaaggacaagaggcccttcctgagcatcatcagcgcccgctacagcccccaccaggatgctgaccccctgaagccccgggagcccgccatcatccgccacttcatcgcctacaagaaccaggaccacggggcctggctgcggggaggagatgtgtggctggacagctgccgctttgctgacaatggaattggcctgaccctggccagcggcggcaccttcccctatgatgatggcagcaagcaggagatcaagaacagcctgtttgtgggggagagcggaaatgtgggcacagagatgatggacaaccgcatctggggccctgggggcctggaccacagcggccgcaccctgcccatcggccagaacttccccatccggggcatccagctgtatgatggccccatcaacatccagaactgcaccttcaggaagtttgtggccctggagggccgccacaccagcgccctggccttccggctgaacaatgcctggcagagctgcccccacaacaacgtgactggaattgcctttgaagatgtgcccatcaccagcagggtcttcttcggggagcccggcccctggttcaaccagctggacatggatggagacaagaccagcgtcttccatgatgtggatggctctgtgtctgagtacccaggcagctacctgaccaagaatgacaacaagtggcacagcctggccagcaaggccgccagcggccccagcggctag

SEQ ID NO: 111504 - DNA, 4086 bp, Artificial Sequence
  derived and/or modified sequence
atgggcgccgccggccggcaggacttcctgttcaaggccatgctgacgatttcctggcttacactgacctgtttccccggagctacaagcacggtggctgccgggtgccctgaccagtcacctgagcttcagccttggaatccagggcacgatcaggaccatcatgtgcacatcgggcaggggaaaactctcctcctgacttcaagtgcaactgtatattcgattcacataagcgagggagggaaactggttattaaggatcacgacgaacccattgttctgcgtacacgccatatcctaatcgataacgggggtgagctccacgcagggagcgccctgtgcccatttcaggggaacttcactatcattctctatggtagggcggacgaaggcattcagccggatccgtactatggtctcaagtacatcggtgtgggcaaagggggtgctctggagttgcacggtcagaagaagctgagctggacatttctgaacaagaccctgcatccaggtgggatggcagagggaggctattttttcgagcgctcatggggtcacaggggggtgatcgtacacgtaattgaccctaagtccgggacggtgatccactccgatcgctttgacacttatagaagcaagaaggaaagtgagaggttggttcagtatctgaacgccgtccctgatggccggattctgagtgtcgccgtcaacgacgagggttcccgcaatttggacgacatggcccgtaaggcaatgacaaaactgggtagcaaacacttcttacacctgggctttagacacccatggtctttccttaccgtgaaagggaacccttcttcttctgttgaagaccatatcgagtatcacggacaccgaggcagtgccgcggcccgggtttttaagctatttcagaccgaacacggagagtattttaacgtcagtctgtcgtcagagtgggtgcaggatgtggaatggacagaatggtttgaccatgacaaggtctcccagacaaagggtggcgaaaagattagcgacttgtggaaggctcatcccggaaagatatgcaaccggccaatagatatccaggccaccacgatggacggggtcaacctaagcaccgaggtagtgtataagaaaggccaggactaccggtttgcttgttacgatagggggagagcttgtcggtcctaccgagttcgattcctctgcggtaaaccagtgcgcccgaaacttaccgtgaccattgacactaacgtaaattcaaccatcttgaatctcgaggataacgtgcagtcttggaaaccaggagacaccctcgtgatcgcctcaactgactatagcatgtaccaagcggaagagtttcaggtgctgccgtgcaggtcctgcgctcccaatcaggtcaaggttgcagggaagcccatgtatctgcacattggagaggaaatcgatggtgttgacatgcgggctgaagtgggcctgctgagccgcaatattattgtgatgggagagatggaggacaaatgctacccataccggaatcacatttgtaacttcttcgacttcgatacgttcggcggccacattaagttcgcactgggcttcaaggctgcacaccttgaaggcactgagttgaagcatatggggcagcaactcgtggggcaataccctatacactttcatttggcaggcgacgtggacgagagaggaggctacgatccgccaacatatattagggacctatcgatacatcacaccttttctaggtgcgttacggtgcacggtagcaatggccttcttattaaggatgtggtgggctacaacagtctcggccactgcttctttaccgaggatggtcctgaagagcgaaatacgttcgatcactgtttgggcttgctggtcaagtcgggtaccctcctgcccagcgacagagattccaagatgtgcaaaatgattactgaggattcctatcccggctacatccccaaaccaagacaggattgtaatgccgtttccaccttttggatggcaaatcccaacaataatttgattaattgcgccgcagctgggagcgaggagactgggttctggtttatctttcatcacgtgccgactgggccgagtgtggggatgtactctccgggatattccgagcacattccgctgggcaaattttataataatagagcccattctaactatcgggccgggatgattatagataacggtgtcaaaaccactgaggcatccgccaaagacaagaggcccttccttagcatcatctctgcgcggtactccccacatcaagacgccgatccactgaagcccagggagcccgcaatcatacggcactttatcgcatacaagaaccaggaccacggtgcgtggctcagagggggcgacgtgtggctcgattcgtgccgtttcgccgataacgggattggattgacactggcatcagggggtacttttccctatgacgatggatcaaaacaggaaatcaaaaattcactgtttgttggagagtccggtaatgtaggtacagaaatgatggacaatcgaatctgggggcccgggggcctagatcactcaggcaggacactgcctattggccagaactttcccatacgtggaatccaactgtatgatggcccaatcaacattcagaactgcacttttcggaagtttgtggccttggaaggccgacacacctctgccctggccttcaggctgaacaatgcatggcaatcatgtcctcacaataatgtgacaggcatcgcatttgaagatgtgcccatcacctctcgagtatttttcggcgagcccggtccctggttcaaccagttggatatggatggggataagacctccgtcttccatgatgttgacggaagtgtcagcgagtacccgggtagttacttgactaaaaacgacaattggcttgtgcggcatccagactgcatcaacgttccagattggcgcggtgcgatctgtagtggttgctatgcccagatgtacatccaggcatacaagacaagtaacctccgtatgaaaataatcaagaatgacttcccatcccaccccctgtacctggaaggggccctaacccgcagcacccactatcagcagtaccagcctgtcgtgactctccagaagggctatactattcattgggatcagaccgcacctgcagaacttgccatctggctcatcaactttaataagggggattggatccgcgttggactgtgttaccctaggggaaccaccttttccattttgagtgacgtgcacaaccgcctgctcaaacagacctccaagacaggggtgttcgttcgcaccctgcagatggataaagtggagcagtcctatcccggccgaagtcactactattgggatgaagatagtggtttgctctttctcaagctgaaggcccagaacgaacgggaaaagtttgccttttgtagtatgaagggctgcgagcgcattaagataaaagctttgataccgaaaaacgccggggtgtcagattgtacagctacagcttaccccaaatttacagagcgagccgtagtagacgtccccatgcccaaaaaactgttcgggagtcagcttaagacgaaagatcacttcctcgaagtgaagatggagtcatccaaacaacatttttttcacctctggaacgatttcgcttacatcgaggtcgatgggaagaagtatccaagttctgaagacggcattcaagttgtggtgatcgatggaaaccaggggcgggtggtgagccatacctcgtttcgaaattcaattctgcagggcatcccttggcagctgtttaactacgttgcaacgatcccagataacagcatcgtgcttatggctagcaagggccgctacgtctcccgcggtccatggacgcgagttctggaaaaactcggcgcagatcgggggctgaagttgaaagagcagatggctttcgtgggctttaaaggctcttttcggcccatttgggtgaccctcgacactgaagatcacaaggctaagatctttcaggtggtgccaatcccagtcgtgaagaagaaaaaactctag

SEQ ID NO: 111505 - DNA, 4086 bp, Artificial Sequence
  derived and/or modified sequence
atgggcgccgccggccggcaggacttcctgttcaaggccatgctgacaatctcatggctgacactgacctgttttcctggtgcgacgtccacagtcgccgctggatgtccagatcagtctcctgaactgcagccttggaacccaggacatgaccaggatcatcacgttcacatcgggcaaggaaagacgttgcttttgacgagctccgccactgtttacagcatccatatctctgagggtggcaagttggttattaaggatcatgatgaacctattgtgttacgcacaaggcatattctcattgataacggaggagagctccatgccgggtcagcgttgtgtcctttccagggtaatttcaccataatactatatggaagagcagatgaaggaatccaacccgacccatactacggcctgaagtacattggtgtgggcaagggtggcgccctggagctgcatggccaaaagaagctgtcttggacgtttctcaataagacactccaccctggcggaatggctgaaggcggctacttttttgaaagatcatgggggcatcgcggagtgatcgttcacgtgatagatccaaagtcggggaccgtgatccacagtgacaggtttgacacataccgctccaagaaggaaagtgaacggttagttcagtatcttaatgcagtgcccgacggtagaatactgtccgttgcagtcaacgacgagggatctaggaacctcgacgacatggcacgaaaagcgatgacaaagttaggaagtaagcactttctgcacctaggatttagacacccttggagctttctgacagttaagggcaacccttcttcaagcgtggaagaccacattgagtatcacgggcacaggggctctgccgcggccagggtgtttaaactgttccagacagagcatggagagtattttaacgttagcctgtcctctgagtgggtccaggacgtagaatggactgagtggttcgatcacgataaggtgtctcagacgaagggcggcgaaaagatctctgatctctggaaggcccatccaggcaaaatctgtaatcgccctattgatatacaagctactaccatggacggggtgaatctgtctaccgaggtggtgtacaagaagggccaggactacaggttcgcctgctacgatcggggcagggcctgccggagctatagagtgcgcttcctgtgtgggaaacctgtgaggccaaagcttactgtcacaatcgacacaaacgtgaactccactatcctcaatttagaggacaacgttcagtcttggaaaccaggcgacaccctcgtaatcgcttcaacagactacagcatgtatcaggcagaggaatttcaagtgctgccatgcagatcttgcgctcctaaccaggtgaaggtagctggcaagccaatgtacctgcatataggtgaggaaattgacggggtcgatatgcgagccgaggttggcctgctatctcgtaacattatcgtgatgggtgaaatggaagacaaatgctacccataccgaaatcacatctgcaattttttcgattttgacacctttggcggtcatattaaattcgcgctaggctttaaagcagcccatcttgaaggcaccgagctgaagcacatgggccaacagttagtgggccagtaccctatccacttccatttggcaggtgacgtcgatgagagaggaggctacgatccccccacctacattagagatctctccatacaccacacattttctaggtgtgttacagtccacggcagcaacggactcctgatcaaagatgtcgttgggtacaattctctgggccactgtttcttcaccgaagacgggcccgaggagcgaaacacattcgaccattgcctcggactgttggtgaaatctggaactttgctgccttccgaccgggattccaagatgtgtaaaatgattaccgaagattcgtaccccgggtatattccaaagccacggcaggactgcaacgcggtatctaccttctggatggctaatcccaataacaaccttataaattgcgccgctgctggttctgaagagactggcttctggttcatttttcatcatgtacccaccgggccgtctgtgggcatgtactcccctggttatagcgagcatatcccgctcggcaagttctacaacaatagggctcactcaaactacagggcaggtatgatcatagacaatggtgtgaagacaacagaagcctcagccaaggacaaacgaccgttcctctccataatttccgcacgatatagcccccatcaggatgcagatccgcttaagccgcgggagcccgccatcatcaggcacttcattgcctacaagaaccaggaccatggcgcctggctgaggggaggggatgtttggctcgactcatgtaggtttgccgacaacggcatcggcctcaccctggcctctgggggtaccttcccctatgacgacggctccaagcaggaaattaaaaattccctgttcgtgggggaatccggtaacgtggggaccgaaatgatggacaatcgcatctggggcccaggtggtctcgatcacagtggaaggacattaccgatcggtcagaatttcccaatccggggaattcagctgtacgacggcccaatcaacattcagaactgtactttccggaagtttgtggctttagaaggtaggcatactagtgccctggcctttcgactcaacaatgcttggcagtcatgccctcacaacaatgtgaccggtatcgcctttgaagacgtaccaatcacttcaagagtgttctttggcgaacccggtccctggtttaaccagctggatatggatggggataagacctcggtgtttcacgacgtggatgggtctgtttccgagtatcccggttcttacttaaccaaaaatgataactggttagtaaggcatcccgattgcattaatgtgcctgactggcgaggggctatttgtagcggatgttacgctcagatgtacatccaggcttacaagacatcaaatctccggatgaagattattaagaatgacttcccgtcccatccattatatttggagggtgctttgacccgctcaacccactaccaacaataccaaccagtagtcaccctgcaaaagggatacactatccactgggatcaaacggcccctgccgaactggccatctggctcattaactttaacaagggcgactggatccgggtcggcctctgttacccaagaggaactaccttctctattcttagcgatgtccataataggctcctgaagcaaacttcaaaaaccggcgtgtttgtgcgtacacttcagatggataaggttgaacagagttaccctggccgaagccattactattgggatgaggactctgggctcctttttctgaaactgaaggcacagaacgagcgagaaaaattcgcgttctgttccatgaaaggatgtgagagaattaaaataaaggcactgatacccaagaatgcaggggttagcgattgcactgccaccgcctaccccaagttcacagagcgcgccgtggtcgacgtgccgatgcccaagaaactcttcggatcccagttgaagaccaaggatcacttcctggaggtcaagatggaaagttccaaacagcacttctttcacttgtggaatgatttcgcctacattgaggttgacggtaaaaaatatccaagttctgaggatggtatccaggtcgtggttattgacggcaatcagggcagagtagtcagtcacacgtcctttagaaacagcatcctccaggggatcccttggcagctgttcaactacgtcgctacgataccagataatagtattgtgctgatggccagcaaaggtaggtacgtttcaagaggcccgtggaccagggtgctagaaaagctcggagctgatagaggtctcaagctaaaggaacagatggcctttgtggggttcaaaggatccttcagacctatctgggtgactctggacaccgaggatcacaaagcaaaaatctttcaggtcgtacccattccagtggtgaaaaagaaaaagctgtag

SEQ ID NO: 111506 - DNA, 2982 bp, Artificial Sequence
  derived and/or modified sequence
atgggcgccgccggccggcaggacttcctgttcaaggccatgctgaccatcagttggttaaccctgacctgtttccccggagccacatctactgttgccgcgggatgccctgaccaatcaccagaattacagccatggaatccgggccatgatcaggatcatcacgtgcatattggccaggggaagaccctgctgctgacatcctctgccaccgtctacagtatacacatttctgaaggtgggaaactggtcattaaagaccacgatgagccaatcgtccttcgcactagacatattctgattgacaacggcggtgaactgcatgcagggagtgccctatgccccttccagggcaacttcacaatcatactttacggacgcgcagacgaagggatccagcccgacccctactacgggctaaagtatataggcgtcggcaagggaggcgctctggagttacatgggcaaaagaaactgtcttggacgttcttgaataagaccctgcaccccgggggcatggctgaagggggatattttttcgagcgctcttggggacatagaggggttatcgtacatgtgattgaccctaagagcggaaccgtgattcactcagatcgatttgacacctacagatctaagaaagagtcggaacgccttgtacagtatttaaatgccgttccagacggtaggattcttagcgtagctgttaacgacgagggcagccgaaacctggatgatatggccaggaaagccatgaccaaactgggcagcaaacacttcttacacctgggtttcagacatccatggtcgtttttaaccgtgaaaggtaacccatctagctcagtagaagatcacatcgaataccacggtcatcgcggaagcgctgcagcacgggtgttcaagttgtttcaaacagaacacggcgagtattttaacgtgtccttgtcatcagaatgggtgcaggacgtagagtggaccgagtggttcgatcatgacaaggtgagccagacgaaaggcggggagaagatcagtgacctctggaaggcacaccccggaaagatttgtaatcggccaatcgacattcaggctacaacaatggacggagtcaatctgagcacagaggtggtctacaagaaaggacaggattatcgcttcgcctgttatgatcgaggcagggcttgcagatcgtatcgcgtgaggttcctgtgtggcaagccagtaagaccaaagctcacagtgactatcgatacaaatgtcaattccacaatcctgaaccttgaagataacgttcaaagctggaagcctggcgacaccttagttatcgcgtcaactgactactctatgtaccaggccgaggaatttcaagttttgccatgtcgaagttgtgccccgaatcaggtgaaggtagcgggaaagcctatgtatctgcacattggcgaagagattgacggagttgatatgcgagctgaagttggccttttaagcaggaatattatcgttatgggtgaaatggaggataagtgctacccttaccggaatcacatttgcaatttttttgatttcgatacgtttggaggccacataaagttcgcactggggtttaaggcagcccacctggagggcaccgaactcaaacacatgggccagcagctcgttggccagtatcccatccatttccatctggctggcgacgtggatgagcgaggtggctacgatcctcctacgtatattagagacctgagtatacatcacaccttttcacgctgtgtgacagtgcacggaagcaacggactgcttattaaggatgtcgtggggtacaattccctgggacactgcttctttacagaagacggaccagaagagaggaacacctttgaccactgcctgggccttttagttaaaagcggaacacttctgccatctgatcgggactccaagatgtgtaaaatgattactgaagactcctatccggggtatatccccaaacctaggcaggactgcaacgctgtctcgaccttttggatggcaaaccccaataataatttgataaattgcgccgccgcgggtagcgaagagaccggcttctggttcatttttcatcatgtccctacaggaccctcggtcggcatgtactcacctgggtactccgaacatattccattgggcaagttctacaataaccgggcacattcaaactacagggccggcatgattatcgataacggagttaagaccacagaggcaagtgccaaggacaagcgcccatttctctccatcatttcagccaggtatagccctcaccaggacgctgaccccctcaagcccagggagcctgctattatcagacactttatagcctacaagaaccaggatcatggtgcttggctacggggcggagacgtatggttggacagctgtcgttttgcagataatgggatcgggctcaccttggccagtgggggcaccttcccgtacgacgacgggtctaagcaggagattaagaattctctgtttgtgggcgaatctgggaacgtcggtacagagatgatggataaccggatttgggggcctggggggctcgatcactctggtcggaccctgcccatcgggcagaattttcccattcgcggcattcagttatatgacggtcccatcaatattcaaaactgcacctttagaaagtttgtggccctggagggcaggcatacctccgctctggcatttcgcttgaataacgcctggcagtcgtgtccacacaataatgtcacaggcattgctttcgaggacgtccctatcacaagccgggtgttcttcggagagccaggcccctggttcaaccaactcgacatggatggcgacaagacttctgttttccacgatgtggatggatcagtgtcagagtaccccggttcctacctgaccaagaatgacaacaaatggcatagtctggcatcaaaggctgctagcggacctagcggctag

SEQ ID NO: 111507 - DNA, 4086 bp, Artificial Sequence
  derived and/or modified sequence
atgggcgccgccggccggcaggacttcctgttcaaggccatgctgacgattagttggttgacactgacatgtttccctggggccactagcaccgttgcggcaggctgccccgatcagtcacccgagctgcagccttggaatcctgggcacgatcaggatcaccatgtgcacatcggacaggggaagacactcctattgacctccagcgctaccgtgtattccatacatattagcgaaggaggcaagctggtcattaaagaccatgacgagcctatcgttctgaggacacggcatattctgattgacaacggcggggaattgcatgccggctcagctctctgtccgttccaagggaacttcaccatcatcctttacgggagagccgacgaaggcattcagccggatccttattatggtctcaaatatattggcgttggcaaagggggagcactggaactgcacggtcagaaaaagctatcttggaccttcttaaataagaccctacatcctggaggaatggctgagggcggttactttttcgagcgctcttggggccatagaggcgtcatcgtgcacgtgattgatcctaagtcaggcacagttattcactctgacagatttgacacctacagaagtaagaaggagagcgaacgactagtgcagtatctgaatgctgtgcccgacggtcggattctctcagtggctgttaatgatgagggttccaggaacctggatgacatggcacgcaaagccatgacaaagttaggctccaagcactttctacatttgggtttccgacacccgtggtcctttctaacagtaaagggcaacccatcgtccagcgttgaagaccacatcgaatatcatgggcacagagggagcgctgctgcacgggtgttcaagctttttcagactgagcacggagagtacttcaacgtgtcactttcgagcgagtgggttcaggatgtcgaatggaccgaatggttcgatcacgacaaggtgagtcaaaccaagggaggggagaaaatttccgatctctggaaggcccatccaggcaaaatatgcaataggcctattgacatccaggccactaccatggatggcgtgaatctgagtaccgaggtcgtctacaaaaaaggccaggactacaggttcgcttgttatgaccgcggccgagcgtgtcgtagttatagagttagattcctgtgtgggaagcctgtgaggcctaagcttacagtcacgattgacaccaacgtgaacagcacaatcctgaacctcgaagataatgtgcagagctggaaaccaggcgacacattggtcattgcatccacagattattcaatgtaccaagcagaggagttccaggtgctgccgtgccgctcctgtgctcctaaccaagtaaaggtggccggcaaacccatgtatcttcatattggggaggaaatcgatggagtcgatatgcgggccgaagttgggttgttgagtcggaacatcattgtgatgggagagatggaggacaaatgttacccctacagaaaccacatttgtaacttttttgactttgatacgtttggagggcacataaaatttgctctcggatttaaggcagcccacctggaaggcacggagctcaagcatatgggccagcagctggtgggtcaataccctatccactttcatctggccggcgatgtagatgagcgaggaggttacgatccgcctacctacatcagagacctgagcatacatcacaccttctctaggtgtgttacagttcatgggtcgaatggcctgctaatcaaagacgttgtgggatataacagtttggggcactgtttttttaccgaggacgggcccgaagagagaaatacctttgaccattgtctgggtctactggtgaagagcgggaccctgctccctagtgatcgagactcaaagatgtgcaaaatgatcactgaagattcctatccaggatacattccgaagcccagacaggattgtaatgcagtctctactttctggatggccaatcctaataacaaccttattaactgcgctgctgctggatcagaggaaacaggattttggtttattttccaccatgtgcccactggcccctctgtggggatgtatagcccaggatactccgagcacatccccttgggaaaattttacaacaacagggcgcacagcaactaccgggccggtatgatcatcgacaacggtgtgaaaactacagaggcctctgccaaggataagagaccattcctgtccatcatctctgcccggtattcgccccaccaggacgcggatcccctcaaaccaagagagcctgctataatcaggcattttatcgcatataaaaaccaagaccacggtgcctggctacgggggggagacgtctggttagatagctgccggttcgccgataacggcatcggtcttaccctcgccagcggtggcacatttccttatgacgacggtagcaagcaggagataaagaattctctgtttgtgggagagagcgggaacgtgggcactgaaatgatggacaacagaatctggggcccaggaggattggaccattccggacgcaccctgccgattgggcagaactttcctatccgcggtatccagttgtacgatgggcccatcaatattcagaactgcacttttcgcaaattcgtggctctggaaggacgtcatacatccgctctggcttttcggttaaacaacgcttggcagtcgtgccctcacaataacgttacaggcatcgcgtttgaggatgtaccaataacctcgagggtgttttttggagagccggggccttggtttaatcagctggatatggacggtgataagacgagtgtatttcatgatgtagacggtagcgtgagcgaataccccgggagctacctcaccaagaatgataactggctcgtgcggcatcctgattgcatcaacgtgccagattggcgtggggctatatgcagcgggtgctacgctcaaatgtatatccaggcttacaaaacaagcaacttgcgcatgaagatcatcaaaaatgattttccaagccatcccctgtatctggaaggcgcgttaacgagaagcacacattatcagcagtatcagcccgtggtgacactccagaaaggttatacaatacactgggatcagacagctccggcagagctggcaatatggctgattaatttcaacaagggcgactggatccgcgtgggcctgtgctatcctcgcggcactactttttctatcctatccgatgtgcataaccgactcctgaagcaaacaagcaaaacaggagtatttgtccgtacattgcagatggacaaagtggagcagtcgtatccagggaggagtcactactattgggatgaggactctggtctgctgtttctgaagttaaaagcacagaacgagcgcgagaagtttgccttctgctccatgaagggctgcgaacggatcaaaattaaagctcttatcccaaaaaatgcgggcgtgtcggactgcaccgcgaccgcatacccaaagtttacagaacgagcggtggtagatgtaccaatgcccaaaaagctctttggatcccaactgaagaccaaggaccacttcctggaagtcaagatggagtcttcaaagcaacatttctttcatctgtggaacgactttgcgtatatcgaagtcgatggcaaaaagtatcctagcagtgaagatggtattcaagttgttgtgattgatggaaatcaggggagagtggtttcacacacgtcgttcaggaatagcatcctgcagggcatcccgtggcagttatttaactacgttgccactatcccagacaattcaattgtcctcatggcttctaaaggacgctacgtgagcaggggcccatggactagggtgttggaaaaactaggggcagatcgtgggctcaagctgaaggaacagatggcttttgttggatttaaaggcagctttcgcccaatctgggtcacactggacaccgaggaccacaaagctaagattttccaggtggtgccgattcctgtggtgaagaaaaagaagttgtag

SEQ ID NO: 111508 - DNA, 4086 bp, Artificial Sequence
  derived and/or modified sequence
atgggtgcagcagggaggcaggactttctgttcaaagcaatgctgacgattagctggctgacactgacttgttttcctggcgctacttccaccgtcgccgcaggatgcccagaccaatctccggaattgcagccgtggaacccaggtcacgaccaggatcatcatgttcatattggtcaggggaaaaccctgctactaacatcatctgcaacggtgtatagcatccacatttccgaggggggtaagttggtcattaaagaccatgacgaacccattgtattgcggacgaggcacatactgattgacaacggaggtgagcttcatgcaggctccgccctgtgcccattccaggggaacttcacaatcatcttgtatggcagggccgacgaaggaatacagcctgatccatattatggcttaaagtacatcggggtcggaaaggggggagcccttgagctccacggccagaagaagttgtcatggaccttcctgaacaaaaccctgcacccaggcggaatggccgagggcggatatttcttcgagagatcctggggacaccggggtgtgattgtccacgtcattgacccaaagagcgggaccgttattcactccgacaggttcgacacataccggagcaaaaaggagtccgaacgtctggtccagtacctgaatgctgtgcctgacggccgaatattatccgttgctgttaatgacgagggctctcgaaacctggacgatatggctagaaaggccatgaccaagctggggtccaaacacttcctgcatctaggattcaggcacccctggtcctttctgactgtcaaagggaatccgtcctcgagcgtggaggaccacatcgagtatcatgggcataggggttcagcagctgcccgagtcttcaagctttttcagacagagcacggtgagtactttaacgtgtcactctcgtccgagtgggtgcaggatgtagagtggaccgagtggttcgaccacgacaaggtatcacagacgaaaggcggtgaaaaaatttctgatctgtggaaagcccaccccggaaaaatttgtaatcggccaatcgacatccaggctaccactatggacggagtgaatctgtctactgaagtagtgtacaaaaagggccaggactataggtttgcttgctatgaccgtggaagggcttgccgttcctatagagtcaggttcctttgtggaaaacctgtccggcctaagttaaccgtgaccatcgataccaacgtgaacagtaccatcctaaacctcgaggataatgtacaaagttggaagcccggagatacccttgtgattgcttctactgactactccatgtatcaagccgaggaattccaggtccttccctgtaggtcttgcgcaccaaaccaggtcaaggtggccggaaaacctatgtaccttcacattggcgaggagatagatggcgttgacatgcgcgctgaggtcggtctgctcagccgtaacataatcgtgatgggtgaaatggaggataagtgttacccttaccgcaaccacatctgtaatttttttgactttgatacgtttggcggacacataaagtttgccctcggctttaaggctgcacacctggagggaaccgagctcaagcacatgggtcaacagctcgtaggacaataccctatccacttccatctggccggagacgtcgacgaacgaggcggatacgatcctccaacatacattcgagacctctctattcaccacacctttagtaggtgcgtgaccgtgcacggctccaacggattgttaataaaagatgtggtcgggtacaattcactaggccactgcttcttcacggaggatggccctgaagagaggaacacctttgatcactgcctgggcctgttggtcaagtccggcaccttattaccatccgacagggattcaaaaatgtgcaagatgattactgaagacagttatccgggttatatccctaagcccagacaggactgtaatgccgtcagcacattctggatggccaatccaaacaacaatcttatcaattgtgcagccgctggatctgaggagactggcttctggtttatattccaccacgttcctaccggaccatcagtgggaatgtacagcccaggatacagcgaacacatcccactgggcaagttttacaataatagagctcattctaattaccgggctgggatgattatcgataatggtgtgaagacaacggaggcttccgctaaggacaagaggccctttctgtccattatttccgcaagatattctccacaccaagatgctgacccccttaagcccagggaacctgctattattcgccattttatcgcttacaaaaatcaagaccacggggcatggcttagaggaggagacgtatggctggattcgtgccgcttcgcagacaacgggatcggactgactctagcaagtggaggcacgttcccttacgatgatggatcaaaacaggagataaagaactctctcttcgtgggtgaaagcggtaatgtcggcaccgagatgatggacaaccgaatctggggcccaggcggactggatcattctggcagaacgctacccatcggccagaattttcctattagaggaatacagctgtatgacgggcctattaacatccaaaactgcaccttcagaaagttcgtcgccttagaaggaaggcatacaagcgctctggcgtttcgtcttaataacgcatggcagtcttgcccacataataacgtcacgggaatagcgttcgaggacgttcctatcacctcgagagtgtttttcggtgaacccggaccatggttcaaccaacttgacatggatggcgataaaacttcggtgtttcatgatgttgacggctcagtgagtgagtatcccggttcataccttacaaaaaatgataactggttagtccgccatcccgactgcattaacgtgccagactggcgcggagccatttgctctgggtgctatgcccagatgtacatccaggcctacaaaacctccaacctgaggatgaagattatcaagaacgatttcccaagtcatccactttatctggaaggcgcactgacaagatctactcattaccaacaatatcagcccgttgttacattgcagaagggatataccattcactgggatcaaactgctcccgctgaactcgcgatttggcttatcaacttcaacaagggcgattggattcgcgttgggctgtgctacccccgagggaccacattctcaattctttcggatgtgcataacaggttattgaagcaaaccagcaaaactggcgttttcgtgagaaccctccagatggacaaagtggaacagagctacccagggagatcccactattactgggatgaggatagtggtttgctgttcctaaaactaaaggcacagaacgagcgggagaagtttgccttctgctccatgaagggctgcgagagaataaaaatcaaggctttaatccccaaaaacgccggagtgtctgactgtactgcaacagcttatcccaagtttacagagagggccgtggtggacgttcctatgcctaaaaaactatttggtagccagctcaaaacaaaggaccactttctagaagtgaaaatggaatcctcaaagcagcatttctttcacttatggaatgatttcgcctacattgaggtggacggtaaaaaatatccatccagtgaggacggaattcaggtggtggtaatagatgggaatcagggacgcgtggttagccacacatcttttagaaattctatactgcagggcattccatggcaactgttcaactatgtggccacgatccccgacaacagtatcgtgctgatggctagtaaggggaggtatgtctcacggggtccatggaccagggtgctggagaaactcggcgctgacagggggttgaaactaaaggaacagatggcctttgtgggcttcaagggctcctttcgccctatctgggttacgcttgataccgaggaccacaaggccaaaattttccaagtggtaccaatcccagtggtcaagaagaaaaagttgtag

SEQ ID NO: 111509 - DNA, 4086 bp, Artificial Sequence
  derived and/or modified sequence
atgggtgcagccggtcgacaagattttctgtttaaggccatgctgacgatttcctggttgacactgacgtgtttccccggtgcaacaagtaccgtcgcagctggatgtcctgatcaaagccctgaactgcaaccatggaatccagggcatgaccaggaccatcacgtgcacattgggcagggtaagaccttgctactgacgagttccgccaccgtttacagcattcacatttcagagggtggaaaactggtgattaaagaccacgacgagccaatcgtgctgcggacgcgccacatcctgatcgacaacgggggtgagctacacgctgggtccgctctgtgtccatttcaaggaaattttaccatcattctgtatgggagggccgatgagggcatccagccagacccatattacggactaaaatatatcggagtgggaaaggggggtgcgcttgaattacatgggcagaaaaagctcagctggacttttttgaataagaccctccaccctggcggtatggccgaaggcggatacttttttgagcgctcgtggggacataggggcgtgatcgtgcatgtgatagaccctaaatctggcactgtgatccatagcgaccgattcgacacgtacaggagcaagaaagaaagcgagcgccttgttcagtacctcaacgcagttcccgatggcagaatcctttctgtggccgtgaacgatgaaggaagccgaaatcttgacgacatggcacgcaaggccatgacgaagctaggttcaaaacacttcctccatctgggtttccggcacccctggtcatttctgaccgtgaaaggaaacccttccagctctgtggaggatcatattgagtaccatggccacagaggcagtgctgccgctagggtttttaaactgttccagaccgagcacggcgaatatttcaatgtatccctgtcctccgaatgggttcaggacgttgagtggacagaatggttcgatcacgataaggtctcccagactaagggcggtgagaaaattagtgatctgtggaaagctcatccgggaaagatctgcaatagaccaatagacatacaggctacaacgatggacggcgtcaacttatccacggaagtggtatacaagaagggtcaggattacaggtttgcatgttatgacaggggccgagcatgcaggagttatagagtccggttcctgtgtggcaagcctgtaaggccaaaactgactgtgacaatcgatactaacgttaatagtacaatcctgaatctggaggataatgtccagagctggaagccaggggacacgctggttattgcctccaccgactattccatgtaccaggccgaagagtttcaggttctgccttgtcgctcctgcgctcccaaccaggtgaaggtggccggtaagcccatgtaccttcacattggcgaggagattgacggggttgacatgagagcagaagtagggcttctgtccagaaacatcatagtaatgggggagatggaagataaatgctatccttacagaaatcacatttgcaatttctttgatttcgatacattcggcggtcatatcaagtttgccttgggctttaaagccgcacatctagaaggcactgaactgaaacatatggggcagcagctggtcggacagtaccctatccacttccacctcgcgggagacgtcgacgagcggggagggtacgacccccctacgtacatacgggatctttcgattcaccacacgttctctagatgtgtcaccgtgcacggtagcaatggcctcctgattaaggacgtggtcggatataattctctgggccattgcttttttacggaagatggacctgaagagaggaacaccttcgatcactgtctcggactgctggtgaaatcagggacgcttctcccctctgatcgcgactcaaagatgtgtaagatgatcaccgaggactcataccccggatatattccaaagccccgtcaagactgtaacgcggtctctacgttttggatggcaaaccccaataataacttaatcaactgcgctgctgcaggctccgaagagactggcttttggttcatatttcaccacgtgcccaccggtccctctgtggggatgtattcccctggatattccgagcatattccactaggcaagttttacaataatagagctcactccaattatcgagctggcatgatcatagacaatggcgtaaagactactgaagcttctgcgaaagataagcgcccatttttaagcataattagcgcgcgatatagcccgcaccaggacgcagaccctttgaaacccagggagccggcaatcatccgccacttcattgcctataagaaccaggaccacggggcatggttgcgcggaggagatgtctggctcgattcctgccgattcgcggacaacggcatcgggttgaccctggcttctggaggcacatttccatacgacgacgggtcgaagcaggagattaaaaactccctgtttgtcggcgagagtggcaatgtaggcacagagatgatggacaatcggatctggggacccggtggcttagatcactccgggaggactctcccgatagggcagaatttcccgatcagaggcattcagttgtacgatgggcctatcaacattcagaactgtacatttaggaagtttgtggctctggaggggcgtcatactagcgccctggccttccgcctcaacaatgcatggcagtcatgcccccataataatgtcaccggcattgcctttgaagatgtgcccatcacttctcgggtcttcttcggagagcccggaccctggttcaaccaattggatatggacggcgataaaaccagcgtgtttcacgacgtcgacggcagcgtgtcagaatatcccggtagttatctcacaaaaaatgacaattggctggttcgccaccctgattgtataaacgttcccgactggcgtggcgctatttgttcaggatgctacgcccagatgtatatccaggcctacaagacaagcaatctacggatgaagattataaaaaacgactttccaagccacccgctgtatctagagggagcactgacacgtagtacgcactatcagcagtatcaacctgttgttactctgcaaaaggggtacaccatccattgggaccaaaccgctccggctgagctcgcaatatggctcattaacttcaacaagggagactggattcgtgtggggctgtgctaccctagaggcaccactttctcaatactgagcgacgttcacaaccgcctactgaaacaaaccagcaaaactggcgtgttcgtgaggacgctgcaaatggacaaggtagagcagagctatcccggacggtcacactactactgggatgaagatagcggactgctgtttctgaagctgaaagcgcaaaatgagagggagaagttcgccttttgctctatgaagggttgtgagaggattaaaattaaggctctcattcctaagaacgccggagtaagcgattgcacagctactgcatatcctaagttcaccgagagagctgttgtggatgttcctatgcccaagaagttatttgggagtcaactcaagaccaaagatcattttttggaggtgaaaatggagagcagtaagcagcactttttccatttatggaatgactttgcctatattgaggtcgatggcaagaaatacccaagttccgaagatggcattcaggtagtggttattgatgggaaccagggcagagtcgtgtcccacacatcctttaggaacagtatccttcagggaatcccttggcaattgttcaattatgtagccacgatcccagataactccatcgtgcttatggcatctaaaggacggtatgtatccaggggtccttggacaagggtcctcgagaaactcggtgccgaccgcggactgaaactgaaggagcagatggcgtttgttgggtttaagggatcctttcgccctatctgggtcacattagatacagaggaccacaaagccaaaatcttccaagtcgtccctattccagttgtgaaaaaaaaaaagctgtag

SEQ ID NO: 111510 - DNA, 2982 bp, Artificial Sequence
  derived and/or modified sequence
atgggagccgcaggcagacaggattttttgtttaaggccatgctaaccatctcttggctgacactcacgtgttttcccggagcaacttccaccgtggctgccggttgtccggatcagagccccgaactacagccatggaaccctggccacgaccaggatcatcacgtgcatatcgggcaaggaaaaaccctgctgttgacctcctcagctacagtctatagcatccacataagcgagggcggaaagctggtcatcaaagaccacgatgagcctatcgtcctgagaacccggcacattttaatcgataatggcggtgaattacacgcaggatctgctctgtgcccattccagggcaatttcactattattctgtatggaagagcagacgaggggatccagccagatccttactacggcctaaaatatattggcgttggcaaagggggagccctagagctccacgggcagaaaaagcttagttggacattcctgaacaagactcttcatccaggcggtatggcagagggcggttattttttcgagcgatcctggggccaccgcggagtcatcgtccacgttatcgaccccaaaagcgggaccgtgatccatagcgacaggtttgacacctacaggagcaagaaagaatccgagcggctggtacagtacttgaatgcagttcccgatggtcgtatacttagcgtcgccgtcaatgacgaggggtcccgaaacctcgacgacatggcccgtaaggcaatgacaaagctgggctctaaacacttcctgcaccttggtttccgccacccgtggtcgttccttaccgtgaaaggaaacccctctagttccgtggaggaccatatcgagtaccacggccatcgaggcagcgctgccgcaagggtctttaagttgtttcagaccgagcacggggagtattttaatgtgtcactgtccagcgagtgggtccaggacgttgaatggacagaatggttcgaccacgataaggtttcacagactaaaggaggggagaagataagcgatttatggaaagcacatccgggaaaaatttgcaaccggcctattgatatccaggccacaactatggacggggtcaatctttccactgaggtggtttacaaaaagggacaagactataggtttgcctgttatgatcgcggacgcgcatgtagatcttacagagttagatttctctgcggcaagcccgtcagaccgaaactgacggtgactatcgataccaatgttaattctacgatcctaaacctcgaagacaatgtccagagttggaaaccaggcgatacattagtcattgcttccacagattactcgatgtaccaagccgaggagttccaggtgttaccctgtagatcttgtgccccaaatcaggtcaaagtagctggcaagccaatgtatcttcatatcggagaagaaatcgatggtgtggacatgagagccgaagtcggactcctgtcaaggaatattatagtgatgggcgagatggaagacaagtgttacccctaccgcaaccacatctgtaatttctttgattttgacacatttggcggacacatcaagtttgcactgggtttcaaagctgcccatctggagggaacagagctgaagcacatgggccagcaactggtcgggcagtacccgattcactttcacctcgccggagacgttgatgagcggggaggttatgacccacccacatacatcagggatctcagtatccaccataccttcagtcgctgcgtcaccgtccatgggagcaatggcctccttattaaagatgtggtaggatacaactctctcgggcattgctttttcaccgaagacggaccagaagagagaaacaccttcgatcattgtctcggcctcctggtgaagagcggtacactgctcccaagcgacagagactctaagatgtgcaaaatgataaccgaggattcataccccggatatatacccaaaccccgtcaggattgtaatgctgtatccaccttttggatggccaacccaaataataacctgattaactgtgcggcagcgggtagcgaagaaacgggcttttggttcatattccaccatgtgcccacaggacccagtgtcggcatgtattctccgggttacagcgagcatatccctctggggaaattctataacaaccgagcccactctaactacagagccggaatgataatagacaacggcgtcaagactactgaagcttcagccaaagataagcggccattcctgtctattatctcggccaggtacagccctcaccaagacgcagaccctctgaagccacgggaaccagccatcattagacatttcattgcctacaagaatcaggatcatggcgcttggctgcgcggaggggatgtgtggcttgatagctgccgcttcgcagacaatggtatcggattgacccttgcatctgggggaaccttcccctatgacgatggctcgaaacaagagattaagaactctctcttcgtcggagagtcaggcaatgtggggaccgagatgatggacaataggatctggggacctgggggactggaccactctgggagaactctgccaataggtcagaattttcccatccggggaatacaactttacgatggacctattaatatccaaaattgtacgttccggaagttcgtggccctcgaggggagacatactagcgctctagcattcaggctcaataatgcttggcagtcttgcccccacaataacgtaacaggcattgctttcgaggacgttcccattacatccagggtgttctttggcgaaccagggccttggttcaaccagctggacatggatggagacaaaactagcgtctttcacgacgtggacggttccgtgagcgaataccccggatcatacctgacaaagaacgacaataaatggcacagcctcgctagtaaagcagccagcggcccttctggatag

SEQ ID NO: 111511 - DNA, 4086 bp, Artificial Sequence
  derived and/or modified sequence
atgggcgctgcaggacgacaggacttcctgtttaaggctatgctgactatcagctggctaaccctaacctgctttcctggggctacctctaccgtcgcggcagggtgcccggatcaatccccggaattacagccttggaatcccggacacgaccaggatcaccatgtgcacattggacaaggaaagactttactactgacctccagtgccaccgtgtacagtattcatattagtgaggggggtaaacttgtgatcaaggatcacgacgagcccatcgtcctccgaacacgacacattcttatcgataacgggggagagctccatgcaggttccgcgctgtgtccctttcagggcaattttacgatcatcttgtacggcagggccgacgagggcattcagccagacccgtattatgggttaaagtacatcggagttggcaagggtggtgccctggagctacacggtcaaaagaaactgtcttggaccttcttgaacaaaactctgcaccctggcggtatggccgaaggcggatatttcttcgaacgaagctggggccaccgcggagttatcgtacacgtcatcgaccctaagagcggcacagtaatccactccgatcggttcgacacctaccgctccaagaaggagagtgaaaggctggtgcagtatttgaatgccgtaccagatggccgtattctgtcagtcgccgtcaatgacgagggctccaggaatctggacgacatggctcggaaggctatgaccaagctcggtagtaagcactttctgcatctcggtttcagacatccctggtccttcctcacagtcaagggtaatccctctagctcagttgaagatcatattgagtatcacgggcacagaggcagcgctgctgcgagggtttttaagttatttcaaacggagcacggcgagtactttaatgttagcttatcatccgaatgggtacaagatgtagagtggactgaatggttcgatcatgacaaagtgtcacagaccaaagggggagagaaaatcagtgacctatggaaagctcaccctggaaaaatctgtaatcgccctattgacatccaagccaccaccatggatggcgtaaatttgtcgaccgaagttgtctacaagaagggccaggattatagattcgcttgctacgataggggaagggcctgccgaagttacagagttcgctttctttgcggaaagcccgttaggcctaagcttaccgtgaccatcgatacaaacgtgaatagtactatcttgaatcttgaagataatgtccagtcgtggaagcccggagatacgctagtgatcgcatccacagattatagcatgtaccaggctgaggaattccaggtgctgccttgtcgatcctgcgccccaaatcaggtcaaagtcgctgggaaaccgatgtatctgcacattggtgaagaaatcgacggagttgatatgcgcgcagaagtgggcttactgtcccgcaacattattgtaatgggggaaatggaagacaagtgttacccttaccgcaatcatatatgcaattttttcgatttcgacacattcgggggacatattaagtttgctctgggttttaaagccgctcatctggaaggcacagaattgaagcatatgggtcaacagcttgtgggtcagtatcccattcacttccacctggctggcgacgttgatgaaaggggaggctacgatcccccaacatacatccgggatctaagtattcatcatactttttcacgatgtgtaactgttcatggctcgaacggtttgctcataaaggacgttgtcgggtacaattcacttggccactgtttttttaccgaggatggtcccgaagagcgcaacacattcgaccattgcctcggactgctggtcaaatcaggaacgctgctgccgtccgatagggacagtaagatgtgcaagatgatcactgaagacagttaccccggttacatcccaaaacctagacaggactgcaatgccgtgagcaccttctggatggcaaatccgaacaataacttgattaactgtgctgctgcaggatcagaagagacgggcttctggttcatatttcatcatgtccccacgggaccgagcgttgggatgtattcacctggctactctgagcatattccactggggaagttctacaataatcgcgctcactcaaattatagggccggtatgatcatcgataatggggtcaagactacagaagcatcagcgaaggacaaacggccttttctctccattatctctgcaagatactccccacatcaagacgctgatcctctcaaacccagagagcctgcgattatcaggcactttattgcctataagaaccaggatcacggcgcatggctccgcggaggggatgtctggttagacagttgcaggtttgccgacaacggaattggtctcactctggcgagcgggggaacatttccatacgatgacggaagtaagcaggaaatcaagaatagtctatttgtgggagagtccggtaatgtgggcacagaaatgatggataatcgcatttggggcccagggggacttgatcacagcggacgcaccctccccataggccagaattttccaatcagaggcattcagctgtacgatggtcccatcaacattcagaactgcacttttagaaagttcgtcgccctagagggaaggcacacctctgccctggcatttcgactgaacaacgcctggcagtcctgcccccataataacgtcacaggtatcgcattcgaggatgtgccgataactagtcgagtgttcttcggagagccagggccatggtttaaccaactcgatatggacggggacaagacgagtgtgtttcatgatgtagacggcagtgtctccgaatatccgggaagctacctaaccaagaacgacaactggctcgtgaggcatccagactgtatcaatgttcctgactggcggggagccatctgcagtggatgttatgcgcagatgtatattcaagcttacaagaccagtaacctgagaatgaaaatcattaagaacgacttcccaagtcacccattgtatcttgagggtgccttgacccggtctactcattaccagcaataccagccggtggtgacgctgcaaaaagggtacactattcactgggaccaaaccgcccctgccgagctcgcaatttggctgattaactttaataaaggggattggatccgcgtgggcctgtgttatcctagaggcactacctttagcatcctgtccgatgtccataacaggttgctgaaacagacctcaaagacaggcgtctttgtccgaacacttcagatggacaaagttgaacagagttatcccggtagaagccactattactgggatgaggattcagggctgctctttttaaaactaaaagcacaaaacgaaagagagaaatttgcgttttgcagcatgaagggttgtgagcggatcaagattaaagcacttattccaaagaacgctggtgtgagtgactgtacggccacagcctaccctaagttcaccgagagggccgtagttgacgtgcctatgccaaaaaaactatttggcagccagttgaagaccaaggatcatttcctggaagtgaaaatggagtcctccaagcagcatttctttcatctgtggaatgattttgcttacatagaagtggacggtaagaaatatccgagctctgaggacggcatacaggtggttgtcatcgatggcaaccaggggcgtgttgtatcccatacctccttccggaattctatattacagggcatcccatggcagctatttaactatgtggctacgattcctgataactcaattgtgcttatggcatcaaaagggagatacgtctcccggggaccatggacccgcgtgctggaaaagcttggggctgatagagggctcaaactgaaggagcagatggcgttcgtaggcttcaaagggtcatttaggcccatatgggtgaccctggacaccgaagaccacaaggctaagattttccaagttgtgcctattccagtcgttaaaaagaaaaagctttag

SEQ ID NO: 111512 - DNA, 7226 bp, Artificial Sequence
  derived and/or modified sequence
aaaagcggcctctcggctgagggccggggagctagcgctcaagcagagcccagcgcggtgctatcggacagagcctggcgagcgcaagcggcgcggggagccagcggggctgagcgcggccagggtctgaacccagatttcccagactagctaccactccgcttgcccacgccccgggagctcgcggcgcctggcggtcagcgaccagacgtccggggccgctgcgctcctggcccgcgaggcgtgacactgtctcggctacagacccagagggagcacactgccaggatgggagctgctgggaggcaggacttcctcttcaaggccatgctgaccatcagctggctcactctgacctgcttccctggggccacatccacagtggctgctgggtgccctgaccagagccctgagttgcaaccctggaaccctggccatgaccaagaccaccatgtgcatatcggccagggcaagacactgctgctcacctcttctgccacggtctattccatccacatctcagagggaggcaagctggtcattaaagaccacgacgagccgattgttttgcgaacccggcacatcctgattgacaacggaggagagctgcatgctgggagtgccctctgccctttccagggcaatttcaccatcattttgtatggaagggctgatgaaggtattcagccggatccttactatggtctgaagtacattggggttggtaaaggaggcgctcttgagttgcatggacagaaaaagctctcctggacatttctgaacaagacccttcacccaggtggcatggcagaaggaggctatttttttgaaaggagctggggccaccgtggagttattgttcatgtcatcgaccccaaatcaggcacagtcatccattctgaccggtttgacacctatagatccaagaaagagagtgaacgtctggtccagtatttgaacgcggtgcccgatggcaggatcctttctgttgcagtgaatgatgaaggttctcgaaatctggatgacatggccaggaaggcgatgaccaaattgggaagcaaacacttcctgcaccttggatttagacacccttggagttttctaactgtgaaaggaaatccatcatcttcagtggaagaccatattgaatatcatggacatcgaggctctgctgctgcccgggtattcaaattgttccagacagagcatggcgaatatttcaatgtttctttgtccagtgagtgggttcaagacgtggagtggacggagtggttcgatcatgataaagtatctcagactaaaggtggggagaaaatttcagacctctggaaagctcacccaggaaaaatatgcaatcgtcccattgatatacaggccactacaatggatggagttaacctcagcaccgaggttgtctacaaaaaaggccaggattataggtttgcttgctacgaccggggcagagcctgccggagctaccgtgtacggttcctctgtgggaagcctgtgaggcccaaactcacagtcaccattgacaccaatgtgaacagcaccattctgaacttggaggataatgtacagtcatggaaacctggagataccctggtcattgccagtactgattactccatgtaccaggcagaagagttccaggtgcttccctgcagatcctgcgcccccaaccaggtcaaagtggcagggaaaccaatgtacctgcacatcggggaggagatagacggcgtggacatgcgggcggaggttgggcttctgagccggaacatcatagtgatgggggagatggaggacaaatgctacccctacagaaaccacatctgcaatttctttgacttcgatacctttgggggccacatcaagtttgctctgggatttaaggcagcacacttggagggcacggagctgaagcatatgggacagcagctggtgggtcagtacccgattcacttccacctggccggtgatgtagacgaaaggggaggttatgacccacccacatacatcagggacctctccatccatcatacattctctcgctgcgtcacagtccatggctccaatggcttgttgatcaaggacgttgtgggctataactctttgggccactgcttcttcacggaagatgggccggaggaacgcaacacttttgaccactgtcttggcctccttgtcaagtctggaaccctcctcccctcggaccgtgacagcaagatgtgcaagatgatcacagaggactcctacccggggtacatccccaagcccaggcaagactgcaatgctgtgtccaccttctggatggccaatcccaacaacaacctcatcaactgtgccgctgcaggatctgaggaaactggattttggtttatttttcaccacgtaccaacgggcccctccgtgggaatgtactccccaggttattcagagcacattccactgggaaaattctataacaaccgagcacattccaactaccgggctggcatgatcatagacaacggagtcaaaaccaccgaggcctctgccaaggacaagcggccgttcctctcaatcatctctgccagatacagccctcaccaggacgccgacccgctgaagccccgggagccggccatcatcagacacttcattgcctacaagaaccaggaccacggggcctggctgcgcggcggggatgtgtggctggacagctgccggtttgctgacaatggcattggcctgaccctggccagtggtggaaccttcccgtatgacgacggctccaagcaagagataaagaacagcttgtttgttggcgagagtggcaacgtggggacggaaatgatggacaataggatctggggccctggcggcttggaccatagcggaaggaccctccctataggccagaattttccaattagaggaattcagttatatgatggccccatcaacatccaaaactgcactttccgaaagtttgtggccctggagggccggcacaccagcgccctggccttccgcctgaataatgcctggcagagctgcccccataacaacgtgaccggcattgcctttgaggacgttccgattacttccagagtgttcttcggagagcctgggccctggttcaaccagctggacatggatggggataagacatctgtgttccatgacgtcgacggctccgtgtccgagtaccctggctcctacctcacgaagaatgacaactggctggtccggcacccagactgcatcaatgttcccgactggagaggggccatttgcagtgggtgctatgcacagatgtacattcaagcctacaagaccagtaacctgcgaatgaagatcatcaagaatgacttccccagccaccctctttacctggagggggcgctcaccaggagcacccattaccagcaataccaaccggttgtcaccctgcagaagggctacaccatccactgggaccagacggcccccgccgaactcgccatctggctcatcaacttcaacaagggcgactggatccgagtggggctctgctacccgcgaggcaccacattctccatcctctcggatgttcacaatcgcctgctgaagcaaacgtccaagacgggcgtcttcgtgaggaccttgcagatggacaaagtggagcagagctaccctggcaggagccactactactgggacgaggactcagggctgttgttcctgaagctgaaagctcagaacgagagagagaagtttgctttctgctccatgaaaggctgtgagaggataaagattaaagctctgattccaaagaacgcaggcgtcagtgactgcacagccacagcttaccccaagttcaccgagagggctgtcgtagacgtgccgatgcccaagaagctctttggttctcagctgaaaacaaaggaccatttcttggaggtgaagatggagagttccaagcagcacttcttccacctctggaacgacttcgcttacattgaagtggatgggaagaagtaccccagttcggaggatggcatccaggtggtggtgattgacgggaaccaagggcgcgtggtgagccacacgagcttcaggaactccattctgcaaggcataccatggcagcttttcaactatgtggcgaccatccctgacaattccatagtgcttatggcatcaaagggaagatacgtctccagaggcccatggaccagagtgctggaaaagcttggggcagacaggggtctcaagttgaaagagcaaatggcattcgttggcttcaaaggcagcttccggcccatctgggtgacactggacactgaggatcacaaagccaaaatcttccaagttgtgcccatccctgtggtgaagaagaagaagttgtgaggacagctgccgcccggtgccacctcgtggtagactatgacggtgactcttggcagcagaccagtgggggatggctgggtcccccagcccctgccagcagctgcctgggaaggccgtgtttcagccctgatgggccaagggaaggctatcagagaccctggtgctgccacctgcccctactcaagtgtctacctggagcccctggggcggtgctggccaatgctggaaacattcactttcctgcagcctcttgggtgcttctctcctatctgtgcctcttcagtgggggtttggggaccatatcaggagacctgggttgtgctgacagcaaagatccactttggcaggagccctgacccagctaggaggtagtctggagggctggtcattcacagatccccatggtcttcagcagacaagtgagggtggtaaatgtaggagaaagagccttggccttaaggaaatctttactcctgtaagcaagagccaacctcacaggattaggagctggggtagaactggctatccttggggaagaggcaagccctgcctctggccgtgtccacctttcaggagactttgagtggcaggtttggacttggactagatgactctcaaaggcccttttagttctgagattccagaaatctgctgcatttcacatggtacctggaacccaacagttcatggatatccactgatatccatgatgctgggtgccccagcgcacacgggatggagaggtgagaactaatgcctagcttgaggggtctgcagtccagtagggcaggcagtcaggtccatgtgcactgcaatgccaggtggagaaatcacagagaggtaaaatggaggccagtgccatttcagaggggaggctcaggaaggcttcttgcttacaggaatgaaggctgggggcattttgctggggggagatgaggcagcctctggaatggctcagggattcagccctccctgccgctgcctgctgaagctggtgactacggggtcgccctttgctcacgtctctctggcccactcatgatggagaagtgtggtcagaggggagcaatgggctttgctgcttatgagcacagaggaattcagtccccaggcagccctgcctctgactccaagagggtgaagtccacagaagtgagctcctgccttagggcctcatttgctcttcatccagggaactgagcacagggggcctccaggagaccctagatgtgctcgtactccctcggcctgggatttcagagctggaaatatagaaaatatctagcccaaagccttcattttaacagatggggaaagtgagcccccaagatgggaaagaaccacacagctaagggagggcctggggagccccaccctagcccttgctgccacaccacattgcctcaacaaccggccccagagtgcccaggcactcctgaggtagcttctggaaatggggacaagtcccctcgaaggaaaggaaatgactagagtagaatgacagctagcagatctcttccctcctgctcccagcgcacacaaacccgccctccccttggtgttggcggtccctgtggccttcactttgttcactacctgtcagcccagcctgggtgcacagtagctgcaactccccattggtgctacctggctctcctgtctctgcagctctacaggtgaggcccagcagagggagtagggctcgccatgtttctggtgagccaatttggctgatcttgggtgtctgaacagctattgggtccaccccagtccctttcagctgctgcttaatgccctgctctctccctggcccaccttatagagagcccaaagagctcctgtaagagggagaactctatctgtggtttataatcttgcacgaggcaccagagtctccctgggtcttgtgatgaactacatttatcccctttcctgccccaaccacaaactctttccttcaaagagggcctgcctggctccctccacccaactgcacccatgagactcggtccaagagtccattccccaggtgggagccaactgtcagggaggtctttcccaccaaacatctttcagctgctgggaggtgaccatagggctctgcttttaaagatatggctgcttcaaaggccagagtcacaggaaggacttcttccagggagattagtggtgatggagaggagagttaaaatgacctcatgtccttcttgtccacggttttgttgagttttcactcttctaatgcaagggtctcacactgtgaaccacttaggatgtgatcactttcaggtggccaggaatgttgaatgtctttggctcagttcatttaaaaaagatatctatttgaaagttctcagagttgtacatatgtttcacagtacaggatctgtacataaaagtttctttcctaaaccattcaccaagagccaatatctaggcattttcttggtagcacaaattttcttattgcttagaaaattgtcctccttgttatttctgtttgtaagacttaagtgagttaggtctttaaggaaagcaacgctcctctgaaatgcttgtcttttttctgttgccgaaatagctggtcctttttcgggagttagatgtatagagtgtttgtatgtaaacatttcttgtaggcatcaccatgaacaaagatatattttctatttatttattatatgtgcacttcaagaagtcactgtcagagaaataaagaattgtcttaaatgtcatgattggagatgtcctttgcattgcttggaaggggtgtacctagagccaaggaaattggctctggtttggaaaaattttgctgttattatagtaaacatacaaaggatgtcatcatc

SEQ ID NO: 111513 - DNA, 7297 bp, Artificial Sequence
  derived and/or modified sequence
gagctagcgctcaagcagagcccagcgcggtgctatcggacagagcctggcgagcgcaagcggcgcggggagccagcggggctgagcgcggccagggtctgaacccagatttcccagactagctaccactccgcttgcccacgccccgggagctcgcggcgcctggcggtcagcgaccagacgtccggggccgctgcgctcctggcccgcgaggcgtgacactgtctcggctacagacccagagagaaaagcttcattctggaggggaaggagttttgagtgccaaggatgaaattccacccatcactcggtctctgagctgcaggacacaggcaggacaacgggagcacactgccaggatgggagctgctgggaggcaggacttcctcttcaaggccatgctgaccatcagctggctcactctgacctgcttccctggggccacatccacagtggctgctgggtgccctgaccagagccctgagttgcaaccctggaaccctggccatgaccaagaccaccatgtgcatatcggccagggcaagacactgctgctcacctcttctgccacggtctattccatccacatctcagagggaggcaagctggtcattaaagaccacgacgagccgattgttttgcgaacccggcacatcctgattgacaacggaggagagctgcatgctgggagtgccctctgccctttccagggcaatttcaccatcattttgtatggaagggctgatgaaggtattcagccggatccttactatggtctgaagtacattggggttggtaaaggaggcgctcttgagttgcatggacagaaaaagctctcctggacatttctgaacaagacccttcacccaggtggcatggcagaaggaggctatttttttgaaaggagctggggccaccgtggagttattgttcatgtcatcgaccccaaatcaggcacagtcatccattctgaccggtttgacacctatagatccaagaaagagagtgaacgtctggtccagtatttgaacgcggtgcccgatggcaggatcctttctgttgcagtgaatgatgaaggttctcgaaatctggatgacatggccaggaaggcgatgaccaaattgggaagcaaacacttcctgcaccttggatttagacacccttggagttttctaactgtgaaaggaaatccatcatcttcagtggaagaccatattgaatatcatggacatcgaggctctgctgctgcccgggtattcaaattgttccagacagagcatggcgaatatttcaatgtttctttgtccagtgagtgggttcaagacgtggagtggacggagtggttcgatcatgataaagtatctcagactaaaggtggggagaaaatttcagacctctggaaagctcacccaggaaaaatatgcaatcgtcccattgatatacaggccactacaatggatggagttaacctcagcaccgaggttgtctacaaaaaaggccaggattataggtttgcttgctacgaccggggcagagcctgccggagctaccgtgtacggttcctctgtgggaagcctgtgaggcccaaactcacagtcaccattgacaccaatgtgaacagcaccattctgaacttggaggataatgtacagtcatggaaacctggagataccctggtcattgccagtactgattactccatgtaccaggcagaagagttccaggtgcttccctgcagatcctgcgcccccaaccaggtcaaagtggcagggaaaccaatgtacctgcacatcggggaggagatagacggcgtggacatgcgggcggaggttgggcttctgagccggaacatcatagtgatgggggagatggaggacaaatgctacccctacagaaaccacatctgcaatttctttgacttcgatacctttgggggccacatcaagtttgctctgggatttaaggcagcacacttggagggcacggagctgaagcatatgggacagcagctggtgggtcagtacccgattcacttccacctggccggtgatgtagacgaaaggggaggttatgacccacccacatacatcagggacctctccatccatcatacattctctcgctgcgtcacagtccatggctccaatggcttgttgatcaaggacgttgtgggctataactctttgggccactgcttcttcacggaagatgggccggaggaacgcaacacttttgaccactgtcttggcctccttgtcaagtctggaaccctcctcccctcggaccgtgacagcaagatgtgcaagatgatcacagaggactcctacccggggtacatccccaagcccaggcaagactgcaatgctgtgtccaccttctggatggccaatcccaacaacaacctcatcaactgtgccgctgcaggatctgaggaaactggattttggtttatttttcaccacgtaccaacgggcccctccgtgggaatgtactccccaggttattcagagcacattccactgggaaaattctataacaaccgagcacattccaactaccgggctggcatgatcatagacaacggagtcaaaaccaccgaggcctctgccaaggacaagcggccgttcctctcaatcatctctgccagatacagccctcaccaggacgccgacccgctgaagccccgggagccggccatcatcagacacttcattgcctacaagaaccaggaccacggggcctggctgcgcggcggggatgtgtggctggacagctgccggtttgctgacaatggcattggcctgaccctggccagtggtggaaccttcccgtatgacgacggctccaagcaagagataaagaacagcttgtttgttggcgagagtggcaacgtggggacggaaatgatggacaataggatctggggccctggcggcttggaccatagcggaaggaccctccctataggccagaattttccaattagaggaattcagttatatgatggccccatcaacatccaaaactgcactttccgaaagtttgtggccctggagggccggcacaccagcgccctggccttccgcctgaataatgcctggcagagctgcccccataacaacgtgaccggcattgcctttgaggacgttccgattacttccagagtgttcttcggagagcctgggccctggttcaaccagctggacatggatggggataagacatctgtgttccatgacgtcgacggctccgtgtccgagtaccctggctcctacctcacgaagaatgacaactggctggtccggcacccagactgcatcaatgttcccgactggagaggggccatttgcagtgggtgctatgcacagatgtacattcaagcctacaagaccagtaacctgcgaatgaagatcatcaagaatgacttccccagccaccctctttacctggagggggcgctcaccaggagcacccattaccagcaataccaaccggttgtcaccctgcagaagggctacaccatccactgggaccagacggcccccgccgaactcgccatctggctcatcaacttcaacaagggcgactggatccgagtggggctctgctacccgcgaggcaccacattctccatcctctcggatgttcacaatcgcctgctgaagcaaacgtccaagacgggcgtcttcgtgaggaccttgcagatggacaaagtggagcagagctaccctggcaggagccactactactgggacgaggactcagggctgttgttcctgaagctgaaagctcagaacgagagagagaagtttgctttctgctccatgaaaggctgtgagaggataaagattaaagctctgattccaaagaacgcaggcgtcagtgactgcacagccacagcttaccccaagttcaccgagagggctgtcgtagacgtgccgatgcccaagaagctctttggttctcagctgaaaacaaaggaccatttcttggaggtgaagatggagagttccaagcagcacttcttccacctctggaacgacttcgcttacattgaagtggatgggaagaagtaccccagttcggaggatggcatccaggtggtggtgattgacgggaaccaagggcgcgtggtgagccacacgagcttcaggaactccattctgcaaggcataccatggcagcttttcaactatgtggcgaccatccctgacaattccatagtgcttatggcatcaaagggaagatacgtctccagaggcccatggaccagagtgctggaaaagcttggggcagacaggggtctcaagttgaaagagcaaatggcattcgttggcttcaaaggcagcttccggcccatctgggtgacactggacactgaggatcacaaagccaaaatcttccaagttgtgcccatccctgtggtgaagaagaagaagttgtgaggacagctgccgcccggtgccacctcgtggtagactatgacggtgactcttggcagcagaccagtgggggatggctgggtcccccagcccctgccagcagctgcctgggaaggccgtgtttcagccctgatgggccaagggaaggctatcagagaccctggtgctgccacctgcccctactcaagtgtctacctggagcccctggggcggtgctggccaatgctggaaacattcactttcctgcagcctcttgggtgcttctctcctatctgtgcctcttcagtgggggtttggggaccatatcaggagacctgggttgtgctgacagcaaagatccactttggcaggagccctgacccagctaggaggtagtctggagggctggtcattcacagatccccatggtcttcagcagacaagtgagggtggtaaatgtaggagaaagagccttggccttaaggaaatctttactcctgtaagcaagagccaacctcacaggattaggagctggggtagaactggctatccttggggaagaggcaagccctgcctctggccgtgtccacctttcaggagactttgagtggcaggtttggacttggactagatgactctcaaaggcccttttagttctgagattccagaaatctgctgcatttcacatggtacctggaacccaacagttcatggatatccactgatatccatgatgctgggtgccccagcgcacacgggatggagaggtgagaactaatgcctagcttgaggggtctgcagtccagtagggcaggcagtcaggtccatgtgcactgcaatgccaggtggagaaatcacagagaggtaaaatggaggccagtgccatttcagaggggaggctcaggaaggcttcttgcttacaggaatgaaggctgggggcattttgctggggggagatgaggcagcctctggaatggctcagggattcagccctccctgccgctgcctgctgaagctggtgactacggggtcgccctttgctcacgtctctctggcccactcatgatggagaagtgtggtcagaggggagcaatgggctttgctgcttatgagcacagaggaattcagtccccaggcagccctgcctctgactccaagagggtgaagtccacagaagtgagctcctgccttagggcctcatttgctcttcatccagggaactgagcacagggggcctccaggagaccctagatgtgctcgtactccctcggcctgggatttcagagctggaaatatagaaaatatctagcccaaagccttcattttaacagatggggaaagtgagcccccaagatgggaaagaaccacacagctaagggagggcctggggagccccaccctagcccttgctgccacaccacattgcctcaacaaccggccccagagtgcccaggcactcctgaggtagcttctggaaatggggacaagtcccctcgaaggaaaggaaatgactagagtagaatgacagctagcagatctcttccctcctgctcccagcgcacacaaacccgccctccccttggtgttggcggtccctgtggccttcactttgttcactacctgtcagcccagcctgggtgcacagtagctgcaactccccattggtgctacctggctctcctgtctctgcagctctacaggtgaggcccagcagagggagtagggctcgccatgtttctggtgagccaatttggctgatcttgggtgtctgaacagctattgggtccaccccagtccctttcagctgctgcttaatgccctgctctctccctggcccaccttatagagagcccaaagagctcctgtaagagggagaactctatctgtggtttataatcttgcacgaggcaccagagtctccctgggtcttgtgatgaactacatttatcccctttcctgccccaaccacaaactctttccttcaaagagggcctgcctggctccctccacccaactgcacccatgagactcggtccaagagtccattccccaggtgggagccaactgtcagggaggtctttcccaccaaacatctttcagctgctgggaggtgaccatagggctctgcttttaaagatatggctgcttcaaaggccagagtcacaggaaggacttcttccagggagattagtggtgatggagaggagagttaaaatgacctcatgtccttcttgtccacggttttgttgagttttcactcttctaatgcaagggtctcacactgtgaaccacttaggatgtgatcactttcaggtggccaggaatgttgaatgtctttggctcagttcatttaaaaaagatatctatttgaaagttctcagagttgtacatatgtttcacagtacaggatctgtacataaaagtttctttcctaaaccattcaccaagagccaatatctaggcattttcttggtagcacaaattttcttattgcttagaaaattgtcctccttgttatttctgtttgtaagacttaagtgagttaggtctttaaggaaagcaacgctcctctgaaatgcttgtcttttttctgttgccgaaatagctggtcctttttcgggagttagatgtatagagtgtttgtatgtaaacatttcttgtaggcatcaccatgaacaaagatatattttctatttatttattatatgtgcacttcaagaagtcactgtcagagaaataaagaattgtcttaaatgtcatgattggagatgtcctttgcattgcttggaaggggtgtacctagagccaaggaaattggctctggtttggaaaaattttgctgttattatagtaaacatacaaaggatgtcatcatc

SEQ ID NO: 111514 - DNA, 3242 bp, Artificial Sequence
  derived and/or modified sequence
gagctagcgctcaagcagagcccagcgcggtgctatcggacagagcctggcgagcgcaagcggcgcggggagccagcggggctgagcgcggccagggtctgaacccagatttcccagactagctaccactccgcttgcccacgccccgggagctcgcggcgcctggcggtcagcgaccagacgtccggggccgctgcgctcctggcccgcgaggcgtgacactgtctcggctacagacccagagggagcacactgccaggatgggagctgctgggaggcaggacttcctcttcaaggccatgctgaccatcagctggctcactctgacctgcttccctggggccacatccacagtggctgctgggtgccctgaccagagccctgagttgcaaccctggaaccctggccatgaccaagaccaccatgtgcatatcggccagggcaagacactgctgctcacctcttctgccacggtctattccatccacatctcagagggaggcaagctggtcattaaagaccacgacgagccgattgttttgcgaacccggcacatcctgattgacaacggaggagagctgcatgctgggagtgccctctgccctttccagggcaatttcaccatcattttgtatggaagggctgatgaaggtattcagccggatccttactatggtctgaagtacattggggttggtaaaggaggcgctcttgagttgcatggacagaaaaagctctcctggacatttctgaacaagacccttcacccaggtggcatggcagaaggaggctatttttttgaaaggagctggggccaccgtggagttattgttcatgtcatcgaccccaaatcaggcacagtcatccattctgaccggtttgacacctatagatccaagaaagagagtgaacgtctggtccagtatttgaacgcggtgcccgatggcaggatcctttctgttgcagtgaatgatgaaggttctcgaaatctggatgacatggccaggaaggcgatgaccaaattgggaagcaaacacttcctgcaccttggatttagacacccttggagttttctaactgtgaaaggaaatccatcatcttcagtggaagaccatattgaatatcatggacatcgaggctctgctgctgcccgggtattcaaattgttccagacagagcatggcgaatatttcaatgtttctttgtccagtgagtgggttcaagacgtggagtggacggagtggttcgatcatgataaagtatctcagactaaaggtggggagaaaatttcagacctctggaaagctcacccaggaaaaatatgcaatcgtcccattgatatacaggccactacaatggatggagttaacctcagcaccgaggttgtctacaaaaaaggccaggattataggtttgcttgctacgaccggggcagagcctgccggagctaccgtgtacggttcctctgtgggaagcctgtgaggcccaaactcacagtcaccattgacaccaatgtgaacagcaccattctgaacttggaggataatgtacagtcatggaaacctggagataccctggtcattgccagtactgattactccatgtaccaggcagaagagttccaggtgcttccctgcagatcctgcgcccccaaccaggtcaaagtggcagggaaaccaatgtacctgcacatcggggaggagatagacggcgtggacatgcgggcggaggttgggcttctgagccggaacatcatagtgatgggggagatggaggacaaatgctacccctacagaaaccacatctgcaatttctttgacttcgatacctttgggggccacatcaagtttgctctgggatttaaggcagcacacttggagggcacggagctgaagcatatgggacagcagctggtgggtcagtacccgattcacttccacctggccggtgatgtagacgaaaggggaggttatgacccacccacatacatcagggacctctccatccatcatacattctctcgctgcgtcacagtccatggctccaatggcttgttgatcaaggacgttgtgggctataactctttgggccactgcttcttcacggaagatgggccggaggaacgcaacacttttgaccactgtcttggcctccttgtcaagtctggaaccctcctcccctcggaccgtgacagcaagatgtgcaagatgatcacagaggactcctacccggggtacatccccaagcccaggcaagactgcaatgctgtgtccaccttctggatggccaatcccaacaacaacctcatcaactgtgccgctgcaggatctgaggaaactggattttggtttatttttcaccacgtaccaacgggcccctccgtgggaatgtactccccaggttattcagagcacattccactgggaaaattctataacaaccgagcacattccaactaccgggctggcatgatcatagacaacggagtcaaaaccaccgaggcctctgccaaggacaagcggccgttcctctcaatcatctctgccagatacagccctcaccaggacgccgacccgctgaagccccgggagccggccatcatcagacacttcattgcctacaagaaccaggaccacggggcctggctgcgcggcggggatgtgtggctggacagctgccggtttgctgacaatggcattggcctgaccctggccagtggtggaaccttcccgtatgacgacggctccaagcaagagataaagaacagcttgtttgttggcgagagtggcaacgtggggacggaaatgatggacaataggatctggggccctggcggcttggaccatagcggaaggaccctccctataggccagaattttccaattagaggaattcagttatatgatggccccatcaacatccaaaactgcactttccgaaagtttgtggccctggagggccggcacaccagcgccctggccttccgcctgaataatgcctggcagagctgcccccataacaacgtgaccggcattgcctttgaggacgttccgattacttccagagtgttcttcggagagcctgggccctggttcaaccagctggacatggatggggataagacatctgtgttccatgacgtcgacggctccgtgtccgagtaccctggctcctacctcacgaagaatgacaacaaatggcattcgttggcttcaaaggcagcttccggcccatctgggtga

SEQ ID NO: 111515 - DNA, 7357 bp, Artificial Sequence
  derived and/or modified sequence
gagctagcgctcaagcagagcccagcgcggtgctatcggacagagcctggcgagcgcaagcggcgcggggagccagcggggctgagcgcggccagggtctgaacccagatttcccagactagctaccactccgcttgcccacgccccgggagctcgcggcgcctggcggtcagcgaccagacgtccggggccgctgcgctcctggcccgcgaggcgtgacactgtctcggctacagacccagagagaaaagcttcattctggaggggaaggagttttgagtgccaaggatgaaattccacccatcactcggtctctgagctgcaggacacaggcaggacaacggtaggattttcatgccccgatctgcctggccttgagttgtggcagctggggaagccactgggagcacactgccaggatgggagctgctgggaggcaggacttcctcttcaaggccatgctgaccatcagctggctcactctgacctgcttccctggggccacatccacagtggctgctgggtgccctgaccagagccctgagttgcaaccctggaaccctggccatgaccaagaccaccatgtgcatatcggccagggcaagacactgctgctcacctcttctgccacggtctattccatccacatctcagagggaggcaagctggtcattaaagaccacgacgagccgattgttttgcgaacccggcacatcctgattgacaacggaggagagctgcatgctgggagtgccctctgccctttccagggcaatttcaccatcattttgtatggaagggctgatgaaggtattcagccggatccttactatggtctgaagtacattggggttggtaaaggaggcgctcttgagttgcatggacagaaaaagctctcctggacatttctgaacaagacccttcacccaggtggcatggcagaaggaggctatttttttgaaaggagctggggccaccgtggagttattgttcatgtcatcgaccccaaatcaggcacagtcatccattctgaccggtttgacacctatagatccaagaaagagagtgaacgtctggtccagtatttgaacgcggtgcccgatggcaggatcctttctgttgcagtgaatgatgaaggttctcgaaatctggatgacatggccaggaaggcgatgaccaaattgggaagcaaacacttcctgcaccttggatttagacacccttggagttttctaactgtgaaaggaaatccatcatcttcagtggaagaccatattgaatatcatggacatcgaggctctgctgctgcccgggtattcaaattgttccagacagagcatggcgaatatttcaatgtttctttgtccagtgagtgggttcaagacgtggagtggacggagtggttcgatcatgataaagtatctcagactaaaggtggggagaaaatttcagacctctggaaagctcacccaggaaaaatatgcaatcgtcccattgatatacaggccactacaatggatggagttaacctcagcaccgaggttgtctacaaaaaaggccaggattataggtttgcttgctacgaccggggcagagcctgccggagctaccgtgtacggttcctctgtgggaagcctgtgaggcccaaactcacagtcaccattgacaccaatgtgaacagcaccattctgaacttggaggataatgtacagtcatggaaacctggagataccctggtcattgccagtactgattactccatgtaccaggcagaagagttccaggtgcttccctgcagatcctgcgcccccaaccaggtcaaagtggcagggaaaccaatgtacctgcacatcggggaggagatagacggcgtggacatgcgggcggaggttgggcttctgagccggaacatcatagtgatgggggagatggaggacaaatgctacccctacagaaaccacatctgcaatttctttgacttcgatacctttgggggccacatcaagtttgctctgggatttaaggcagcacacttggagggcacggagctgaagcatatgggacagcagctggtgggtcagtacccgattcacttccacctggccggtgatgtagacgaaaggggaggttatgacccacccacatacatcagggacctctccatccatcatacattctctcgctgcgtcacagtccatggctccaatggcttgttgatcaaggacgttgtgggctataactctttgggccactgcttcttcacggaagatgggccggaggaacgcaacacttttgaccactgtcttggcctccttgtcaagtctggaaccctcctcccctcggaccgtgacagcaagatgtgcaagatgatcacagaggactcctacccggggtacatccccaagcccaggcaagactgcaatgctgtgtccaccttctggatggccaatcccaacaacaacctcatcaactgtgccgctgcaggatctgaggaaactggattttggtttatttttcaccacgtaccaacgggcccctccgtgggaatgtactccccaggttattcagagcacattccactgggaaaattctataacaaccgagcacattccaactaccgggctggcatgatcatagacaacggagtcaaaaccaccgaggcctctgccaaggacaagcggccgttcctctcaatcatctctgccagatacagccctcaccaggacgccgacccgctgaagccccgggagccggccatcatcagacacttcattgcctacaagaaccaggaccacggggcctggctgcgcggcggggatgtgtggctggacagctgccggtttgctgacaatggcattggcctgaccctggccagtggtggaaccttcccgtatgacgacggctccaagcaagagataaagaacagcttgtttgttggcgagagtggcaacgtggggacggaaatgatggacaataggatctggggccctggcggcttggaccatagcggaaggaccctccctataggccagaattttccaattagaggaattcagttatatgatggccccatcaacatccaaaactgcactttccgaaagtttgtggccctggagggccggcacaccagcgccctggccttccgcctgaataatgcctggcagagctgcccccataacaacgtgaccggcattgcctttgaggacgttccgattacttccagagtgttcttcggagagcctgggccctggttcaaccagctggacatggatggggataagacatctgtgttccatgacgtcgacggctccgtgtccgagtaccctggctcctacctcacgaagaatgacaactggctggtccggcacccagactgcatcaatgttcccgactggagaggggccatttgcagtgggtgctatgcacagatgtacattcaagcctacaagaccagtaacctgcgaatgaagatcatcaagaatgacttccccagccaccctctttacctggagggggcgctcaccaggagcacccattaccagcaataccaaccggttgtcaccctgcagaagggctacaccatccactgggaccagacggcccccgccgaactcgccatctggctcatcaacttcaacaagggcgactggatccgagtggggctctgctacccgcgaggcaccacattctccatcctctcggatgttcacaatcgcctgctgaagcaaacgtccaagacgggcgtcttcgtgaggaccttgcagatggacaaagtggagcagagctaccctggcaggagccactactactgggacgaggactcagggctgttgttcctgaagctgaaagctcagaacgagagagagaagtttgctttctgctccatgaaaggctgtgagaggataaagattaaagctctgattccaaagaacgcaggcgtcagtgactgcacagccacagcttaccccaagttcaccgagagggctgtcgtagacgtgccgatgcccaagaagctctttggttctcagctgaaaacaaaggaccatttcttggaggtgaagatggagagttccaagcagcacttcttccacctctggaacgacttcgcttacattgaagtggatgggaagaagtaccccagttcggaggatggcatccaggtggtggtgattgacgggaaccaagggcgcgtggtgagccacacgagcttcaggaactccattctgcaaggcataccatggcagcttttcaactatgtggcgaccatccctgacaattccatagtgcttatggcatcaaagggaagatacgtctccagaggcccatggaccagagtgctggaaaagcttggggcagacaggggtctcaagttgaaagagcaaatggcattcgttggcttcaaaggcagcttccggcccatctgggtgacactggacactgaggatcacaaagccaaaatcttccaagttgtgcccatccctgtggtgaagaagaagaagttgtgaggacagctgccgcccggtgccacctcgtggtagactatgacggtgactcttggcagcagaccagtgggggatggctgggtcccccagcccctgccagcagctgcctgggaaggccgtgtttcagccctgatgggccaagggaaggctatcagagaccctggtgctgccacctgcccctactcaagtgtctacctggagcccctggggcggtgctggccaatgctggaaacattcactttcctgcagcctcttgggtgcttctctcctatctgtgcctcttcagtgggggtttggggaccatatcaggagacctgggttgtgctgacagcaaagatccactttggcaggagccctgacccagctaggaggtagtctggagggctggtcattcacagatccccatggtcttcagcagacaagtgagggtggtaaatgtaggagaaagagccttggccttaaggaaatctttactcctgtaagcaagagccaacctcacaggattaggagctggggtagaactggctatccttggggaagaggcaagccctgcctctggccgtgtccacctttcaggagactttgagtggcaggtttggacttggactagatgactctcaaaggcccttttagttctgagattccagaaatctgctgcatttcacatggtacctggaacccaacagttcatggatatccactgatatccatgatgctgggtgccccagcgcacacgggatggagaggtgagaactaatgcctagcttgaggggtctgcagtccagtagggcaggcagtcaggtccatgtgcactgcaatgccaggtggagaaatcacagagaggtaaaatggaggccagtgccatttcagaggggaggctcaggaaggcttcttgcttacaggaatgaaggctgggggcattttgctggggggagatgaggcagcctctggaatggctcagggattcagccctccctgccgctgcctgctgaagctggtgactacggggtcgccctttgctcacgtctctctggcccactcatgatggagaagtgtggtcagaggggagcaatgggctttgctgcttatgagcacagaggaattcagtccccaggcagccctgcctctgactccaagagggtgaagtccacagaagtgagctcctgccttagggcctcatttgctcttcatccagggaactgagcacagggggcctccaggagaccctagatgtgctcgtactccctcggcctgggatttcagagctggaaatatagaaaatatctagcccaaagccttcattttaacagatggggaaagtgagcccccaagatgggaaagaaccacacagctaagggagggcctggggagccccaccctagcccttgctgccacaccacattgcctcaacaaccggccccagagtgcccaggcactcctgaggtagcttctggaaatggggacaagtcccctcgaaggaaaggaaatgactagagtagaatgacagctagcagatctcttccctcctgctcccagcgcacacaaacccgccctccccttggtgttggcggtccctgtggccttcactttgttcactacctgtcagcccagcctgggtgcacagtagctgcaactccccattggtgctacctggctctcctgtctctgcagctctacaggtgaggcccagcagagggagtagggctcgccatgtttctggtgagccaatttggctgatcttgggtgtctgaacagctattgggtccaccccagtccctttcagctgctgcttaatgccctgctctctccctggcccaccttatagagagcccaaagagctcctgtaagagggagaactctatctgtggtttataatcttgcacgaggcaccagagtctccctgggtcttgtgatgaactacatttatcccctttcctgccccaaccacaaactctttccttcaaagagggcctgcctggctccctccacccaactgcacccatgagactcggtccaagagtccattccccaggtgggagccaactgtcagggaggtctttcccaccaaacatctttcagctgctgggaggtgaccatagggctctgcttttaaagatatggctgcttcaaaggccagagtcacaggaaggacttcttccagggagattagtggtgatggagaggagagttaaaatgacctcatgtccttcttgtccacggttttgttgagttttcactcttctaatgcaagggtctcacactgtgaaccacttaggatgtgatcactttcaggtggccaggaatgttgaatgtctttggctcagttcatttaaaaaagatatctatttgaaagttctcagagttgtacatatgtttcacagtacaggatctgtacataaaagtttctttcctaaaccattcaccaagagccaatatctaggcattttcttggtagcacaaattttcttattgcttagaaaattgtcctccttgttatttctgtttgtaagacttaagtgagttaggtctttaaggaaagcaacgctcctctgaaatgcttgtcttttttctgttgccgaaatagctggtcctttttcgggagttagatgtatagagtgtttgtatgtaaacatttcttgtaggcatcaccatgaacaaagatatattttctatttatttattatatgtgcacttcaagaagtcactgtcagagaaataaagaattgtcttaaatgtcatgattggagatgtcctttgcattgcttggaaggggtgtacctagagccaaggaaattggctctggtttggaaaaattttgctgttattatagtaaacatacaaaggatgtcatcatc

SEQ ID NO: 111516 - DNA, 4086 bp, Artificial Sequence
  derived and/or modified sequence
atgggcgccgccggcagacaggacttcctgttcaaggccatgctgaccatcagctggctgaccctgacctgcttccccggcgccaccagcaccgtggccgccggctgccccgaccagagccccgagctgcagccctggaaccccggccacgaccaggaccaccacgtgcacatcggccagggcaagaccctgctgctgaccagcagcgccaccgtgtacagcatccacatcagcgagggcggcaagctggtgatcaaggaccacgacgagcccatcgtgctgagaaccagacacatcctgatcgacaacggcggcgagctgcacgccggcagcgccctgtgccccttccagggcaacttcaccatcatcctgtacggcagagccgacgagggcatccagcccgacccctactacggcctgaagtacatcggcgtgggcaagggcggcgccctggagctgcacggccagaagaagctgagctggaccttcctgaacaagaccctgcaccccggcggcatggccgagggcggctacttcttcgagagaagctggggccacagaggcgtgatcgtgcacgtgatcgaccccaagagcggcaccgtgatccacagcgacagattcgacacctacagaagcaagaaggagagcgagagactggtgcagtacctgaacgccgtgcccgacggcagaatcctgagcgtggccgtgaacgacgagggcagcagaaacctggacgacatggccagaaaggccatgaccaagctgggcagcaagcacttcctgcacctgggcttcagacacccctggagcttcctgaccgtgaagggcaaccccagcagcagcgtggaggaccacatcgagtaccacggccacagaggcagcgccgccgccagagtgttcaagctgttccagaccgagcacggcgagtacttcaacgtgagcctgagcagcgagtgggtgcaggacgtggagtggaccgagtggttcgaccacgacaaggtgagccagaccaagggcggcgagaagatcagcgacctgtggaaggcccaccccggcaagatctgcaacagacccatcgacatccaggccaccaccatggacggcgtgaacctgagcaccgaggtggtgtacaagaagggccaggactacagattcgcctgctacgacagaggcagagcctgcagaagctacagagtgagattcctgtgcggcaagcccgtgagacccaagctgaccgtgaccatcgacaccaacgtgaacagcaccatcctgaacctggaggacaacgtgcagagctggaagcccggcgacaccctggtgatcgccagcaccgactacagcatgtaccaggccgaggagttccaggtgctgccctgcagaagctgcgcccccaaccaggtgaaggtggccggcaagcccatgtacctgcacatcggcgaggagatcgacggcgtggacatgagagccgaggtgggcctgctgagcagaaacatcatcgtgatgggcgagatggaggacaagtgctacccctacagaaaccacatctgcaacttcttcgacttcgacaccttcggcggccacatcaagttcgccctgggcttcaaggccgcccacctggagggcaccgagctgaagcacatgggccagcagctggtgggccagtaccccatccacttccacctggccggcgacgtggacgagagaggcggctacgacccccccacctacatcagagacctgagcatccaccacaccttcagcagatgcgtgaccgtgcacggcagcaacggcctgctgatcaaggacgtggtgggctacaacagcctgggccactgcttcttcaccgaggacggccccgaggagagaaacaccttcgaccactgcctgggcctgctggtgaagagcggcaccctgctgcccagcgacagagacagcaagatgtgcaagatgatcaccgaggacagctaccccggctacatccccaagcccagacaggactgcaacgccgtgagcaccttctggatggccaaccccaacaacaacctgatcaactgcgccgccgccggcagcgaggagaccggcttctggttcatcttccaccacgtgcccaccggccccagcgtgggcatgtacagccccggctacagcgagcacatccccctgggcaagttctacaacaacagagcccacagcaactacagagccggcatgatcatcgacaacggcgtgaagaccaccgaggccagcgccaaggacaagagacccttcctgagcatcatcagcgccagatacagcccccaccaggacgccgaccccctgaagcccagagagcccgccatcatcagacacttcatcgcctacaagaaccaggaccacggcgcctggctgagaggcggcgacgtgtggctggacagctgcagattcgccgacaacggcatcggcctgaccctggccagcggcggcaccttcccctacgacgacggcagcaagcaggagatcaagaacagcctgttcgtgggcgagagcggcaacgtgggcaccgagatgatggacaacagaatctggggccccggcggcctggaccacagcggcagaaccctgcccatcggccagaacttccccatcagaggcatccagctgtacgacggccccatcaacatccagaactgcaccttcagaaagttcgtggccctggagggcagacacaccagcgccctggccttcagactgaacaacgcctggcagagctgcccccacaacaacgtgaccggcatcgccttcgaggacgtgcccatcaccagcagagtgttcttcggcgagcccggcccctggttcaaccagctggacatggacggcgacaagaccagcgtgttccacgacgtggacggcagcgtgagcgagtaccccggcagctacctgaccaagaacgacaactggctggtgagacaccccgactgcatcaacgtgcccgactggagaggcgccatctgcagcggctgctacgcccagatgtacatccaggcctacaagaccagcaacctgagaatgaagatcatcaagaacgacttccccagccaccccctgtacctggagggcgccctgaccagaagcacccactaccagcagtaccagcccgtggtgaccctgcagaagggctacaccatccactgggaccagaccgcccccgccgagctggccatctggctgatcaacttcaacaagggcgactggatcagagtgggcctgtgctaccccagaggcaccaccttcagcatcctgagcgacgtgcacaacagactgctgaagcagaccagcaagaccggcgtgttcgtgagaaccctgcagatggacaaggtggagcagagctaccccggcagaagccactactactgggacgaggacagcggcctgctgttcctgaagctgaaggcccagaacgagagagagaagttcgccttctgcagcatgaagggctgcgagagaatcaagatcaaggccctgatccccaagaacgccggcgtgagcgactgcaccgccaccgcctaccccaagttcaccgagagagccgtggtggacgtgcccatgcccaagaagctgttcggcagccagctgaagaccaaggaccacttcctggaggtgaagatggagagcagcaagcagcacttcttccacctgtggaacgacttcgcctacatcgaggtggacggcaagaagtaccccagcagcgaggacggcatccaggtggtggtgatcgacggcaaccagggcagagtggtgagccacaccagcttcagaaacagcatcctgcagggcatcccctggcagctgttcaactacgtggccaccatccccgacaacagcatcgtgctgatggccagcaagggcagatacgtgagcagaggcccctggaccagagtgctggagaagctgggcgccgacagaggcctgaagctgaaggagcagatggccttcgtgggcttcaagggcagcttcagacccatctgggtgaccctggacaccgaggaccacaaggccaagatcttccaggtggtgcccatccccgtggtgaagaagaagaagctgtag

SEQ ID NO: 111517 - DNA, 2982 bp, Artificial Sequence
  derived and/or modified sequence
atgggcgccgccggcagacaggacttcctgttcaaggccatgctgaccatcagctggctgaccctgacctgcttccccggcgccaccagcaccgtggccgccggctgccccgaccagagccccgagctgcagccctggaaccccggccacgaccaggaccaccacgtgcacatcggccagggcaagaccctgctgctgaccagcagcgccaccgtgtacagcatccacatcagcgagggcggcaagctggtgatcaaggaccacgacgagcccatcgtgctgagaaccagacacatcctgatcgacaacggcggcgagctgcacgccggcagcgccctgtgccccttccagggcaacttcaccatcatcctgtacggcagagccgacgagggcatccagcccgacccctactacggcctgaagtacatcggcgtgggcaagggcggcgccctggagctgcacggccagaagaagctgagctggaccttcctgaacaagaccctgcaccccggcggcatggccgagggcggctacttcttcgagagaagctggggccacagaggcgtgatcgtgcacgtgatcgaccccaagagcggcaccgtgatccacagcgacagattcgacacctacagaagcaagaaggagagcgagagactggtgcagtacctgaacgccgtgcccgacggcagaatcctgagcgtggccgtgaacgacgagggcagcagaaacctggacgacatggccagaaaggccatgaccaagctgggcagcaagcacttcctgcacctgggcttcagacacccctggagcttcctgaccgtgaagggcaaccccagcagcagcgtggaggaccacatcgagtaccacggccacagaggcagcgccgccgccagagtgttcaagctgttccagaccgagcacggcgagtacttcaacgtgagcctgagcagcgagtgggtgcaggacgtggagtggaccgagtggttcgaccacgacaaggtgagccagaccaagggcggcgagaagatcagcgacctgtggaaggcccaccccggcaagatctgcaacagacccatcgacatccaggccaccaccatggacggcgtgaacctgagcaccgaggtggtgtacaagaagggccaggactacagattcgcctgctacgacagaggcagagcctgcagaagctacagagtgagattcctgtgcggcaagcccgtgagacccaagctgaccgtgaccatcgacaccaacgtgaacagcaccatcctgaacctggaggacaacgtgcagagctggaagcccggcgacaccctggtgatcgccagcaccgactacagcatgtaccaggccgaggagttccaggtgctgccctgcagaagctgcgcccccaaccaggtgaaggtggccggcaagcccatgtacctgcacatcggcgaggagatcgacggcgtggacatgagagccgaggtgggcctgctgagcagaaacatcatcgtgatgggcgagatggaggacaagtgctacccctacagaaaccacatctgcaacttcttcgacttcgacaccttcggcggccacatcaagttcgccctgggcttcaaggccgcccacctggagggcaccgagctgaagcacatgggccagcagctggtgggccagtaccccatccacttccacctggccggcgacgtggacgagagaggcggctacgacccccccacctacatcagagacctgagcatccaccacaccttcagcagatgcgtgaccgtgcacggcagcaacggcctgctgatcaaggacgtggtgggctacaacagcctgggccactgcttcttcaccgaggacggccccgaggagagaaacaccttcgaccactgcctgggcctgctggtgaagagcggcaccctgctgcccagcgacagagacagcaagatgtgcaagatgatcaccgaggacagctaccccggctacatccccaagcccagacaggactgcaacgccgtgagcaccttctggatggccaaccccaacaacaacctgatcaactgcgccgccgccggcagcgaggagaccggcttctggttcatcttccaccacgtgcccaccggccccagcgtgggcatgtacagccccggctacagcgagcacatccccctgggcaagttctacaacaacagagcccacagcaactacagagccggcatgatcatcgacaacggcgtgaagaccaccgaggccagcgccaaggacaagagacccttcctgagcatcatcagcgccagatacagcccccaccaggacgccgaccccctgaagcccagagagcccgccatcatcagacacttcatcgcctacaagaaccaggaccacggcgcctggctgagaggcggcgacgtgtggctggacagctgcagattcgccgacaacggcatcggcctgaccctggccagcggcggcaccttcccctacgacgacggcagcaagcaggagatcaagaacagcctgttcgtgggcgagagcggcaacgtgggcaccgagatgatggacaacagaatctggggccccggcggcctggaccacagcggcagaaccctgcccatcggccagaacttccccatcagaggcatccagctgtacgacggccccatcaacatccagaactgcaccttcagaaagttcgtggccctggagggcagacacaccagcgccctggccttcagactgaacaacgcctggcagagctgcccccacaacaacgtgaccggcatcgccttcgaggacgtgcccatcaccagcagagtgttcttcggcgagcccggcccctggttcaaccagctggacatggacggcgacaagaccagcgtgttccacgacgtggacggcagcgtgagcgagtaccccggcagctacctgaccaagaacgacaacaagtggcacagcctggccagcaaggccgccagcggccccagcggctag

SEQ ID NO: 111518 - DNA, 1206 bp, Artificial Sequence
  derived and/or modified sequence
atggtgaagttcgccgccaacatcaacaaggagagcatcgtggacgtggagggcgtggtgagaaaggtgaaccagaagatcggcagctgcacccagcaggacgtggagctgcacgtgcagaagatctacgtgatcagcctggccgagcccagactgcccctgcagctggacgacgccgtgagacccgaggccgagggcgaggaggagggcagagccaccgtgaaccaggacaccagactggacaacagagtgatcgacctgagaaccagcaccagccaggccgtgttcagactgcagagcggcatctgccacctgttcagagagaccctgatcaacaagggcttcgtggagatccagacccccaagatcatcagcgccgccagcgagggcggcgccaacgtgttcaccgtgagctacttcaagaacaacgcctacctggcccagagcccccagctgtacaagcagatgtgcatctgcgccgacttcgagaaggtgttcagcatcggccccgtgttcagagccgaggacagcaacacccacagacacctgaccgagttcgtgggcctggacatcgagatggccttcaactaccactaccacgaggtgatggaggagatcgccgacaccatggtgcagatcttcaagggcctgcaggagagattccagaccgagatccagaccgtgaacaagcagttcccctgcgagcccttcaagttcctggagcccaccctgagactggagtactgcgaggccctggccatgctgagagaggccggcgtggagatgggcgacgaggacgacctgagcacccccaacgagaagctgctgggccacctggtgaaggagaagtacgacaccgacttctacatcctggacaagtaccccctggccgtgagacccttctacaccatgcccgaccccagaaaccccaagcagagcaacagctacgacatgttcatgagaggcgaggagatcctgagcggcgcccagagaatccacgacccccagctgctgaccgagagagccctgcaccacggcatcgacctggagaagatcaaggcctacatcgacagcttcagattcggcgcccccccccacgccggcggcggcatcggcctggagagagtgaccatgctgttcctgggcctgcacaacgtgagacagaccagcatgttccccagagaccccaagagactgaccccctag

SEQ ID NO: 111519 - DNA, 1206 bp, Artificial Sequence
  derived and/or modified sequence
atggtcaagtttgcagccaacatcaacaaggagtcaattgttgacgtggagggtgtagtcagaaaggtgaaccagaagatcggcagctgcacgcagcaggatgtggagctgcacgtacagaagatctacgtcatatcacttgctgagcctagactgcccctccaattggacgatgccgtccggccggaagctgagggagaggaggagggacgggccactgtgaaccaggacacccgtttggacaacagagtcatcgacctgcgcacctcaacttcgcaggccgtgttcagactgcagagcggcatctgccacctgtttagggagacattgataaacaaaggattcgttgagatccagactcccaagattattagtgctgctagcgagggaggcgcgaatgtgtttactgtgagttattttaagaataatgcttatctcgcccagagtccccagctctacaaacagatgtgtatctgtgcagacttcgaaaaggtcttctctatagggcctgtcttccgggcagaggatagcaacacacaccgacacttaaccgagttcgttggattggatattgagatggcttttaactaccattaccacgaggttatggaagagatcgcagacaccatggtccagatttttaagggccttcaagaaaggtttcagacagagatccagactgttaacaagcagttcccctgcgagccctttaagtttttggagccaaccctgcgactagagtactgcgaagctttggctatgctgagggaggccggcgtggagatgggtgacgaggacgacttgagcacccccaacgagaaattgcttggacatctggtgaaagaaaaatatgacacagacttttatatcctcgataaataccctctcgctgtgcggcctttctacacgatgccagatccacgaaaccctaagcagagtaactcttatgatatgttcatgcgtggggaggaaatcctttctggcgcacagcggatccacgatccccagcttctcaccgagagagccctccatcacggcatcgacctggagaagatcaaggcatatatagactcgtttcggtttggcgcgcctcctcacgccggtggaggaattggcttagagagggtcactatgctttttctgggtttgcacaacgtccgacagacgagcatgttccctagagacccaaaacggctgactccctag

SEQ ID NO: 111520 - DNA, 1206 bp, Artificial Sequence
  derived and/or modified sequence
atggtgaagtttgctgccaacatcaacaaggagagcatcgtggatgtggagggcgtggtgaggaaggtgaaccagaagattggcagctgcacccagcaggatgtggagctgcacgtgcagaagatctacgtgatcagcctggccgagccccggctgcccctgcagctggatgatgctgtgcggcctgaggccgagggggaggaggagggccgggccaccgtgaaccaggacacccggctggacaacagagtgattgacctgcggaccagcaccagccaggccgtgttccggctgcagagcggcatctgccacctgttccgggagaccctcatcaacaagggctttgtggagatccagacccccaagatcatctctgctgccagcgagggcggggccaacgtgttcaccgtgtcctacttcaagaacaatgcctacctggcccagagcccccagctgtacaagcagatgtgcatctgtgccgactttgagaaggtgttcagcatcggccctgtgttccgggcagaggacagcaacacccaccgccacctgacagaatttgtgggcctggacatcgagatggccttcaactaccactaccacgaggtgatggaggagattgctgacaccatggtgcagatcttcaagggcctgcaggagcgcttccagacagagatccagacagtgaacaagcagttcccctgtgagcccttcaagttcctggagcccaccctgcggctggagtactgtgaggccctggccatgctgcgggaggccggcgtggagatgggagatgaagatgacctgagcaccccaaatgagaagctgctgggccacctggtgaaggagaagtatgacacagacttctacatcctggacaagtaccccctggccgtgcggcccttctacaccatgccagaccccaggaaccccaagcagagcaacagctatgacatgttcatgagaggagaggagatcctgagcggggcccagagaattcatgacccccagctgctgacagagcgggccctgcaccacggcatcgacctggagaagatcaaggcctacatcgacagcttccgctttggagcccctcctcatgctgggggcggcatcggcctggagcgggtgaccatgctgttcctgggcctgcacaacgtgcggcagacctccatgttcccccgggaccccaagaggctgaccccctag

SEQ ID NO: 111521 - DNA, 1206 bp, Artificial Sequence
  derived and/or modified sequence
atggtgaagttcgccgccaacatcaacaaggagagcatcgtggacgtggagggggttgtgaggaaggttaaccagaagattgggtcatgtacacagcaagatgtggagttgcacgtacagaagatctatgtaattagcctagccgaaccacggcttcctttgcagctggacgatgctgtaagaccagaggcggagggagaggaggaaggtagagcaacagtgaatcaggacacacgtttagataatagagtaatagatctccggacaagcacctctcaggctgtttttcgactccagagcggaatctgtcacttattcagagagactctgatcaacaaaggctttgtggagatccagactcctaagattatcagtgcagccagtgaaggaggcgccaatgtgttcactgtttcttactttaaaaataacgcatacctggcccaatcaccacagctgtataagcagatgtgcatttgtgcagatttcgagaaggttttttccataggaccagtttttcgcgctgaagatagcaatacccatagacacctgactgagtttgtgggactggatatcgagatggccttcaactatcattaccacgaggtgatggaggagatcgccgatactatggtacagattttcaaaggcctgcaggaacgatttcagaccgagatccagactgtaaacaaacagtttccatgcgagcctttcaaattcctggagcctactcttcgcctggaatactgtgaggccctggctatgctgcgcgaagccggggtcgagatgggagacgaagatgacctgagcacaccgaacgaaaagctgctggggcacctggtcaaggagaaatatgacacagatttttacattttggacaagtatcccctagcggtgcggccattctacaccatgccagaccctagaaaccccaagcagagcaatagctatgatatgttcatgcgaggcgaggagatcctaagcggcgcgcagaggatccacgatccacaattgcttacagagagggcgctccaccacggtattgatttagagaagatcaaggcctatattgacagcttcaggttcggcgcccccccacacgccgggggaggcatcggacttgagcgagtgacaatgttgtttctaggtcttcacaacgttcggcagaccagtatgttcccaagggacccaaaaagactgacgccctag

SEQ ID NO: 111522 - DNA, 1206 bp, Artificial Sequence
  derived and/or modified sequence
atggtaaagtttgccgcaaatattaataaggagtccatcgttgatgtagaaggagttgtccgtaaggttaaccagaagatcgggtcttgtacacagcaggacgtggagctgcacgtgcagaagatttacgtaatctcattggccgagccacggcttcctctgcaactggacgacgccgtcagacctgaagcagaaggtgaggaagaggggagagcaaccgtgaatcaggatacccggctggataacagggtgatcgaccttagaacttctacctcacaggccgttttcaggttacagtctggcatctgccatctgttccgtgagacactcataaataaggggtttgtggagatccagactccaaagatcatttctgccgcttccgaggggggtgccaacgtgtttaccgtgagttatttcaaaaataacgcctatctggcccaaagcccgcaactgtacaagcaaatgtgtatctgcgcggactttgagaaagtgttctctatcgggcctgtcttccgggcagaggattccaacacccaccgccacctgaccgagttcgtgggactggatatcgagatggcattcaattatcactatcatgaagtcatggaagagatcgctgataccatggtgcaaatatttaagggtctacaggaacggttccaaacagagatccagactgttaacaaacaattcccctgcgaaccattcaagttcctggagcccacgctgagattagagtattgtgaggccctggccatgctgagggaagctggcgtagaaatgggcgatgaggacgacctgagcacgcccaatgagaagctgctggggcacctggtgaaagagaagtacgacaccgatttctacattctcgataagtacccactggcggtccgcccattctacacgatgcctgatccccgtaaccctaagcaatctaactcctacgatatgtttatgcggggtgaggagatcctatctggagcccagcggatccacgaccctcagctgctcactgagagagctctgcatcatggaattgacctcgagaagataaaagcttacatagattccttcagattcggagctcctccacacgccggtggcggtatcggactggagcgggtgaccatgctcttcctcggcctccataatgtgcgccagacttcaatgtttccgagagacccaaagaggctgaccccatag

SEQ ID NO: 111523 - DNA, 477 bp, Artificial Sequence
  derived and/or modified sequence
atggacctggccagcgagatcaccagcgccacccagaccagcagcctgtgcagcagcggcagaggccacgccggctaccccgcccccggcatcgtggcccacggcttcgagacccacggcaccgccagagtggcccagggccacctgctgcccccctgcctgctgccccccccccagatgcccgtgctggccgccctgagagacctgagcagaagaggcagcaccagcagcagcagaagccccagcagacccgtgagcaccagcgccagcaagccctgcctgcccgccagctgcctgggcgagacctggagcatcagcatcaacctggtgggcagcagcggccacctgcagagccccggcgcccagagagacgcccagagagagaccggctgcctgggccccagctggctgccccaccaccagggcagagacgaggagctgagcctgagccacagcgcccagggcgaggagttctag

SEQ ID NO: 111524 - DNA, 477 bp, Artificial Sequence
  derived and/or modified sequence
atggacctggccagcgagatcaccagcgccacccagaccagcagcctgtgcagcagcggccggggccacgccggctacccagcccctggcatcgtggcccacggctttgagacccatggaacagcccgggtggcccagggccacctgctgcccccctgcctgctgcccccaccccagatgcctgtgctggccgccctgcgggacctgagcagaagaggcagcaccagcagcagccgcagccccagcaggcctgtgtccaccagcgccagcaagccctgcctgcctgccagctgcctgggggagacctggagcatcagcatcaacctggtgggcagcagcggccacctgcagagccctggggcccagagagatgcccagcgggagaccggctgcctgggccccagctggctgccccaccaccagggcagagatgaggagctgagcctgagccacagcgcccagggcgaggagttctag

SEQ ID NO: 111525 - protein, 490 aa, Artificial Sequence
  derived and/or modified sequence
MEDSDSAAKQLGLAEAAAVAAAAAVAAAAAAAAGGEAEEPVLSRDEDSEEDADSEAERETPRVTAVAVMAAEPGHMDMGAEALPGPDEAAAAAAFAEVTTVTVANVGAAADNVFTTSVANAASISGHVLSGRTALQIGDSLNTEKATLIVVHTDGSIVETTGLKGPAAPLTPGPQSPPTPLAPGQEKGGTKYNWDPSVYDSELPVRCRNISGTLYKNRLGSGWDLKPSRCLLHLCCLLRRHDLITVTPSGQITTSGALTFDRASTVEATAVISESPAQGDVFAGATVQEASVQPPCRASHPEPHYPGYQDSCQIAPFPEAALPTSHPKIVLTSLPALAVPPPTPTKAAPPALVNGLELSEPRSWLYLEEMVNSLLNTAQQLKTLFEQAKHASTYREAATNQAKIHADAERKEVIHPPRLPKVLGLQQSCVNCGREAMSECTGCHKVNYCSTFCQRKDWKDHQHICGQSAAVTVQADEVHVAESVMEKVTV

SEQ ID NO: 111526 - DNA, 1473 bp, Artificial Sequence
  derived and/or modified sequence
atggaagattccgactctgctgccaagcagctgggtctcgccgaggctgcagcagtcgctgcagcggcagctgttgccgctgccgcagccgctgctgccggtggtgaagccgaagaaccggtgctttcacgtgacgaagactcggaggaggatgctgactcagaggccgaacgtgagactcccagagtgactgcagtggccgtcatggccgctgagccaggccacatggatatgggcgcagaggcattgcctggcccagatgaagcagccgctgctgcagcgttcgccgaggtaacaaccgttacagtcgccaacgtaggtgccgctgcagacaacgtgttcaccacaagtgtggccaacgccgcttctatttccgggcacgtgctcagtgggaggaccgcactgcagatcggtgatagtctgaacaccgaaaaggcgacactgattgtggtgcacacagacggctccatcgtagagactacagggctcaaaggcccagctgcaccattgacccctgggcctcagagcccccctacacctctggcgcctggccaagaaaaggggggaacaaagtacaattgggatccgagtgtctatgattctgagctgccagtgaggtgcaggaacataagtggtactctgtacaagaatcggctgggctctgggtgggacctgaagcctagccgctgcctgctacacttatgctgtctgcttagaagacacgatttgattacagtgacccctagcggccaaatcactacatccggggctctgacttttgatcgcgcatcaactgtggaagcgacagcggtcatttctgagagccccgcacagggcgacgtgtttgccggtgcaacagtgcaggaggccagcgtccagccaccttgtcgggctagtcatcctgagccccactacccaggatatcaagacagttgccaaatagcaccattccctgaggccgcactacctactagccatccaaagattgtgctgactagtctcccagccctggctgtacctcctcccactccgactaaggccgcaccccctgccctggtcaatggcctggagctctcagaacctcgctcctggctttatctggaggaaatggtcaattccctgcttaacacagcacagcagttaaaaactctgtttgaacaagccaagcacgccagtacgtatagagaagctgccacaaatcaggccaaaattcatgccgatgccgaacgaaaagaggttattcaccctcctcgattacccaaggtactgggcctccagcagtcctgcgttaattgcggaagggaagcgatgagcgagtgcaccgggtgccacaaagtgaactactgctctaccttttgtcagaggaaggactggaaagatcaccagcatatctgcgggcagagtgcagctgtgacagtccaagcggatgaggtacacgtagcggaatccgttatggagaaagttaccgtatag

SEQ ID NO: 111527 - DNA, 1473 bp, Artificial Sequence
  derived and/or modified sequence
atggaggattccgattctgctgcgaaacagctcgggttggccgaagcagcagcagttgctgcagccgctgccgtcgcagcagccgccgctgcagcggccggcggcgaagctgaagaacccgtcctctccagggacgaggacagcgaggaggacgctgacagtgaagccgagcgagaaaccccacgtgtgacagccgtagcagtgatggccgctgagcccggccacatggatatgggggcggaagccctgcccggacccgatgaggcagcagctgctgcagcctttgccgaagtgacaacagtgactgtggccaatgttggtgccgctgcagataacgtatttacaacttctgtcgccaacgcagcatctatctcaggacacgtgctgtctggtagaaccgcactgcagattggcgattcactgaataccgagaaggctactctgatcgttgtgcacacggacggatcaatcgtcgagactacaggcctgaaaggtccggcagcacctctcacacccggtcctcagtcaccccccaccccactggcgccaggacaggaaaagggtgggacaaagtacaactgggatccctcagtctacgacagcgagttgccagtgagatgtcgcaatatctccggtactctttacaagaacaggcttggttctggatgggacctgaaaccctcccgatgcctgctacatctctgctgcctcctgaggcgccatgatttgataaccgttacaccctccggccagatcaccactagtggcgcccttaccttcgacagggcctccacggttgaggctacagctgtcatatctgagtcacccgcccagggcgatgtttttgcaggtgccaccgttcaggaggcttccgtgcagccaccttgtcgcgcatctcaccccgaacctcactacccaggctatcaagatagctgtcagatagcaccctttccggaagccgccctcccgacctctcacccaaagatcgtcctcaccagcctcccggcgctcgccgtgccaccccccactccaactaaggccgctccccccgcactcgtgaacgggctagaactcagcgagcccaggtcatggctgtacctagaagaaatggtcaactccctgctcaataccgcccagcagcttaagaccctgttcgaacaggcgaaacacgcttccacctacagggaagccgccaccaatcaggctaaaatccacgctgacgccgagcgtaaagaggtcatccacccgcccaggctccctaaggtcttgggacttcagcagtcgtgcgtgaattgcggacgggaagccatgagcgaatgtacagggtgccacaaggtaaactactgctctacattctgtcaacgtaaagattggaaagatcaccagcatatatgcggccagtcagcagctgtgacagttcaagctgacgaggtccacgtagcagaatcagtaatggaaaaggtcactgtttag

SEQ ID NO: 111528 - DNA, 1473 bp, Artificial Sequence
  derived and/or modified sequence
atggaagattccgacagtgctgccaagcagctcggacttgcagaagccgcagcagtcgcagctgcagccgcagttgctgccgctgctgccgccgccgcaggaggggaagcagaagagccagtgttgtccagagacgaggactcagaggaggacgccgatagcgaggctgagagggaaaccccccgggttacagccgtggctgtaatggcagcagaacccggtcacatggacatgggagcagaggctctcccaggcccggatgaggctgccgccgctgccgcctttgctgaagttaccaccgtcacagtcgcaaacgtcggggcagccgctgacaatgtattcaccacgagcgtcgctaacgcggcatcaatctccgggcatgtactgagcgggagaaccgccttgcaaataggggacagtctgaatactgaaaaggcaacactgattgtggtgcacaccgatggttccatcgtggagaccactggattaaaaggccctgcagcaccactaacaccaggcccacaaagcccaccaactccactcgcacccgggcaggaaaagggggggactaaatataattgggatccttccgtctacgattccgaactgcctgttagatgcagaaatatctcaggaaccctctacaaaaatcgactcggttcgggttgggacttgaagccatccaggtgtctgctacatctgtgctgcctgttgcggagacatgacctaatcacagtgacaccctctgggcagatcaccacttccggagctctgacattcgaccgcgcctccaccgtcgaagctacagccgttatttctgaaagccccgctcaaggtgatgtgtttgccggcgccactgtccaagaagcatccgttcagcctccctgccgggcaagtcatcccgaaccgcattacccaggctaccaggattcatgtcagatcgcaccattccccgaggccgctttgcctacctcacatcctaaaatcgtactgacttcacttcccgctctcgcagtaccaccaccaacaccgaccaaagccgcacctccagctctcgtgaacggcttagagcttagcgaaccccggagctggctgtatcttgaggagatggtgaactcactcctgaacaccgctcaacaactgaagacactcttcgaacaggccaagcacgcaagcacctatagagaagccgcaaccaatcaggccaagattcatgctgacgcagaaagaaaagaggttatccacccaccaagactgccgaaagtactgggcttacaacagagttgtgtgaattgcggtagagaggcgatgtcggagtgtacaggctgccacaaagtaaattattgttctacattctgtcagcgcaaagattggaaagatcaccagcatatttgcggtcagagcgcagctgtgacagttcaggcagatgaggtgcatgtcgcagagtccgtcatggagaaagtaaccgtctag

SEQ ID NO: 111529 - DNA, 1473 bp, Artificial Sequence
  derived and/or modified sequence
atggaggacagcgacagcgccgccaagcagctgggcctggccgaggccgccgccgtggccgccgccgccgccgtggccgccgccgccgccgccgccgccggcggcgaggccgaggagcccgtgctgagcagagacgaggacagcgaggaggacgccgacagcgaggccgagagagagacccccagagtgaccgccgtggccgtgatggccgccgagcccggccacatggacatgggcgccgaggccctgcccggccccgacgaggccgccgccgccgccgccttcgccgaggtgaccaccgtgaccgtggccaacgtgggcgccgccgccgacaacgtgttcaccaccagcgtggccaacgccgccagcatcagcggccacgtgctgagcggcagaaccgccctgcagatcggcgacagcctgaacaccgagaaggccaccctgatcgtggtgcacaccgacggcagcatcgtggagaccaccggcctgaagggccccgccgcccccctgacccccggcccccagagcccccccacccccctggcccccggccaggagaagggcggcaccaagtacaactgggaccccagcgtgtacgacagcgagctgcccgtgagatgcagaaacatcagcggcaccctgtacaagaacagactgggcagcggctgggacctgaagcccagcagatgcctgctgcacctgtgctgcctgctgagaagacacgacctgatcaccgtgacccccagcggccagatcaccaccagcggcgccctgaccttcgacagagccagcaccgtggaggccaccgccgtgatcagcgagagccccgcccagggcgacgtgttcgccggcgccaccgtgcaggaggccagcgtgcagcccccctgcagagccagccaccccgagccccactaccccggctaccaggacagctgccagatcgcccccttccccgaggccgccctgcccaccagccaccccaagatcgtgctgaccagcctgcccgccctggccgtgcccccccccacccccaccaaggccgccccccccgccctggtgaacggcctggagctgagcgagcccagaagctggctgtacctggaggagatggtgaacagcctgctgaacaccgcccagcagctgaagaccctgttcgagcaggccaagcacgccagcacctacagagaggccgccaccaaccaggccaagatccacgccgacgccgagagaaaggaggtgatccacccccccagactgcccaaggtgctgggcctgcagcagagctgcgtgaactgcggcagagaggccatgagcgagtgcaccggctgccacaaggtgaactactgcagcaccttctgccagagaaaggactggaaggaccaccagcacatctgcggccagagcgccgccgtgaccgtgcaggccgacgaggtgcacgtggccgagagcgtgatggagaaggtgaccgtgtag

SEQ ID NO: 111530 - DNA, 1905 bp, Artificial Sequence
  derived and/or modified sequence
cttcgggcggcctcggcccagctcgggcgtcctcttcgggccccgcttcgggctccgcgaccggcgcttcgggcggtcccggacggcgccttcgggaaggctcggcggagtccggatggaggactcggactcggcggcaaagcagctgggcctggctgaggcggcggcggtggcggccgcggccgctgtggcggcggcggccgcggccgcggcaggaggcgaggcggaggagccggtgctgagcagggacgaggactcggaggaggacgcagactcggaggcggagcgggagacgccgcgggtcacggcagtggcggtgatggcggcggagcccgggcacatggacatgggcgccgaggccctgcccggccccgacgaggccgccgctgccgcagccttcgcagaggtgaccacagtgacagtggccaacgtgggggctgctgcagacaatgtcttcaccacgtctgtggcgaacgcggcatccatctcaggacatgttctgtctggtaggacggcccttcagatcggggacagcctgaacaccgaaaaagcgacactgattgtcgtccacacagatgggagcatcgtggagaccaccgggctgaaaggcccggcagctcccctcaccccaggtcctcagtctcctccaacccctctggctcccggccaagaaaaaggtggaactaaatacaactgggacccttctgtgtacgacagtgagctgcccgtacggtgccggaacatcagcggcactctgtacaagaacaggctcggctcaggatgggatcttaaaccctcacgctgcctcttgcacctgtgctgcctgctgcgacgacatgaccttatcaccgtgaccccctcgggacagatcacgacctcgggggcactgacctttgaccgagcgtccacggtagaggccactgctgtcatatcagagagtccggcccagggcgacgtcttcgcaggggccacagtccaagaggccagcgtgcagcccccatgcagggccagccaccctgagcctcactaccccggctatcaggacagctgccagatcgcaccgtttccagaagctgcgttgccaacgtcacatcccaaaatagtgttgacatccctgcctgcgctggcggtcccacccccgactcccaccaaagcggcacctcccgcgttggtcaatgggctggagctgtcagagccgcggagctggctgtacctagaagagatggtcaactccttgctcaacacagcgcagcagctgaagacgctgtttgagcaagccaagcatgccagcacctaccgagaagctgccacaaaccaggccaagatccacgctgacgcagagcggaaggaggtgatccacccgcctcggctgcccaaagtcctgggattacagcagtcctgcgttaactgcggccgggaggctatgagcgagtgcaccggctgccacaaggtcaactactgctccaccttctgccaacgcaaggactggaaggatcaccagcacatatgcggccagtcagcagctgtcaccgtccaggcagacgaagtccacgtggctgaaagcgtgatggagaaggtgaccgtgtgaggctccatcggccgccctgggagctggggcccctcgcactcctgtgaggcttttgcaggtcgaaggcccccctgaggactctggggggacgttgagaagaggggtgtgggaaggtaaagaaacttgctggacaagtcattaacacactttaagcgaatggtgccctgggaagcgcactccccctgcccgggccccctgcccgctcgcggacagattttttatccctgggatcatgagcgtccggtcttgcccacagggcctgtgctgcgacgcacatacatacgtgttgtgtctgtcaataaagtgtaaataaggtc

SEQ ID NO: 111531 - DNA, 1473 bp, Artificial Sequence
  derived and/or modified sequence
atggaagactccgattcagctgctaagcagctggggctggctgaggccgcggcagtagccgctgctgccgctgtcgcggccgctgccgccgccgcggcgggcggagaagcagaggagcctgtgctgtcaagagatgaggactctgaagaggatgctgactctgaggccgagagggaaacgcccagggtgaccgctgtcgcggtgatggccgccgaaccgggccacatggacatgggagcagaggcgttgccaggacctgacgaagcagcggctgccgccgcttttgctgaggtgacgacggtgacggttgccaacgtcggagcagctgctgacaacgttttcaccacaagtgtcgctaacgcagcatccattagcgggcacgtgctctccggcaggactgccctacagatcggggacagcctgaacacagaaaaggctactctgattgttgtgcatactgacggaagtatcgtggagacaacagggctaaaagggcccgcagcccctctcacccccggcccacagagcccaccaactcctctggcgcccggccaagaaaagggcggtactaagtataactgggatcccagcgtctacgattcagaactacctgtccgctgtaggaatatcagcggcaccctatataagaaccgactgggatctgggtgggatctcaaaccctcgagatgcctccttcacctgtgctgcctattgcgccgacacgatctcattactgtaacacctagtggccagatcacgacatctggggccctgacctttgacagggcctcaaccgtagaggccactgcggttatttcagagagccccgcccagggagatgtcttcgccggggcgaccgtacaggaagccagcgtccagccaccctgccgtgcatcacatcctgaaccacattatcccggctaccaagattcttgtcaaattgcgccattccccgaggctgcgctacctacatcccatccgaaaattgtcctcacaagtctgccagcattggctgtgcctccacctacgcctactaaggccgccccccctgctttagtcaatggactggaactgagcgaacccaggtcgtggctgtatctcgaagagatggtgaattccctgctgaataccgcgcagcaattgaagacattgtttgaacaggcaaagcacgcctcgacataccgggaggccgctacaaatcaggccaaaatccacgcagatgcagagagaaaggaagtgatccatcctccccgtctgccgaaggtgttgggtctgcagcagtcttgcgttaactgtggtagagaggcaatgtcggagtgcacgggatgccacaaagtcaactactgttccaccttctgccaaaggaaagactggaaagaccatcagcatatctgcggacagtcagccgccgtgacggttcaggcagatgaggtccacgtggccgaaagcgtgatggagaaggtgaccgtgtag

SEQ ID NO: 111532 - DNA, 1473 bp, Artificial Sequence
  derived and/or modified sequence
atggaggacagcgacagcgctgccaagcagctgggcctggccgaggccgctgctgtggccgctgctgctgctgtggccgctgctgctgctgctgctgctggaggagaggccgaggagcctgtgctgagcagagatgaggacagcgaggaggatgctgacagcgaggccgagcgggagaccccccgggtgacagctgtggccgtgatggctgctgagcccggccacatggacatgggcgctgaggccctgcccggcccagatgaagctgctgctgctgctgcctttgctgaggtgaccaccgtgacagtggccaacgtgggcgctgctgctgacaacgtgttcaccacctctgtggccaatgctgccagcatcagcggccacgtgctgagcggccgcacagccctgcagattggagacagcctgaacacagagaaggccaccctgattgtggtgcacacagatggcagcatcgtggagaccaccggcctgaagggccctgctgcccccctgaccccaggcccccagagcccccccacccccctggcccctggccaggagaagggcggcaccaagtacaactgggaccccagcgtgtatgattctgagctgcctgtgcgctgcaggaacatcagcggcaccctgtacaagaaccggctgggcagcggctgggacctgaagcccagccgctgcctgctgcacctgtgctgcctgctgcggagacatgacctgatcaccgtgaccccatctggccagatcaccaccagcggggccctgacctttgaccgggccagcacagtggaggccacagctgtgatcagcgagagccctgcccagggagatgtgtttgctggggccaccgtgcaggaggcctctgtgcagcccccctgccgggccagccaccctgagccccactacccaggctaccaggacagctgccagatcgcccccttccctgaggccgccctgcccaccagccaccccaagatcgtgctgaccagcctgcctgccctggccgtgcccccacccacccccaccaaggccgcccccccagccctggtgaatggcctggagctgtctgagcccaggtcctggctgtacctggaggagatggtgaacagcctgctgaacacagcccagcagctgaagaccctgtttgagcaggccaagcacgccagcacctaccgggaggccgccaccaaccaggccaagatccacgcagatgctgagaggaaggaggtgatccaccccccccggctgcccaaggtgctgggcctgcagcagagctgtgtgaactgtggccgggaggccatgtctgaatgtacaggctgccacaaggtgaactactgcagcaccttctgccagaggaaggactggaaggaccaccagcacatctgtggccagagcgctgctgtgacagtgcaggctgatgaggtgcacgtggccgagagcgtgatggagaaggtgacagtgtag

SEQ ID NO: 111533 - DNA, 1473 bp, Artificial Sequence
  derived and/or modified sequence
atggaggacagcgacagcgccgccaagcagctgggcctggccgaggccgctgccgtcgccgcggccgcggcggtcgcagcagcggcagcagccgccgcggggggggaggccgaagagccggttctgagtcgagacgaagactccgaagaggacgctgactctgaagctgagcgggagaccccgcgcgtgactgccgtagccgttatggccgcggaaccaggtcatatggatatgggtgcagaagccttgcctggaccagatgaggcggccgccgctgccgcttttgccgaggtcaccaccgtgacagttgcgaatgtcggtgccgccgccgataacgtgtttaccacatctgtggccaacgctgccagtattagcggtcacgttctgtccggccggactgccctccagatcggagatagtttaaacactgaaaaagcaaccctcatcgtcgtgcacaccgatgggtctatcgtggagaccacgggactgaaaggacccgccgcacccctcactcctggaccgcagtcccccccaacaccgctggctcccgggcaggagaaaggcggaacgaagtataactgggatccctcagtttatgactccgagttgcccgtgcggtgcagaaacatctccgggacgctatacaagaatcgacttgggagcgggtgggatttgaaaccctcacggtgtctcctccatctgtgctgtctgcttcggcgtcatgacttaatcactgtaacacctagtggccagattaccactagcggcgccctgacattcgaccgcgcctctacagtggaggcaactgccgtgattagcgaatctccagcccagggcgatgtgtttgcaggcgcgacagtgcaggaggctagcgtgcaacctccatgcagggcaagccatccagagcctcattacccaggctaccaggactcctgccagatagccccatttccagaggcagctctgcctacaagtcacccaaagatcgtgttaacatctttgcccgcgttggctgtgcccccgcctacacctacaaaggcagctcctcccgccctggtgaacggactggagctgtctgagccaagaagctggctttatttagaggagatggtcaatagtctcctgaatactgcacagcagttaaagactttgtttgaacaggctaagcatgccagcacttaccgcgaggccgccactaaccaagctaagattcacgccgacgccgagagaaaggaggtcatccaccctccacgcctgcccaaagtactgggattgcaacaaagctgtgtgaattgtggccgtgaggccatgtctgagtgcacaggctgccataaggttaactattgttccacgttctgccagagaaaagattggaaagaccatcagcacatttgtgggcaatccgccgcagtaacggtgcaagctgacgaagtgcatgttgccgaaagtgtgatggaaaaggtgaccgtctag

SEQ ID NO: 111534 - RNA, 1473 nt, Artificial Sequence
  derived and/or modified sequence
auggaggauuccgauucugcugcgaaacagcucggguuggccgaagcagcagcaguugcugcagccgcugccgucgcagcagccgccgcugcagcggccggcggcgaagcugaagaacccguccucuccagggacgaggacagcgaggaggacgcugacagugaagccgagcgagaaaccccacgugugacagccguagcagugauggccgcugagcccggccacauggauaugggggcggaagcccugcccggacccgaugaggcagcagcugcugcagccuuugccgaagugacaacagugacuguggccaauguuggugccgcugcagauaacguauuuacaacuucugucgccaacgcagcaucuaucucaggacacgugcugucugguagaaccgcacugcagauuggcgauucacugaauaccgagaaggcuacucugaucguugugcacacggacggaucaaucgucgagacuacaggccugaaagguccggcagcaccucucacacccgguccucagucaccccccaccccacuggcgccaggacaggaaaagggugggacaaaguacaacugggaucccucagucuacgacagcgaguugccagugagaugucgcaauaucuccgguacucuuuacaagaacaggcuugguucuggaugggaccugaaacccucccgaugccugcuacaucucugcugccuccugaggcgccaugauuugauaaccguuacacccuccggccagaucaccacuaguggcgcccuuaccuucgacagggccuccacgguugaggcuacagcugucauaucugagucacccgcccagggcgauguuuuugcaggugccaccguucaggaggcuuccgugcagccaccuugucgcgcaucucaccccgaaccucacuacccaggcuaucaagauagcugucagauagcacccuuuccggaagccgcccucccgaccucucacccaaagaucguccucaccagccucccggcgcucgccgugccaccccccacuccaacuaaggccgcuccccccgcacucgugaacgggcuagaacucagcgagcccaggucauggcuguaccuagaagaaauggucaacucccugcucaauaccgcccagcagcuuaagacccuguucgaacaggcgaaacacgcuuccaccuacagggaagccgccaccaaucaggcuaaaauccacgcugacgccgagcguaaagaggucauccacccgcccaggcucccuaaggucuugggacuucagcagucgugcgugaauugcggacgggaagccaugagcgaauguacagggugccacaagguaaacuacugcucuacauucugucaacguaaagauuggaaagaucaccagcauauaugcggccagucagcagcugugacaguucaagcugacgagguccacguagcagaaucaguaauggaaaaggucacuguuuag

SEQ ID NO: 111535 - RNA, 1473 nt, Artificial Sequence
  derived and/or modified sequence
auggaagauuccgacagugcugccaagcagcucggacuugcagaagccgcagcagucgcagcugcagccgcaguugcugccgcugcugccgccgccgcaggaggggaagcagaagagccaguguuguccagagacgaggacucagaggaggacgccgauagcgaggcugagagggaaaccccccggguuacagccguggcuguaauggcagcagaacccggucacauggacaugggagcagaggcucucccaggcccggaugaggcugccgccgcugccgccuuugcugaaguuaccaccgucacagucgcaaacgucggggcagccgcugacaauguauucaccacgagcgucgcuaacgcggcaucaaucuccgggcauguacugagcgggagaaccgccuugcaaauaggggacagucugaauacugaaaaggcaacacugauuguggugcacaccgaugguuccaucguggagaccacuggauuaaaaggcccugcagcaccacuaacaccaggcccacaaagcccaccaacuccacucgcacccgggcaggaaaagggggggacuaaauauaauugggauccuuccgucuacgauuccgaacugccuguuagaugcagaaauaucucaggaacccucuacaaaaaucgacucgguucggguugggacuugaagccauccaggugucugcuacaucugugcugccuguugcggagacaugaccuaaucacagugacacccucugggcagaucaccacuuccggagcucugacauucgaccgcgccuccaccgucgaagcuacagccguuauuucugaaagccccgcucaaggugauguguuugccggcgccacuguccaagaagcauccguucagccucccugccgggcaagucaucccgaaccgcauuacccaggcuaccaggauucaugucagaucgcaccauuccccgaggccgcuuugccuaccucacauccuaaaaucguacugacuucacuucccgcucucgcaguaccaccaccaacaccgaccaaagccgcaccuccagcucucgugaacggcuuagagcuuagcgaaccccggagcuggcuguaucuugaggagauggugaacucacuccugaacaccgcucaacaacugaagacacucuucgaacaggccaagcacgcaagcaccuauagagaagccgcaaccaaucaggccaagauucaugcugacgcagaaagaaaagagguuauccacccaccaagacugccgaaaguacugggcuuacaacagaguugugugaauugcgguagagaggcgaugucggaguguacaggcugccacaaaguaaauuauuguucuacauucugucagcgcaaagauuggaaagaucaccagcauauuugcggucagagcgcagcugugacaguucaggcagaugaggugcaugucgcagaguccgucauggagaaaguaaccgucuag

SEQ ID NO: 111536 - protein, 283 aa, Artificial Sequence
  derived and/or modified sequence
MPRRSLHAAAVLLLVILKEQPSSPAPVNGSKWTYFVKLNLPSDMHIQGLQSRYSATQLHLHWGNPNDPHGSEHTVSGQHFAAELHIVHYNSDLYPDASTASNKSEGLAVLAVLIEMGSFNPSYDKIFSHLQHVKYKGQEAFVPGFNIEELLPERTAEYYRYRGSLTTPPCNPTVLWTVFRNPVQISQEQLLALETALYCTHMDDPSPREMINNFRQVQKFDERLVYTSFSQGIILSLALAGILGICIVVVVSIWLFRRKSIKKGDNKGVIYKPATKMETEAHA

SEQ ID NO: 111537 - DNA, 852 bp, Artificial Sequence
  derived and/or modified sequence
atgccacgtagatctctccatgctgccgctgtgctgctgctcgttatcctcaaggagcagccatcaagtcccgccccagttaatgggtctaagtggacctatttcgtcaagctgaacctccctagcgatatgcacattcaggggttacagtctaggtattcagctacacagctccatctgcactgggggaaccccaatgacccccacggctctgagcacactgtaagcgggcagcactttgccgcggagttgcatatcgttcactacaactctgatctgtatcctgatgcctccactgcctccaacaagagtgagggcctagccgtgcttgcggtcctcattgaaatgggatctttcaacccaagctatgacaaaattttctctcatctgcagcatgttaagtacaaaggccaggaggccttcgtgccaggtttcaatatcgaagagctgctgccagagcgcacagctgagtattataggtatcgcggaagcttgacaactccaccctgcaaccctactgtgttgtggactgtgttcaggaatcccgtgcagatctcccaagaacagcttcttgcgctagagaccgctctgtattgcacacacatggacgatccaagcccgcgagagatgataaacaacttcagacaggtgcagaagtttgacgagaggctggtatatactagtttctctcagggaatcatcctgagtctagccctggcaggaattctgggaatctgcatcgtggttgtggtgagtatctggctctttaggagaaagagtatcaaaaagggggacaataagggggtcatctataagccggcgactaaaatggagacagaggctcatgcttag

SEQ ID NO: 111538 - DNA, 852 bp, Artificial Sequence
  derived and/or modified sequence
atgcccaggaggagcctgcacgccgctgctgtgctgctgctggtgatcctgaaggagcagcccagcagccctgcccctgtgaatggcagcaagtggacctactttgtgaagctgaacctgcccagcgacatgcacatccagggcctgcagagccgctacagcgccacccagctgcacctgcactggggcaaccccaatgacccccacggcagcgagcacacagtgtctggccagcactttgctgctgagctgcacatcgtgcactacaacagcgacctgtacccagatgccagcacagccagcaacaagtctgagggcctggccgtgctggccgtgctgattgagatgggcagcttcaaccccagctatgacaagatcttcagccacctgcagcacgtgaagtacaagggccaggaggcctttgtgcccggcttcaacatcgaggagctgctgcctgagaggacagctgagtactaccgctaccggggcagcctgaccaccccaccctgcaaccccaccgtgctgtggacagtgttcaggaaccctgtgcagatcagccaggagcagctgctggccctggagacagccctgtactgcacccacatggatgaccccagcccccgggagatgatcaacaacttccggcaggtgcagaagtttgatgagcggctggtgtacaccagcttcagccagggcatcatcctgagcctggccctggccggcatcctgggcatctgcatcgtggtggtggtgtccatctggctgttccggaggaagagcatcaagaagggggacaacaagggcgtcatctacaagccagccaccaagatggagacagaggcccacgcctag

SEQ ID NO: 111539 - DNA, 852 bp, Artificial Sequence
  derived and/or modified sequence
atgccccggcggagcctgcacgccgccgccgtgctgctgctggtgatactcaaagagcagccctccagccccgctccagtcaatggctctaagtggacttacttcgtgaaactgaacctgccctccgatatgcatattcagggcctgcaatctaggtacagcgcgacccagctgcatctgcattggggtaatcctaatgacccccatgggtccgaacacaccgtgtctggacagcactttgcagccgaattgcatatagttcactataacagtgatctctaccctgacgctagcaccgcaagcaataagagcgaaggactagcagttcttgctgtactcatcgaaatggggtcattcaatccatcctacgacaagatcttctcccatctgcagcatgtaaaatacaagggtcaggaagcttttgtccctggctttaacatcgaagagctgttacctgaacgcactgccgagtactaccggtaccggggttcacttactacgcctccatgtaaccctaccgttttatggaccgtgtttcgtaaccccgtccaaatttctcaagagcagctgctcgctctggagacagctttgtattgtacccatatggacgacccgtcgccccgggagatgataaacaattttcgccaagtgcagaaatttgacgagcgcctggtctacacttccttttcacagggaataattctgtcactggctctggctggtatcttaggcatttgtattgttgtcgtggttagtatttggctttttagacgcaaaagcatcaagaagggcgacaacaagggagtgatctacaagcccgccacaaagatggagaccgaggctcacgcatag

SEQ ID NO: 111540 - DNA, 852 bp, Artificial Sequence
  derived and/or modified sequence
atgccaaggcgttcactgcatgccgcagccgttctgttactggtgatccttaaggaacaaccaagctctcctgcacctgtgaatggctccaaatggacttatttcgttaagctgaatcttcccagtgacatgcacatacagggtctccagtcaaggtattctgccacccagttgcatttgcactggggtaacccaaatgacccccatggaagcgaacacacagtgtctggccagcattttgccgcagagctgcacattgtgcactataacagcgacctatacccagatgcctctacagcgtccaacaagagcgagggcctagcagtgctcgcggtgctaattgaaatgggctcttttaacccaagctatgataaaatctttagtcacctgcagcatgtgaagtacaaaggacaagaggccttcgtcccaggattcaacatcgaggaattgctacccgagaggacagccgagtattatcggtataggggttccctcacaactccaccttgtaatcctactgttctctggacagtgtttaggaaccccgtgcaaatctctcaagagcaactgttggctctggagacggccttgtattgcacacatatggacgacccatccccgcgtgagatgattaacaactttaggcaggtgcagaagttcgacgagcgccttgtgtatacttctttttcgcagggtatcattctgagtcttgcgctcgccggaatcttgggaatctgcatcgtggttgtggttagcatttggctcttccgcaggaaatcaataaagaaaggagacaacaagggcgtcatttacaaaccagccactaaaatggaaaccgaagcccacgcctag

SEQ ID NO: 111541 - DNA, 2556 bp, Artificial Sequence
  derived and/or modified sequence
gaagggcggacgtactcgccacggcacccaggctgcgcgcacgcggtcccggtgtgcagctggagagcgagcggccaccgggagcccccggcacagcccgcgcccgccccgcaggagcccgcgaagatgccccggcgcagcctgcacgcggcggccgtgctcctgctggtgatcttaaaggaacagccttccagcccggccccagtgaacggttccaagtggacttattttgtgaagctgaacctgccctcggacatgcacatccagggcctccagtctcgctacagtgccacgcagctgcacctgcactgggggaacccgaatgacccgcacggctctgagcacaccgtcagcggacagcacttcgccgccgagctgcacattgtccattataactcagacctttatcctgacgccagcactgccagcaacaagtcagaaggcctcgctgtcctggctgttctcattgagatgggctccttcaatccgtcctatgacaagatcttcagtcaccttcaacatgtaaagtacaaaggccaggaagcattcgtcccgggattcaacattgaagagctgcttccggagaggaccgctgaatattaccgctaccgggggtccctgaccacacccccttgcaaccccactgtgctctggacagttttccgaaaccccgtgcaaatttcccaggagcagctgctggctttggagacagccctgtactgcacacacatggacgacccttcccccagagaaatgatcaacaacttccggcaggtccagaagttcgatgagaggctggtatacacctccttctcccaaggcatcatcctctcactggccctggctggcattcttggcatctgtattgtggtggtggtgtccatttggcttttcagaaggaagagtatcaaaaaaggtgataacaagggagtcatttacaagccagccaccaagatggagactgaggcccacgcttgaggtccccggagctcccgggcacatccaggaaggaccttgctttggaccctacacacttcggctctctggacacttgcgacacctcaaggtgttctctgtagctcaatctgcaaacatgccaggcctcagggatcctctgctgggtgcctccttgccttgggaccatggccaccccagagccatccgatcgatggatgggatgcactctcagaccaagcagcaggaattcaaagctgcttgctgtaactgtgtgagattgtgaagtggtctgaattctggaatcacaaaccaagccatgctggtgggccattaatggttggaaaacactttcatccggggctttgccagagcgtgctttcaagtgtcctggaaattctgctgcttctccaagctttcagacaagaatgtgcactctctgcttaggttttgcttgggaaactcaacttctttcctctggagacggggcatctccctctgatttccttctgctatgacaaaacctttaatctgcaccttacaactcggggacaaatggggacaggaaggatcaagttgtagagagaaaaagaaaacaagagatatacattgtgatatattagggacactttcacagtcctgtcctctggatcacagacactgcacagaccttagggaatggcaggttcaagttccacttcttggtggggatgagaagggagagagagctagagggacaaagagaatgagaagacatggatgatctgggagagtctcactttggaatcagaattggaatcacattctgtttatcaagccataatgtaaggacagaataatacaatattaagtccaaatccaacctcctgtcagtggagcagttatgttttatactctacagattttacaaataatgaggctgttccttgaaaatgtgttgttgctgtgtcctggaggagacatgagttccgagatgacccaatctgcctttgaatctggaggaaataggcagaaacaaaatgactgtagaacttattctctgtaggccaaatttcatttcagccacttctgcaggatccctactgccaacctggaatggagacttttatctacttctctctctctgaagatgtcaaatcgtggtttagatcaaatatatttcaagctataaaagcaggaggttatctgtgcagggggctggcatcatgtatttaggggcaagtaataatggaatgctactaagatactccatattcttccccgaatcacacagacagtttctgacaggcgcaactcctccattttcctcccgcaggtgagaaccctgtggagatgagtcagtgccatgactgagaaggaaccgacccctagttgagagcaccttgcagttccccgagaactttctgattcacagtctcattttgacagcatgaaatgtcctcttgaagcatagctttttaaatatctttttccttctactcctccctctgactctaagaattctctcttctggaatcgcttgaacccaggaggcggaggttgcagtaagccaaggtcatgccactgcactctagcctgggtgacagagcgagactccatctc

SEQ ID NO: 111542 - DNA, 852 bp, Artificial Sequence
  derived and/or modified sequence
atgcccagaagaagcctgcacgccgccgccgtgctgctgctggtgatcctgaaggagcagcccagcagccccgcccccgtgaacggcagcaagtggacctacttcgtgaagctgaacctgcccagcgacatgcacatccagggcctgcagagcagatacagcgccacccagctgcacctgcactggggcaaccccaacgacccccacggcagcgagcacaccgtgagcggccagcacttcgccgccgagctgcacatcgtgcactacaacagcgacctgtaccccgacgccagcaccgccagcaacaagagcgagggcctggccgtgctggccgtgctgatcgagatgggcagcttcaaccccagctacgacaagatcttcagccacctgcagcacgtgaagtacaagggccaggaggccttcgtgcccggcttcaacatcgaggagctgctgcccgagagaaccgccgagtactacagatacagaggcagcctgaccacccccccctgcaaccccaccgtgctgtggaccgtgttcagaaaccccgtgcagatcagccaggagcagctgctggccctggagaccgccctgtactgcacccacatggacgaccccagccccagagagatgatcaacaacttcagacaggtgcagaagttcgacgagagactggtgtacaccagcttcagccagggcatcatcctgagcctggccctggccggcatcctgggcatctgcatcgtggtggtggtgagcatctggctgttcagaagaaagagcatcaagaagggcgacaacaagggcgtgatctacaagcccgccaccaagatggagaccgaggcccacgcctag

SEQ ID NO: 111543 - protein, 362 aa, Artificial Sequence
  derived and/or modified sequence
MAGAGCTGTWSWLWGTATEAAPSCVGDMADTPRDAGLKQAPASRNEKAPVDFGYVGIDSILEQMRRKAMKQGFEFNIMVVGQSGLGKSTLINTLFKSKISRKSVQPTSEERIPKTIEIKSITHDIEEKGVRMKLTVIDTPGFGDHINNENCWQPIMKFINDQYEKYLQEEVNINRKKRIPDTRVHCCLYFIPATGHSLRPLDIEFMKRLSKVVNIVPVIAKADTLTLEERVHFKQRITADLLSNGIDVYPQKEFDEDSEDRLVNEKFREMIPFAVVGSDHEYQVNGKRILGRKTKWGTIEVENTTHCEFAYLRDLLIRTHMQNIKDITSSIHFEAYRVKRLNEGSSAMANGMEEKEPEAPEM

SEQ ID NO: 111544 - DNA, 3026 bp, Artificial Sequence
  derived and/or modified sequence
aggagctggatcagatctgaatccagaggctctcggaggaagagctcaggccactgaggcggctcccagctgcgttggcgacatggccgacacccccagagatgccgggctcaagcaggcgcctgcatcacggaacgagaaggccccggtggacttcggctacgtggggattgactccatcctggagcagatgcgccggaaggccatgaagcagggcttcgagttcaacatcatggtggtcgggcagagcggcttgggtaaatccaccttaatcaacaccctcttcaaatccaaaatcagccggaagtcggtgcagcccacctcagaggagcgcatccccaagaccatcgagatcaagtccatcacgcacgatattgaggagaaaggcgtccggatgaagctgacagtgattgacacaccagggttcggggaccacatcaacaacgagaactgctggcagcccatcatgaagttcatcaatgaccagtacgagaaatacctgcaggaggaggtcaacatcaaccgcaagaagcgcatcccggacacccgcgtccactgctgcctctacttcatccccgccaccggccactccctcaggcccctggacatcgagtttatgaaacgcctgagcaaggtggtcaacatcgtccctgtcatcgccaaggcggacacactcaccctggaggagagggtccacttcaaacagcggatcaccgcagacctgctgtccaacggcatcgacgtgtacccccagaaggaatttgatgaggactcggaggaccggctggtgaacgagaagttccgggagatgatcccatttgctgtggtgggcagtgaccacgagtaccaggtcaacggcaagaggatccttgggaggaagaccaagtggggtaccatcgaagttgaaaacaccacacactgtgagtttgcctacctgcgggaccttctcatcaggacgcacatgcagaacatcaaggacatcaccagcagcatccacttcgaggcgtaccgtgtgaagcgcctcaacgagggcagcagcgccatggccaacggcatggaggagaaggagccagaagccccggagatgtagacgccaccctgcccacccccgggatcctgcccccaagtcatttccgtccccccccaggccctcccaccaccccattttattttatatgattttctccatttgtcatcgttccccaccccttcgacatgctgccaggaaacaagggaaggggcctccctccgagtgagtcagtgatgaggccgcggcctccccgaggttgtggggaggctgcactggagccacaggcaggggtgagagcacccactgaattgacatgaccctctgtccccaggcctggctccccgagggctcagaagagcagcttcggtgtgcagatcatccgtctgtgtggggttctcagtgccggaggccttggggtgggggccaggcctcgcacttgcagaggagcccagtgggctgcacgctcccctccatccccatcggccctgtcccctggagtgtgtcagagcccaggggagaatgcagcccaccaggagcacctggaccccctgcccgccacatggtgtggccatcactcagcccctacccctgccctgctcctaagggtagaaaactccagggtcccctgccaccgactgcccagccactccaagccccctggcagctgcccctcctggagcagaaagtgcctttatctcagccatccgcagactgcttggccagatgcggggacaggctggaatgagggaggcgtcttcatctccctgccatccccctctcacgccacccccgcccccaccgggctgcaggtgctgctgatgcgctgggatctgattgaggataaaaaggaaggagagatgacccctaccccctcatcccccagttttgaaaaggtctaagcaagtgagtctggtggaggagctgagggagggagccatggaaggtgccagaaggaaggttggcgggggcacgtgtgggccgtggcttgggctggtcagagtggcgtgagctgcccggcgcctgccctgcccaagtgaccagggaagtgtgtgtgtgtccatgtgtatgcgtgtccgtctgtctgtctagtgtctgggtttggcccaagactgggctgtagttacattaatgcccagccagccacccctgccactcacccttcctggcccaggccttgctgactctctgagctggggaggtgggaggccaggcgagcctgactctgttgatctacccgtgcctgggcccctcccctcagagcccatggtaacgaacccctagaaaggagagaacgggcgtcaggggtgcacagtccacagctgaagagcaaggtttcgtggcagcacggcccggcccctcaccctctgtccccacgaggggacccatgggggctgtctttgcagggcacagatgaccaaagtcccttcctgcttcctgttacctgtcttgctcctggggagaaagaggggcctgatgagactccactcaggtgcacacatcaccaggtgcatctgcaggcaccgggctggctgcttgcagccaggagaaggtcagcgagaaggagtgtatgagtgtgagtgtgtgtgcatggaagttggggcactgggcgtctgactccctccccacccaagagaggaaggacccctcaccacccccactggtgagacagtttactttgccaacttgccatgtttttgccaaaaccaagattttgaaggaaatgagtggccagcgccagggcccaggccatgtggcctgcccagcctcaatgtcacttggtggcggggtggggtgggggtgggcagcagcatcccagccttgagatgcttcactttccttctctgtaaccagactttgaaaaattgttcgtttcatcaggctctgttcctcaatggccttttgctacgtgcctcccgagaaatttgtctttttgtataaatgacaaagtgttgaaaatgtatttcctgaaataaatgtttcaaatgcagaaacccag

SEQ ID NO: 111545 - DNA, 1089 bp, Artificial Sequence
  derived and/or modified sequence
atggcaggagccgggtgcaccggcacctggagctggctgtgggggactgcaaccgaagccgctcccagttgcgtcggtgatatggcggacaccccaagagatgcaggtcttaagcaggcccctgcttcccgcaacgagaaagcacccgttgacttcggctacgtggggattgattccatcttggagcagatgcgcaggaaggctatgaagcagggatttgaattcaatataatggtagtgggacagtcaggtctgggcaagagcaccctcattaatacacttttcaaatctaaaatttcaaggaaatctgtgcaaccgactagcgaggaaagaatccccaagacaatagaaattaagtctattacccatgacattgaagaaaagggcgtccgaatgaagctgaccgtgatcgatacacctggatttggcgatcacataaacaacgaaaactgttggcagcctatcatgaaattcatcaatgatcagtacgaaaaatacctgcaggaggaggtgaacatcaatagaaaaaaacggataccggatacgagggttcactgctgcctgtactttattcctgcgactgggcattcactgcgcccgcttgacatcgagttcatgaagcggttgtcaaaggttgttaacatagtgccagtgattgcaaaagccgatacccttacccttgaggaaagagtccacttcaaacagagaataactgccgatctcctgtcaaacggcatcgacgtataccctcagaaggagttcgacgaggacagcgaggatagattagtgaacgaaaaatttagagaaatgatcccctttgccgtggtgggatcggaccacgagtatcaggtgaacggcaagcgcattttgggtcggaagacaaagtggggaacaatagaagtcgaaaatactacccattgcgagtttgcatacctaagggatttgctcatccgcactcatatgcagaacatcaaggacataacaagtagtattcacttcgaggcttatagggtcaagcggcttaacgagggttctagcgctatggcgaatggtatggaagaaaaagagcccgaagctccggagatgtag

SEQ ID NO: 111546 - DNA, 1089 bp, Artificial Sequence
  derived and/or modified sequence
atggccggggccggctgcaccggcacctggagctggctgtggggcacagccacagaggccgcccccagctgtgtgggggacatggctgacaccccaagagatgctggcctgaagcaggccccagccagcagaaatgagaaggcccctgtggactttggctacgtgggcatcgacagcatcctggagcagatgaggaggaaggccatgaagcagggctttgagttcaacatcatggtggtgggccagagcggcctgggcaagagcaccctcatcaacaccctcttcaagagcaagatcagcaggaagtctgtgcagcccaccagcgaggagcgcatccccaagaccatcgagatcaagagcatcacccatgacatcgaggagaagggcgtgaggatgaagctgactgtgattgacaccccaggctttggagaccacatcaacaatgaaaactgctggcagcccatcatgaagttcatcaatgaccagtatgagaagtacctgcaggaggaggtgaacatcaacaggaagaagaggatcccagacaccagggtgcactgctgcctgtacttcatcccagccaccggccacagcctgcggcccctggacatcgagttcatgaagaggctgagcaaggtggtgaacatcgtgcctgtgattgccaaggctgacaccctgaccctggaggagcgggtgcacttcaagcagaggatcacagctgacctgctgagcaatggaattgatgtgtacccccagaaggagtttgatgaggacagtgaagatcggctggtgaatgagaagttccgggagatgatcccctttgctgtggtgggcagtgaccacgagtaccaggtgaatggcaagaggatcctgggcaggaagaccaagtggggcaccatcgaggtggagaacaccacccactgtgaatttgcctacctgcgggacctgctgatccgcacccacatgcagaacatcaaggacatcaccagcagcatccactttgaggcctacagagtgaagaggctgaatgaaggcagcagcgccatggccaacggcatggaggagaaggagcctgaggcccctgagatgtag

SEQ ID NO: 111547 - DNA, 1089 bp, Artificial Sequence
  derived and/or modified sequence
atggccggcgccggctgcaccggcacctggagctggctgtggggcaccgccactgaagctgctccctcttgcgtcggggacatggccgatacacctagagacgccggccttaaacaggctccagcctctcgaaatgagaaggcaccagtggactttggctatgtgggtattgactcaatacttgagcaaatgagaagaaaagcaatgaaacagggcttcgaattcaatattatggtagtcgggcaaagcggattgggtaagagtacgctcattaacactcttttcaagtcaaaaatctctcgtaagtcggtacaaccaacctctgaagagagaatcccaaagaccatcgaaatcaaatccatcacacatgatatcgaggaaaagggcgtgaggatgaaactgacagtgatagatacacccggtttcggggaccacatcaataacgaaaattgctggcagcccattatgaaattcatcaatgatcagtacgaaaagtacctgcaggaggaggtgaacattaatcggaagaaaagaatccccgacacaagagtccactgctgtctctacttcatccccgcgaccggacacagtcttaggcctcttgacattgagttcatgaagcggctctctaaggtcgtgaacattgtgccagtgatagccaaagcggataccctgactttggaggaacgcgtacacttcaagcagcggattactgccgacttactgtccaatggcattgacgtctatccacagaaggagttcgatgaagacagcgaagacaggttggtaaatgagaagtttagggagatgatacccttcgctgtggtaggctctgatcatgagtaccaggtgaacggtaaaagaattttgggtagaaaaacaaagtggggcacgatagaagtggagaacaccacccactgcgaattcgcgtatctgagagacctattaatccggacccacatgcagaatatcaaggacatcactagcagcatccacttcgaagcctatagagtcaagcgcctaaacgagggtagttctgcaatggctaatggtatggaggagaaagaaccagaggctcccgaaatgtag

SEQ ID NO: 111548 - DNA, 1089 bp, Artificial Sequence
  derived and/or modified sequence
atggccggagctgggtgtaccgggacatggagctggttgtgggggacggcgacagaggcagcccctagctgcgtcggggacatggccgatactccaagagacgctggtttgaagcaggcacctgcctccagaaacgagaaagcccctgttgactttggctacgtaggcatagactccatactcgaacagatgagacggaaagctatgaaacagggcttcgaattcaacattatggtcgtgggacagtcaggcttgggcaaatctaccctcattaacacactctttaaatcaaagatcagccgcaagagcgtgcagccgactagcgaggagcggattcccaagaccatagagattaaaagcattacccatgatatcgaagaaaaaggcgttcgcatgaaactgacagtgattgacactccgggtttcggcgaccatatcaataacgaaaactgctggcagcctataatgaagtttatcaatgatcagtatgagaagtacctccaggaggaggtgaacattaaccgtaagaaaaggatccccgatactcgcgtgcattgctgcctatactttatcccagccaccggccacagcctccgcccactcgacatcgagtttatgaagcgcctgagtaaagtggtaaatatagttcctgtgattgctaaagcagatacactgactcttgaggaaagggtgcatttcaaacagcggatcacagcagacctcctctcgaatggcatcgatgtctacccacaaaaagaattcgacgaagactccgaagacagactagttaacgaaaagttccgcgagatgatccccttcgccgttgtgggtagcgatcatgaataccaggtaaacggaaagcggatcctcgggagaaagaccaagtggggcacaatcgaggtggaaaacactactcattgcgaattcgcatatctccgagacctcttaatcaggactcatatgcaaaatattaaggacatcaccagttctattcacttcgaagcctaccgggtaaaaaggctgaatgaaggtagctccgccatggcgaacggaatggaggaaaaagaacctgaggcacccgaaatgtag

SEQ ID NO: 111549 - DNA, 3230 bp, Artificial Sequence
  derived and/or modified sequence
acttgggttcagaggtcgtggcactgagatgggtctggcagatcccagcgtccaggcccagcccctatagtgtcagctccctcctctggggacccccttgcttgtgcccctctgggtcccagcacatcccaggcctgcagggagggggagaggaagagactgactcactggccaggtcccccaggggctggagaggctggagaggcaggagctggatcagatctgaatccagaggctctcggaggaagagctcaggccactgaggcggctcccagctgcgttggcgacatggccgacacccccagagatgccgggctcaagcaggcgcctgcatcacggaacgagaaggccccggtggacttcggctacgtggggattgactccatcctggagcagatgcgccggaaggccatgaagcagggcttcgagttcaacatcatggtggtcgggcagagcggcttgggtaaatccaccttaatcaacaccctcttcaaatccaaaatcagccggaagtcggtgcagcccacctcagaggagcgcatccccaagaccatcgagatcaagtccatcacgcacgatattgaggagaaaggcgtccggatgaagctgacagtgattgacacaccagggttcggggaccacatcaacaacgagaactgctggcagcccatcatgaagttcatcaatgaccagtacgagaaatacctgcaggaggaggtcaacatcaaccgcaagaagcgcatcccggacacccgcgtccactgctgcctctacttcatccccgccaccggccactccctcaggcccctggacatcgagtttatgaaacgcctgagcaaggtggtcaacatcgtccctgtcatcgccaaggcggacacactcaccctggaggagagggtccacttcaaacagcggatcaccgcagacctgctgtccaacggcatcgacgtgtacccccagaaggaatttgatgaggactcggaggaccggctggtgaacgagaagttccgggagatgatcccatttgctgtggtgggcagtgaccacgagtaccaggtcaacggcaagaggatccttgggaggaagaccaagtggggtaccatcgaagttgaaaacaccacacactgtgagtttgcctacctgcgggaccttctcatcaggacgcacatgcagaacatcaaggacatcaccagcagcatccacttcgaggcgtaccgtgtgaagcgcctcaacgagggcagcagcgccatggccaacggcatggaggagaaggagccagaagccccggagatgtagacgccaccctgcccacccccgggatcctgcccccaagtcatttccgtccccccccaggccctcccaccaccccattttattttatatgattttctccatttgtcatcgttccccaccccttcgacatgctgccaggaaacaagggaaggggcctccctccgagtgagtcagtgatgaggccgcggcctccccgaggttgtggggaggctgcactggagccacaggcaggggtgagagcacccactgaattgacatgaccctctgtccccaggcctggctccccgagggctcagaagagcagcttcggtgtgcagatcatccgtctgtgtggggttctcagtgccggaggccttggggtgggggccaggcctcgcacttgcagaggagcccagtgggctgcacgctcccctccatccccatcggccctgtcccctggagtgtgtcagagcccaggggagaatgcagcccaccaggagcacctggaccccctgcccgccacatggtgtggccatcactcagcccctacccctgccctgctcctaagggtagaaaactccagggtcccctgccaccgactgcccagccactccaagccccctggcagctgcccctcctggagcagaaagtgcctttatctcagccatccgcagactgcttggccagatgcggggacaggctggaatgagggaggcgtcttcatctccctgccatccccctctcacgccacccccgcccccaccgggctgcaggtgctgctgatgcgctgggatctgattgaggataaaaaggaaggagagatgacccctaccccctcatcccccagttttgaaaaggtctaagcaagtgagtctggtggaggagctgagggagggagccatggaaggtgccagaaggaaggttggcgggggcacgtgtgggccgtggcttgggctggtcagagtggcgtgagctgcccggcgcctgccctgcccaagtgaccagggaagtgtgtgtgtgtccatgtgtatgcgtgtccgtctgtctgtctagtgtctgggtttggcccaagactgggctgtagttacattaatgcccagccagccacccctgccactcacccttcctggcccaggccttgctgactctctgagctggggaggtgggaggccaggcgagcctgactctgttgatctacccgtgcctgggcccctcccctcagagcccatggtaacgaacccctagaaaggagagaacgggcgtcaggggtgcacagtccacagctgaagagcaaggtttcgtggcagcacggcccggcccctcaccctctgtccccacgaggggacccatgggggctgtctttgcagggcacagatgaccaaagtcccttcctgcttcctgttacctgtcttgctcctggggagaaagaggggcctgatgagactccactcaggtgcacacatcaccaggtgcatctgcaggcaccgggctggctgcttgcagccaggagaaggtcagcgagaaggagtgtatgagtgtgagtgtgtgtgcatggaagttggggcactgggcgtctgactccctccccacccaagagaggaaggacccctcaccacccccactggtgagacagtttactttgccaacttgccatgtttttgccaaaaccaagattttgaaggaaatgagtggccagcgccagggcccaggccatgtggcctgcccagcctcaatgtcacttggtggcggggtggggtgggggtgggcagcagcatcccagccttgagatgcttcactttccttctctgtaaccagactttgaaaaattgttcgtttcatcaggctctgttcctcaatggccttttgctacgtgcctcccgagaaatttgtctttttgtataaatgacaaagtgttgaaaatgtatttcctgaaataaatgtttcaaatgcagaaaccc

SEQ ID NO: 111550 - DNA, 3023 bp, Artificial Sequence
  derived and/or modified sequence
atggctggtgctggatgcacagggacgtggtcctggctctgggggacagccactgaggcggctcccagctgcgttggcgacatggccgacacccccagagatgccgggctcaagcaggcgcctgcatcacggaacgagaaggccccggtggacttcggctacgtggggattgactccatcctggagcagatgcgccggaaggccatgaagcagggcttcgagttcaacatcatggtggtcgggcagagcggcttgggtaaatccaccttaatcaacaccctcttcaaatccaaaatcagccggaagtcggtgcagcccacctcagaggagcgcatccccaagaccatcgagatcaagtccatcacgcacgatattgaggagaaaggcgtccggatgaagctgacagtgattgacacaccagggttcggggaccacatcaacaacgagaactgctggcagcccatcatgaagttcatcaatgaccagtacgagaaatacctgcaggaggaggtcaacatcaaccgcaagaagcgcatcccggacacccgcgtccactgctgcctctacttcatccccgccaccggccactccctcaggcccctggacatcgagtttatgaaacgcctgagcaaggtggtcaacatcgtccctgtcatcgccaaggcggacacactcaccctggaggagagggtccacttcaaacagcggatcaccgcagacctgctgtccaacggcatcgacgtgtacccccagaaggaatttgatgaggactcggaggaccggctggtgaacgagaagttccgggagatgatcccatttgctgtggtgggcagtgaccacgagtaccaggtcaacggcaagaggatccttgggaggaagaccaagtggggtaccatcgaagttgaaaacaccacacactgtgagtttgcctacctgcgggaccttctcatcaggacgcacatgcagaacatcaaggacatcaccagcagcatccacttcgaggcgtaccgtgtgaagcgcctcaacgagggcagcagcgccatggccaacggcatggaggagaaggagccagaagccccggagatgtagacgccaccctgcccacccccgggatcctgcccccaagtcatttccgtccccccccaggccctcccaccaccccattttattttatatgattttctccatttgtcatcgttccccaccccttcgacatgctgccaggaaacaagggaaggggcctccctccgagtgagtcagtgatgaggccgcggcctccccgaggttgtggggaggctgcactggagccacaggcaggggtgagagcacccactgaattgacatgaccctctgtccccaggcctggctccccgagggctcagaagagcagcttcggtgtgcagatcatccgtctgtgtggggttctcagtgccggaggccttggggtgggggccaggcctcgcacttgcagaggagcccagtgggctgcacgctcccctccatccccatcggccctgtcccctggagtgtgtcagagcccaggggagaatgcagcccaccaggagcacctggaccccctgcccgccacatggtgtggccatcactcagcccctacccctgccctgctcctaagggtagaaaactccagggtcccctgccaccgactgcccagccactccaagccccctggcagctgcccctcctggagcagaaagtgcctttatctcagccatccgcagactgcttggccagatgcggggacaggctggaatgagggaggcgtcttcatctccctgccatccccctctcacgccacccccgcccccaccgggctgcaggtgctgctgatgcgctgggatctgattgaggataaaaaggaaggagagatgacccctaccccctcatcccccagttttgaaaaggtctaagcaagtgagtctggtggaggagctgagggagggagccatggaaggtgccagaaggaaggttggcgggggcacgtgtgggccgtggcttgggctggtcagagtggcgtgagctgcccggcgcctgccctgcccaagtgaccagggaagtgtgtgtgtgtccatgtgtatgcgtgtccgtctgtctgtctagtgtctgggtttggcccaagactgggctgtagttacattaatgcccagccagccacccctgccactcacccttcctggcccaggccttgctgactctctgagctggggaggtgggaggccaggcgagcctgactctgttgatctacccgtgcctgggcccctcccctcagagcccatggtaacgaacccctagaaaggagagaacgggcgtcaggggtgcacagtccacagctgaagagcaaggtttcgtggcagcacggcccggcccctcaccctctgtccccacgaggggacccatgggggctgtctttgcagggcacagatgaccaaagtcccttcctgcttcctgttacctgtcttgctcctggggagaaagaggggcctgatgagactccactcaggtgcacacatcaccaggtgcatctgcaggcaccgggctggctgcttgcagccaggagaaggtcagcgagaaggagtgtatgagtgtgagtgtgtgtgcatggaagttggggcactgggcgtctgactccctccccacccaagagaggaaggacccctcaccacccccactggtgagacagtttactttgccaacttgccatgtttttgccaaaaccaagattttgaaggaaatgagtggccagcgccagggcccaggccatgtggcctgcccagcctcaatgtcacttggtggcggggtggggtgggggtgggcagcagcatcccagccttgagatgcttcactttccttctctgtaaccagactttgaaaaattgttcgtttcatcaggctctgttcctcaatggccttttgctacgtgcctcccgagaaatttgtctttttgtataaatgacaaagtgttgaaaatgtatttcctgaaataaatgtttcaaatgcagaaaccc

SEQ ID NO: 111551 - DNA, 1089 bp, Artificial Sequence
  derived and/or modified sequence
atggccggcgccggctgcaccggcacctggagctggctgtggggcaccgccaccgaggccgcccccagctgcgtgggcgacatggccgacacccccagagacgccggcctgaagcaggcccccgccagcagaaacgagaaggcccccgtggacttcggctacgtgggcatcgacagcatcctggagcagatgagaagaaaggccatgaagcagggcttcgagttcaacatcatggtggtgggccagagcggcctgggcaagagcaccctgatcaacaccctgttcaagagcaagatcagcagaaagagcgtgcagcccaccagcgaggagagaatccccaagaccatcgagatcaagagcatcacccacgacatcgaggagaagggcgtgagaatgaagctgaccgtgatcgacacccccggcttcggcgaccacatcaacaacgagaactgctggcagcccatcatgaagttcatcaacgaccagtacgagaagtacctgcaggaggaggtgaacatcaacagaaagaagagaatccccgacaccagagtgcactgctgcctgtacttcatccccgccaccggccacagcctgagacccctggacatcgagttcatgaagagactgagcaaggtggtgaacatcgtgcccgtgatcgccaaggccgacaccctgaccctggaggagagagtgcacttcaagcagagaatcaccgccgacctgctgagcaacggcatcgacgtgtacccccagaaggagttcgacgaggacagcgaggacagactggtgaacgagaagttcagagagatgatccccttcgccgtggtgggcagcgaccacgagtaccaggtgaacggcaagagaatcctgggcagaaagaccaagtggggcaccatcgaggtggagaacaccacccactgcgagttcgcctacctgagagacctgctgatcagaacccacatgcagaacatcaaggacatcaccagcagcatccacttcgaggcctacagagtgaagagactgaacgagggcagcagcgccatggccaacggcatggaggagaaggagcccgaggcccccgagatgtag

SEQ ID NO: 111552 - DNA, 1008 bp, Artificial Sequence
  derived and/or modified sequence
atggccgacacccccagagacgccggcctgaagcaggcccccgccagcagaaacgagaaggcccccgtggacttcggctacgtgggcatcgacagcatcctggagcagatgagaagaaaggccatgaagcagggcttcgagttcaacatcatggtggtgggccagagcggcctgggcaagagcaccctgatcaacaccctgttcaagagcaagatcagcagaaagagcgtgcagcccaccagcgaggagagaatccccaagaccatcgagatcaagagcatcacccacgacatcgaggagaagggcgtgagaatgaagctgaccgtgatcgacacccccggcttcggcgaccacatcaacaacgagaactgctggcagcccatcatgaagttcatcaacgaccagtacgagaagtacctgcaggaggaggtgaacatcaacagaaagaagagaatccccgacaccagagtgcactgctgcctgtacttcatccccgccaccggccacagcctgagacccctggacatcgagttcatgaagagactgagcaaggtggtgaacatcgtgcccgtgatcgccaaggccgacaccctgaccctggaggagagagtgcacttcaagcagagaatcaccgccgacctgctgagcaacggcatcgacgtgtacccccagaaggagttcgacgaggacagcgaggacagactggtgaacgagaagttcagagagatgatccccttcgccgtggtgggcagcgaccacgagtaccaggtgaacggcaagagaatcctgggcagaaagaccaagtggggcaccatcgaggtggagaacaccacccactgcgagttcgcctacctgagagacctgctgatcagaacccacatgcagaacatcaaggacatcaccagcagcatccacttcgaggcctacagagtgaagagactgaacgagggcagcagcgccatggccaacggcatggaggagaaggagcccgaggcccccgagatgtag

SEQ ID NO: 111553 - DNA, 1008 bp, Artificial Sequence
  derived and/or modified sequence
atggctgacacaccaagagacgccggcctcaagcaggccccggcgtcgcgaaacgagaaagccccagtggactttggatacgtaggcattgacagcatactggagcaaatgcggcgcaaggcaatgaagcagggcttcgagtttaatatcatggttgtggggcagagcggccttggcaaatctacccttatcaacaccctcttcaagtccaagatttcgaggaaatcagtccaacctacctcagaggaacgcatcccgaagaccattgagattaaaagtatcacccacgatatcgaagagaagggcgtacggatgaagctgactgtgatcgacacccccgggttcggagaccatattaacaacgagaattgttggcagccaattatgaaattcataaatgaccagtacgagaagtacctccaggaggaggtgaatatcaacaggaagaaacggattcccgacacgcgtgtgcattgctgcttgtattttatcccagccacaggtcactctcttcgccccctggatattgagttcatgaagaggctatctaaagtcgttaatatcgtgccagtgattgctaaggccgataccctgactctcgaagaaagagtccactttaagcagcgtatcacggcggacttactaagcaatggaattgacgtgtaccctcagaaagagttcgatgaggattctgaggaccgtctggttaatgaaaaattccgcgaaatgattcctttcgcggtcgtgggaagtgatcatgaatatcaagttaatggcaaaagaatcctgggtcgcaagactaaatggggcacaatagaagtagagaatacgactcactgtgagtttgcctatttacgcgatctgctgatacgaacccatatgcagaacattaaggacatcacgtcgtcaatccactttgaggcataccgtgtgaagcgcctgaacgagggttcctctgcaatggctaacgggatggaggaaaaggagcccgaggccccggagatgtag

SEQ ID NO: 111554 - DNA, 1008 bp, Artificial Sequence
  derived and/or modified sequence
atggctgacaccccaagagatgctggcctgaagcaggccccagccagcagaaatgagaaggcccctgtggactttggctacgtgggcatcgacagcatcctggagcagatgaggaggaaggccatgaagcagggctttgagttcaacatcatggtggtgggccagagcggcctgggcaagagcaccctcatcaacaccctcttcaagagcaagatcagcaggaagtctgtgcagcccaccagcgaggagcgcatccccaagaccatcgagatcaagagcatcacccatgacatcgaggagaagggcgtgaggatgaagctgaccgtcatcgacaccccaggctttggagaccacatcaacaatgaaaactgctggcagcccatcatgaagttcatcaatgaccagtatgagaagtacctgcaggaggaggtgaacatcaacaggaagaagaggatcccagacaccagggtgcactgctgcctgtacttcatcccagccaccggccacagcctgcggcccctggacatcgagttcatgaagaggctgagcaaggtggtgaacatcgtgcctgtgattgccaaggctgacaccctgaccctggaggagcgggtgcacttcaagcagaggatcacagctgacctgctgagcaatggaattgatgtgtacccccagaaggagtttgatgaagattctgaggaccggctggtgaatgagaagttccgggagatgatcccctttgctgtggtgggcagtgaccacgagtaccaggtgaatggcaagaggatcctgggcaggaagaccaagtggggcaccatcgaggtggagaacaccacccactgtgaatttgcctacctgcgggacctgctgatccgcacccacatgcagaacatcaaggacatcaccagcagcatccactttgaggcctacagagtgaagaggctgaatgaaggcagcagcgccatggccaacggcatggaggagaaggagcctgaggcccctgagatgtag

SEQ ID NO: 111555 - DNA, 1008 bp, Artificial Sequence
  derived and/or modified sequence
atggccgacaccccccgggacgccggcctgaagcaggcccccgcctcacgtaatgagaaggcccctgtggacttcggctacgtcgggattgattctattctggagcagatgcggcggaaggccatgaaacagggttttgaatttaacataatggttgtaggccagagtggacttgggaaatctaccttaatcaacactctatttaaatctaagatttctcggaagagcgtccagccaacctcagaggagagaattccaaagactattgaaattaagagcattacacacgatatcgaggagaagggagtccgtatgaagcttaccgttattgataccccaggtttcggtgatcacataaataacgagaactgctggcagccgattatgaagttcattaatgatcaatacgaaaagtaccttcaagaggaagtcaacatcaatcggaaaaagagaattcctgatacacgagtgcattgctgcttatacttcattcctgccactggccattcactgagacctttagacattgagtttatgaaaagactcagcaaggtcgttaatatcgtccccgttatcgccaaagctgacactttaacactggaagagagagtccattttaagcagcgaataacagctgatttgctttctaatggcatcgacgtctacccacaaaaagaattcgatgaggacagtgaggataggctggtcaatgagaagtttagagagatgattccctttgctgtcgttggctctgaccacgagtaccaggtgaacggaaagcgaatattaggccgcaaaactaagtggggaacaatcgaagtggagaatacaactcactgtgaatttgcttacctgcgggacttattgattcggacccacatgcaaaatattaaggacattacctcgagcatacacttcgaggcctacagagttaaaagacttaacgagggcagttcagccatggccaatggcatggaggagaaagagcctgaagctcctgagatgtag

SEQ ID NO: 111556 - DNA, 1008 bp, Artificial Sequence
  derived and/or modified sequence
atggccgatacccctcgagacgctggattgaagcaagctcctgcttccaggaatgaaaaggcccctgttgatttcggctatgtgggaattgactccatcttggaacagatgagaagaaaagctatgaagcagggatttgagtttaatattatggtggttggtcagagtgggcttggtaaatcaactctgataaatacactgttcaagtccaagatcagcaggaagtccgtgcagccaactagcgaagagcgcattcccaaaactatagaaattaaatcaatcacacatgatatcgaggagaagggcgtgcgtatgaagcttacggttatcgacactcccggatttggtgaccatataaacaacgagaactgctggcagccgatcatgaagtttatcaacgatcagtacgaaaaatacctgcaagaggaagtgaacatcaacagaaaaaaaaggataccagacacccgcgtgcattgttgtctgtattttatccccgctactggtcactcactgcgccctctagacatcgagtttatgaagaggctgtctaaagttgtgaatattgtgcccgttatcgctaaggctgataccttaaccctggaggaaagggttcactttaagcagcggattacagctgacctcctctccaatggcattgacgtatacccacagaaagaattcgatgaagattccgaagataggctggtcaatgagaagtttcgagaaatgattccgttcgctgtggtgggttccgatcacgaataccaggtgaacgggaagagaattctgggccgtaagacaaagtggggcactattgaggtcgagaacacaacgcactgtgaattcgcatacctgcgcgatctgcttatccgaactcacatgcagaatatcaaagacataacgagctccattcactttgaggcctatagagtaaagcgcctcaatgaaggtagtagcgcaatggcaaacggcatggaggaaaaagaacccgaagcacccgagatgtag

SEQ ID NO: 111557 - DNA, 591 bp, Artificial Sequence
  derived and/or modified sequence
atggccgatactccgagggacgcaggtctgaagcaggcaccagccagtcgaaacgagaaggctcctgtggacttcggttatgttggcattgactccatactcgagcagatgcgaagaaaggccatgaaacagggatttgaattcaatataatggttgtgggccagtctggcctggggaaatcgaccctgatcaatacgctctttaaatcaaagataagtagaaagtccgtccagcctacctccgaagagagaatccccaaaactatcgaaatcaagagtatcacgcatgatattgaggaaaagggcgtccggatgaaactgactgtcatcgacactcccgggtttggagaccatatcaataatgaaaactgttggcagccaatcatgaagtttatcaatgaccagtacgaaaagtacctgcaggaggaagtcaacattaaccggaaaaaacgcatcccagacacacgcgtgcattgttgtctatacttcattccagccactggtcattctctaccacttctggaacaaaaggtacccctatcccaacctagtgccgactgtttggccagatgtggcgaccgcctcgagtag

SEQ ID NO: 111558 - DNA, 1008 bp, Artificial Sequence
  derived and/or modified sequence
atggctgacactcctcgcgatgctggtttgaaacaggcacccgcttccagaaacgaaaaggcccccgtggatttcggctatgttggcattgactccatcctcgaacaaatgcgccgcaaagcgatgaaacagggttttgagttcaacataatggtggtgggacagagtggattgggcaagtccaccctgattaacacactgttcaagtctaagatcagccggaagtctgtgcaacctactagcgaagaacgcatacccaaaaccattgagattaagtcaattacacacgatattgaggagaagggagtgagaatgaaacttaccgtgattgatacaccaggtttcggagaccacattaacaacgagaactgctggcagcccatcatgaagttcatcaatgaccagtacgaaaaatatctgcaggaagaggtgaacatcaatcgaaagaagaggattccagacaccagagtccattgctgcttgtatttcatccctgcaacaggacactcactgagacccctggatattgaatttatgaaaaggctgtccaaggtcgtgaacatagttccagtgatcgcaaaagcagatactctcaccctggaggagagggtccactttaagcagagaatcacagcagacctgttgtccaacggaatcgacgtttatccacagaaggagttcgatgaggactcagaagataggctcgtgaacgaaaagttcagagaaatgattccatttgctgtggttggttccgaccatgaataccaggttaacggcaaaaggattctggggcggaaaaccaaatggggcacaatcgaggtggaaaatacgacacattgcgagttcgcttatttgcgagatcttttgatccgcacccacatgcagaacatcaaggacatcacctcgtctatccattttgaggcataccgggtgaagaggctgaatgaggggtcttccgccatggcgaacggaatggaggaaaaggagcccgaggccccggagatgtag

SEQ ID NO: 111559 - DNA, 591 bp, Artificial Sequence
  derived and/or modified sequence
atggctgacaccccaagagatgctggcctgaagcaggccccagccagcagaaatgagaaggcccctgtggactttggctacgtgggcatcgacagcatcctggagcagatgaggaggaaggccatgaagcagggctttgagttcaacatcatggtggtgggccagagcggcctgggcaagagcaccctcatcaacaccctcttcaagagcaagatcagcaggaagtctgtgcagcccaccagcgaggagcgcatccccaagaccatcgagatcaagagcatcacccatgacatcgaggagaagggcgtgaggatgaagctgaccgtcatcgacaccccaggctttggagaccacatcaacaatgaaaactgctggcagcccatcatgaagttcatcaatgaccagtatgagaagtacctgcaggaggaggtgaacatcaacaggaagaagaggatcccagacaccagggtgcactgctgcctgtacttcatcccagccaccggccacagcctgcccctgctggagcagaaggtgcccctgagccagcccagcgctgactgcctggcccgctgtggggaccggctggagtag

SEQ ID NO: 111560 - DNA, 591 bp, Artificial Sequence
  derived and/or modified sequence
atggccgacaccccccgggacgccggcctgaagcaggcccccgcctctcgtaacgagaaagctcccgttgatttcgggtacgtgggtatagacagcattctagagcagatgaggcgcaaagctatgaaacaggggttcgagttcaatatcatggtcgtcggccagagtggtcttggaaaaagtactctcataaacacactgtttaagagtaagataagccggaaatccgttcagcctacttcggaagaacgcatacctaaaacaatcgagatcaagagtatcactcatgacatcgaggagaaaggtgttaggatgaagctgactgttattgatacacctggttttggggatcacattaacaatgagaactgttggcagcccatcatgaagtttatcaatgaccagtatgagaagtaccttcaggaggaagtgaatataaacaggaagaagcgaatccccgatacccgcgtccactgctgcctgtattttattcctgcaacggggcattcactgcccctgttagaacagaaggttccattatcccagccgtcagcggattgcctggctcgatgcggggacaggttggagtag

SEQ ID NO: 111561 - DNA, 1008 bp, Artificial Sequence
  derived and/or modified sequence
atggccgacaccccccgggacgccggcctgaagcaggcccccgccagccgaaacgagaaagctcctgtggacttcggttacgtcggaatcgactcaatcctggaacagatgaggagaaaggccatgaagcaaggcttcgagttcaatatcatggtggtgggacaaagtgggttgggcaagtctaccctgattaacacactgttcaaatctaaaatttccagaaaatctgtccagccaacctctgaggagagaatccctaagacaatcgagatcaagagcataacccacgatattgaagagaaaggagttcggatgaaattgactgtcattgatacccccggctttggagatcacattaacaatgaaaactgctggcagcctataatgaagtttataaacgaccagtacgaaaagtatttgcaagaagaggtgaatattaacaggaagaagagaatccccgacactcgtgtgcactgctgcctctactttatccccgccaccgggcacagcctgcggcctctggacattgagttcatgaagagattgtcgaaggtggtcaatattgtacctgtaatagcgaaggcggacactctgaccctcgaggaacgggtgcacttcaaacaacggatcaccgctgacctcttatctaacggcattgatgtttatccccagaaggagtttgacgaagatagcgaagatcgcttagttaatgagaagtttcgcgagatgatcccattcgccgtcgtgggctctgatcatgagtaccaggtgaacggaaaaagaatactaggacggaaaaccaagtggggcacaattgaggtcgagaacactactcattgtgagtttgcctacctgcgagacctgctgattaggactcacatgcaaaacattaaagacatcacttcttccatccatttcgaagcgtaccgggtgaaaagactcaacgaagggagtagcgctatggccaacgggatggaagagaaagaacccgaagcccctgaaatgtag

SEQ ID NO: 111562 - DNA, 591 bp, Artificial Sequence
  derived and/or modified sequence
atggcagacactccacgcgatgctggcctcaagcaggctcccgctagtagaaacgagaaggctcccgtcgatttcggatacgtgggaatcgactccattctcgaacagatgagaagaaaggcgatgaagcagggattcgaatttaacataatggttgtgggccagagtggcctcggcaagtcgactctgatcaacacacttttcaaatccaagatctcccggaagagcgtgcagccaaccagcgaggaacgcatacccaaaacaattgagataaagtcaatcacccacgatatcgaggagaagggagttcggatgaagcttaccgtaatcgacacgcctggatttggcgatcacatcaacaacgagaattgttggcagcctataatgaaatttataaacgaccagtacgagaagtatctgcaagaagaagttaatatcaatcggaaaaaaaggatacctgacacacgcgtgcactgttgtctatacttcattcccgctacaggacattccctgcccctgttagagcagaaggtccctctttctcagccctccgcagattgcctggccagatgcggtgacagactggagtag

SEQ ID NO: 111563 - DNA, 1008 bp, Artificial Sequence
  derived and/or modified sequence
atggctgacacgccaagggacgcaggccttaagcaagcacccgcatctcgaaacgaaaaggccccagtggattttggctatgttgggatagactctatcctggaacagatgcgacgcaaggccatgaaacagggattcgagtttaatattatggtggtaggccagtcaggactgggcaaatcgacactcatcaacactctgttcaagagtaagatttctcggaaaagtgtacagcctacttctgaagagagaatccccaaaaccatagagatcaagtcaatcacccacgatattgaggaaaaaggggtacggatgaagttgactgtgattgatacccctggattcggtgatcacattaataacgaaaattgttggcagccaatcatgaaatttattaacgatcagtacgagaagtacctccaggaggaggtgaacattaataggaaaaaaagaattcctgacacgcgtgtgcactgctgtctgtacttcattcctgccaccggccactctctgcgaccactggatatcgaattcatgaaaagactgtccaaagtggtaaacattgtgccagtcatagcgaaagcagataccctgaccctggaagaaagagtgcatttcaagcagaggatcactgctgatttgcttagcaacggaatagatgtataccctcaaaaagagtttgatgaggattccgaagatcgactggtcaacgagaagtttagggagatgatcccctttgccgtcgtggggtctgatcatgaatatcaggtcaacgggaagcgaattttgggcagaaagacaaaatggggaactattgaagtggagaacacaacacattgtgaatttgcctacctcagagatctcttgatccgtacgcacatgcaaaatataaaggatattacaagttccattcacttcgaggcctaccgagtaaagagactgaacgaggggtcatccgcaatggccaacggcatggaagagaaggagcccgaagcgcctgaaatgtag

SEQ ID NO: 111564 - DNA, 591 bp, Artificial Sequence
  derived and/or modified sequence
atggccgacacccccagagacgccggcctgaagcaggcccccgccagcagaaacgagaaggcccccgtggacttcggctacgtgggcatcgacagcatcctggagcagatgagaagaaaggccatgaagcagggcttcgagttcaacatcatggtggtgggccagagcggcctgggcaagagcaccctgatcaacaccctgttcaagagcaagatcagcagaaagagcgtgcagcccaccagcgaggagagaatccccaagaccatcgagatcaagagcatcacccacgacatcgaggagaagggcgtgagaatgaagctgaccgtgatcgacacccccggcttcggcgaccacatcaacaacgagaactgctggcagcccatcatgaagttcatcaacgaccagtacgagaagtacctgcaggaggaggtgaacatcaacagaaagaagagaatccccgacaccagagtgcactgctgcctgtacttcatccccgccaccggccacagcctgcccctgctggagcagaaggtgcccctgagccagcccagcgccgactgcctggccagatgcggcgacagactggagtag

SEQ ID NO: 111565 - protein, 865 aa, Artificial Sequence
  derived and/or modified sequence
MPAGLTEPAGAAPPAAVSASGTVTMAPAGALPVRVESTPVALGAVTKAPVSVCVEPTASQPLRSPVGTLVTKVAPVSAPPKVSSGPRLPAPQIVAVKAPNTTTIQFPANLQLPPGTVLIKSNSGPLMLVSPQQTVTRAETTSNITSRPAVPANPQTVKICTVPNSSSQLIKKVAVTPVKKLAQIGTTVVTTVPKPSSVQSVAVPTSVVTVTPGKPLNTVTTLKPSSLGASSTPSNEPNLKAENSAAVQINLSPTMLENVKKCKNFLAMLIKLACSGSQSPEMGQNVKKLVEQLLDAKIEAEEFTRKLYVELKSSPQPHLVPFLKKSVVALRQLLPNSQSFIQQCVQQTSSDMVIATCTTTVTTSPVVTTTVSSSQSEKSIIVSGATAPRTVSVQTLNPLAGPVGAKAGVVTLHSVGPTAATGGTTAGTGLLQTSKPLVTSVANTVTTVSLQPEKPVVSGTAVTLSLPAVTFGETSGAAICLPSVKPVVFCWDHIKPVIGTPVQIKLAQPGPVLSQPAGIPQAVQVKQLFSLFQVVQQPSGGNEKQVTTISHSSTLTIQKCGQKTMPVNTIIPTSQFPPASILKQITLPGNKILSLQASPTQKNRIKENVTSCFRDEDDINDVTSMAGVNLNEENACILATNSELVGTLIQSCKDEPFLFIGALQKRILDIGKKHDITELNSDAVNLISQATQERLRGLLEKLTAIAQHRMTTYKASENYILCSDTRSQLKFLEKLDQLEKQRKDLEEREMLLKAAKSRSNKEDPEQLRLKQKAKELQQLELAQIQHRDANLTALAAIGPRKKRPLESGIEGLKDNLLASGTSSLTATKQLHRPRITRICLRDLIFCMEQEREMKYSRALYLALLK

SEQ ID NO: 111566 - DNA, 2556 bp, Artificial Sequence
  derived and/or modified sequence
gggaccctggtgaccaaagtggctccggtcagcgcccctcctaaagtcagcagcggccctaggctgcctgctcctcagatagtcgccgtgaaagcccccaacaccacgacaatccagtttcctgctaatttgcagcttcctccaggaaccgttttgattaaaagtaacagtggtccgttgatgttggtatctcctcagcaaactgtaacaagagccgagaccacaagtaacataacctcaaggccagcagtaccagcgaatcctcaaacagtcaaaatctgtacagtgccgaactctagctcacaattaatcaagaaagtggcagtgacacctgttaaaaaattggcacaaataggaactactgtggtaaccactgttccgaagccttcctcagtacaatctgtggctgtgccaaccagtgtcgtcacagttactcctggaaagccattgaatactgtaactaccctgaagccttcaagtttgggagcatcatccactccttcaaatgagcccaatcttaaagcagagaactcagcagctgttcagattaatctttctccgacaatgctagaaaatgtgaagaaatgcaagaacttccttgcaatgttaataaaactagcatgtagtggatcacagtcccctgaaatggggcaaaatgtgaagaagctggtggaacaacttttggatgcaaaaatcgaagcagaagaatttactaggaaactgtatgttgaactcaagtcttcacctcagcctcacctggttccttttcttaagaaaagcgtggttgccttacgacaacttctgcctaactcccagagcttcatccagcaatgtgttcagcagacttctagtgacatggtcattgctacctgtactacaacagtaacaacttctcctgtggtgacaactacagtgtcctcaagccagtctgaaaagtcaattattgtttctggagcaacagcacccagaactgtgtcagtgcaaactttgaacccacttgctggtccagtgggagcaaaagctggagttgtgacacttcattctgtgggcccaactgctgcaacaggaggaacaacagctggaactggtttgcttcagacttcaaaaccacttgtgacatctgtggcaaacacagtgaccacggtctcactgcaacctgaaaagccagttgtctctggaacagcagtaacactgtcccttccagcagtaacttttggagaaacttcaggtgcagctatttgtcttccatctgtgaaacctgttgtttccttctgctgggaccacatctgcaagcctgttattgggactccagttcaaatcaaacttgcccagccgggccctgtcctttcacaaccagctgggattccaacaggcagttcaagcaagcaactattctcattgtttcacgtagttcagcagccttcaggaggcaatgaaaaacaagtgaccacaatttcacattcctcaacattgaccattcagaaatgtggacagaagacgatgccagtgaacaccataatacctactagtcagtttcctccagcttccattctaaagcaaattactctgcctggaaataaaattctgtcacttcaagcatctcctactcagaaaaatagaataaaagagaatgtaacatcatgcttccgagatgaggatgacatcaatgatgtgacttctatggcaggggtcaaccttaatgaagaaaatgcctgcatcttagcaacaaactctgaattggttggcacactcattcagtcatgtaaagatgaaccatttctttttattggagctctacaaaagagaatcttagacattggtaaaaagcatgacattacagaacttaactctgatgctgtgaacttgatctcccaagcaacacaggaacgactacgaggccttctagaaaaactgactgcaattgctcagcatcgaatgactacttacaaggcaagtgaaaattacatcctgtgtagtgataccaggtcacagctcaaatttcttgaaaagctggatcaattggagaagcagagaaaggatttggaagaaagagaaatgttacttaaggcagccaagagtcgttctaataaagaagatccagaacagctgagattaaagcagaaagccaaagagttacagcaattggaacttgcacagatacagcatagagacgctaatctcacagctcttgcagctattggaccaaggaagaagagaccactagaatctggaattgagggcttaaaagacaaccttcttgcttctgggacatccagcctgacagccaccaaacagttgcatcgtccaagaatcacgagaatctgcctcagggacttgatattttgtatggaacaggaacgggagatgaagtattctcgagctctatacctggcccttctgaagtgaccactccactcttccatccacatccttgctatttactgccaaagaagacacaaagcattgttgcactgtcctgaaatttcaatttctggaaaataacaccaacatgaaagagcattgtttacgattagaactttattaactcttacctat

SEQ ID NO: 111567 - DNA, 2598 bp, Artificial Sequence
  derived and/or modified sequence
atgcccgccggcctgaccgagcccgccggcgccgccccccccgccgccgtgagcgccagcggcaccgtgaccatggcccccgccggcgccctgcccgtgagagtggagagcacccccgtggccctgggcgccgtgaccaaggcccccgtgagcgtgtgcgtggagcccaccgccagccagcccctgagaagccccgtgggcaccctggtgaccaaggtggcccccgtgagcgccccccccaaggtgagcagcggccccagactgcccgccccccagatcgtggccgtgaaggcccccaacaccaccaccatccagttccccgccaacctgcagctgccccccggcaccgtgctgatcaagagcaacagcggccccctgatgctggtgagcccccagcagaccgtgaccagagccgagaccaccagcaacatcaccagcagacccgccgtgcccgccaacccccagaccgtgaagatctgcaccgtgcccaacagcagcagccagctgatcaagaaggtggccgtgacccccgtgaagaagctggcccagatcggcaccaccgtggtgaccaccgtgcccaagcccagcagcgtgcagagcgtggccgtgcccaccagcgtggtgaccgtgacccccggcaagcccctgaacaccgtgaccaccctgaagcccagcagcctgggcgccagcagcacccccagcaacgagcccaacctgaaggccgagaacagcgccgccgtgcagatcaacctgagccccaccatgctggagaacgtgaagaagtgcaagaacttcctggccatgctgatcaagctggcctgcagcggcagccagagccccgagatgggccagaacgtgaagaagctggtggagcagctgctggacgccaagatcgaggccgaggagttcaccagaaagctgtacgtggagctgaagagcagcccccagccccacctggtgcccttcctgaagaagagcgtggtggccctgagacagctgctgcccaacagccagagcttcatccagcagtgcgtgcagcagaccagcagcgacatggtgatcgccacctgcaccaccaccgtgaccaccagccccgtggtgaccaccaccgtgagcagcagccagagcgagaagagcatcatcgtgagcggcgccaccgcccccagaaccgtgagcgtgcagaccctgaaccccctggccggccccgtgggcgccaaggccggcgtggtgaccctgcacagcgtgggccccaccgccgccaccggcggcaccaccgccggcaccggcctgctgcagaccagcaagcccctggtgaccagcgtggccaacaccgtgaccaccgtgagcctgcagcccgagaagcccgtggtgagcggcaccgccgtgaccctgagcctgcccgccgtgaccttcggcgagaccagcggcgccgccatctgcctgcccagcgtgaagcccgtggtgttctgctgggaccacatcaagcccgtgatcggcacccccgtgcagatcaagctggcccagcccggccccgtgctgagccagcccgccggcatcccccaggccgtgcaggtgaagcagctgttcagcctgttccaggtggtgcagcagcccagcggcggcaacgagaagcaggtgaccaccatcagccacagcagcaccctgaccatccagaagtgcggccagaagaccatgcccgtgaacaccatcatccccaccagccagttcccccccgccagcatcctgaagcagatcaccctgcccggcaacaagatcctgagcctgcaggccagccccacccagaagaacagaatcaaggagaacgtgaccagctgcttcagagacgaggacgacatcaacgacgtgaccagcatggccggcgtgaacctgaacgaggagaacgcctgcatcctggccaccaacagcgagctggtgggcaccctgatccagagctgcaaggacgagcccttcctgttcatcggcgccctgcagaagagaatcctggacatcggcaagaagcacgacatcaccgagctgaacagcgacgccgtgaacctgatcagccaggccacccaggagagactgagaggcctgctggagaagctgaccgccatcgcccagcacagaatgaccacctacaaggccagcgagaactacatcctgtgcagcgacaccagaagccagctgaagttcctggagaagctggaccagctggagaagcagagaaaggacctggaggagagagagatgctgctgaaggccgccaagagcagaagcaacaaggaggaccccgagcagctgagactgaagcagaaggccaaggagctgcagcagctggagctggcccagatccagcacagagacgccaacctgaccgccctggccgccatcggccccagaaagaagagacccctggagagcggcatcgagggcctgaaggacaacctgctggccagcggcaccagcagcctgaccgccaccaagcagctgcacagacccagaatcaccagaatctgcctgagagacctgatcttctgcatggagcaggagagagagatgaagtacagcagagccctgtacctggccctgctgaagtag

SEQ ID NO: 111568 - DNA, 2598 bp, Artificial Sequence
  derived and/or modified sequence
atgcccgcaggtctgaccgagccagccggcgctgctccaccagccgcagtgtctgcatccggcactgtgaccatggctcccgctggagccctgcctgtgcgagtcgaatcaacccctgttgccctgggcgcagtgaccaaagcaccggtttcagtgtgtgtagaaccaactgcaagccagcctttgcgcagccctgttgggacactggtgacaaaggtggctcctgtgagcgctcctcctaaagtaagttctggtcctagactccctgcacctcagattgttgccgtgaaagctcctaatacgacaactatccaattcccagctaatctgcagctcccacctggcacagtcttaatcaaatcaaacagcggacccctgatgctcgtctccccacagcagacagtgaccagagccgaaaccacgagtaacatcacctctcgtcctgctgtgcccgcaaatccacaaactgtcaaaatttgtaccgtgcccaactcttctagccagctgatcaaaaaggtggctgtgacccctgtcaagaagctggcacagatcggcactaccgtagtgaccaccgtgcctaaaccaagttctgttcagagcgttgcagtgccaactagcgtcgtaactgtgacaccgggcaagcctctaaacaccgtgacgaccctgaagccatctagcctgggggcgtcttcgacgccatccaacgagcctaacctgaaagccgagaactctgccgctgtccagatcaaccttagtcctactatgctggagaatgtgaagaaatgcaagaacttcttggctatgttgatcaagcttgcatgctccggttcgcagtcacccgagatgggccagaacgtgaaaaaactcgtcgagcagcttctcgatgcaaaaattgaggccgaagagtttactagaaaattatacgtagagttgaaaagcagccctcagccgcacctggtaccattcctaaagaagtccgtggtggcactgaggcagctgctgcctaactctcaatcctttatacagcagtgcgtacagcaaacatcatccgatatggtcatcgccacatgcacaactactgtcaccacatccccggttgtgacaacaaccgtatccagcagccagtccgagaaaagcattattgtgtccggagctaccgctccccggaccgtgtcagttcaaacactgaaccctctggcgggtccagtaggagccaaggcaggggtggtgacattgcattctgtaggacccactgcagctacaggcggtacgacggcaggaacaggcctcttgcagacctctaagccactggtcactagcgtggctaacaccgtaactaccgtgagtcttcagccggagaaacccgtggtgagcggcacagctgtgaccttgagcttacccgccgttacctttggtgagacctccggcgctgccatctgcctaccgagtgtgaaacccgttgtgttttgctgggatcacataaagcccgtaatcggcactccagtccaaattaagctggctcagcccggtcctgtcttaagtcagccagccgggatcccacaagcagtgcaggtcaagcaacttttcagcttattccaggtggtgcagcagccttctggggggaacgagaaacaggtcactaccatcagccacagcagtaccttgacgatccaaaaatgcggccaaaaaacaatgcccgttaacaccattattccaacttctcagtttcctcccgccagtatactaaagcagatcaccctgcccgggaataagattctttctctgcaggccagtcctacgcagaaaaaccggatcaaagagaacgttacatcctgctttagagacgaggatgatatcaatgacgtgacctccatggcaggggtcaatttaaacgaagagaatgcgtgcatcctggcaaccaacagcgagctcgttgggacgttgatccaatcatgtaaggacgagccattccttttcattggcgccctacagaagcgaatattggacattgggaaaaagcatgacatcactgagctcaactcggatgccgtaaatctgattagccaagccacacaggagaggctgagggggctcttggagaagctgacagctatcgcgcagcatagaatgactacatacaaggcaagcgagaactatatcctgtgtagcgataccagaagccagctaaagtttctggaaaaattggatcagcttgaaaaacagcgcaaagatctcgaagaaagagagatgctcttgaaggccgcgaaatctagatccaacaaggaagacccagagcagttacggctgaaacagaaagctaaggagcttcagcagctggaactggcccagattcagcatcgcgatgcaaatctcacagccttagccgccatcggccccaggaaaaaacgaccactcgaatccggaatcgagggcctgaaagataaccttctagcatctggcacctctagcctgaccgcgacaaagcaactgcaccggccacggatcactcgcatttgtctgagagacttaatattttgcatggaacaggagagagagatgaaatatagccgggccctgtacttggccctgctgaaatag

SEQ ID NO: 111569 - DNA, 2598 bp, Artificial Sequence
  derived and/or modified sequence
atgcctgctggcctgacagagcctgctggagctgcccctcctgctgctgtgtctgccagcggcaccgtgaccatggccccagctggggccctgcctgtgcgggtggagagcacccctgtggccctgggcgctgtgaccaaggcccctgtgtctgtgtgtgtggagcccacagccagccagcccctgcggagccctgtgggcaccctggtgaccaaggtggcccctgtgtctgccccacccaaggtgagcagcggcccccggctgcctgccccccagatcgtggccgtgaaggcccccaacaccaccaccatccagtttcctgccaacctgcagctgcccccaggcaccgtgctgatcaagagcaacagcggccccctgatgctggtgagcccccagcagacagtgaccagggctgagaccaccagcaacatcaccagcaggcctgctgtgcctgccaacccccagacagtgaagatctgcaccgtgcccaacagcagcagccagctgatcaagaaggtggccgtgacccctgtgaagaagctggcccagatcggcaccaccgtggtgaccaccgtgcccaagcccagctctgtgcagagcgtggccgtgcccacctctgtggtgacagtgacccctgggaagcccctgaacacagtgaccaccctgaagcccagcagcctgggcgccagcagcacccccagcaatgagcccaacctgaaggccgagaacagcgctgctgtgcagatcaacctgagccccaccatgctggagaatgtgaagaagtgcaagaacttcctggccatgctgatcaagctggcctgcagcggcagccagagccctgagatgggccagaatgtgaagaagctggtggagcagctgctggatgccaagattgaggccgaggagttcaccaggaagctgtatgtggagctgaagagcagcccccagccccacctggtgcccttcctgaagaagtctgtggtggccctgcggcagctgctgcccaacagccagagcttcatccagcagtgtgtgcagcagaccagcagtgacatggtgattgccacctgcaccaccaccgtgaccaccagccctgtggtgaccaccaccgtgagcagcagccagagcgagaagagcatcatcgtgtctggggccacagcccccaggacagtgtctgtgcagaccctgaaccccctggccggccctgtgggcgccaaggccggcgtggtgaccctgcacagcgtgggccccacagctgccactggaggcaccacagctggcaccggcctgctgcagaccagcaagcccctggtgacctctgtggccaacacagtgaccaccgtgtccctgcagcctgagaagcctgtggtgtctggaacagctgtgaccctgagcctgcctgctgtgacctttggagagaccagcggggccgccatctgcctgcccagcgtgaagcctgtggtgttctgctgggaccacatcaagcctgtgattggcacccctgtgcagatcaagctggcccagcccggccctgtgctgagccagcctgctggcatcccccaggccgtgcaggtgaagcagctgttcagcctcttccaggtggtgcagcagcccagcggcggcaatgagaagcaggtgaccaccatcagccacagcagcaccctgaccatccagaagtgtggccagaagaccatgcctgtgaacaccatcatccccaccagccagtttcctccagccagcatcctgaagcagatcaccctgcccggcaacaagatcctgagcctgcaggccagccccacccagaagaaccgcatcaaggaaaatgtgaccagctgcttcagagatgaagatgacatcaatgatgtgacctccatggccggcgtgaacctgaatgaagaaaatgcctgcatcctggccaccaacagcgagctggtgggcaccctcatccagagctgcaaggatgagcccttcctgttcatcggggccctgcagaagaggatcctggacatcggcaagaagcatgacatcacagagctgaacagtgatgctgtgaacctgatcagccaggccacccaggagcggctgcggggcctgctggagaagctgacagccatcgcccagcacaggatgaccacctacaaggccagcgagaactacatcctgtgcagcgacaccaggagccagctgaagttcctggagaagctggaccagctggagaagcagaggaaggacctggaggagcgggagatgctgctgaaggccgccaagagccgcagcaacaaggaggaccctgagcagctgcggctgaagcagaaggccaaggagctgcagcagctggagctggcccagatccagcacagagatgccaacctgacagccctggccgccatcggccccaggaagaagaggcccctggagagcggcatcgagggcctgaaggacaacctgctggccagcggcaccagcagcctgacagccaccaagcagctgcaccggccccgcatcacccgcatctgcctgcgggacctgatcttctgcatggagcaggagcgggagatgaagtacagccgggccctgtacctggccctgctgaagtag

SEQ ID NO: 111570 - DNA, 2598 bp, Artificial Sequence
  derived and/or modified sequence
atgcccgccggcctgaccgagcccgccggcgccgccccccccgccgccgtgtccgctagcggaactgtcacgatggcaccagcgggcgccctacctgtgagagtagagtccaccccagttgccctaggtgccgtaaccaaggccccagtctcagtgtgcgtggaacccacagcctcccagccactcagatctccagtgggaaccctcgtgacgaaagttgcccctgtcagtgcgcctccgaaagtttcttccggcccgcgcctgcccgccccccaaattgtggcagtcaaggctcccaacacaacgacaattcagttccctgccaacctgcagcttccacctggaaccgtcttgatcaagtcgaacagcggcccactgatgctcgtgtccccccagcaaaccgtcacccgggcagagactacctcaaatatcacaagccggcctgccgttcccgccaaccctcagaccgtcaagatctgcaccgtgccaaactcatcgagccagttaattaaaaaagtggctgtgactcctgtcaagaagctggcccaaatcggcaccactgtggtgacaacggttcccaaaccgagctcagtgcagagcgtggccgtccccacatccgttgtgaccgttacacccggaaaacccctgaacactgtgacgaccttaaagccatccagcctcggcgccagcagtacgccatccaacgaacccaacttaaaagcggagaactctgctgccgtgcagatcaacttgtcacccacaatgctggagaatgtcaagaagtgcaaaaatttccttgccatgttgataaaactggcgtgtagtggcagccagtccccagaaatgggccagaatgtaaagaaactggtggaacagttgttggacgctaagatagaagcagaggaattcactcggaaactctacgtcgagttgaaatcatccccccaacctcacctcgtgccgtttcttaagaaatctgtagtcgcactgcgtcagctacttccgaatagccaaagtttcattcagcaatgtgtacaacagacttcatcagacatggtgattgctacttgtacaaccacagtgactacctcacctgtggttacaactacagtctcttccagccagagcgagaagagtatcatcgtgtccggtgccactgcgcctcgcacagtgtctgtccagacattgaacccacttgcggggccggtaggtgccaaggcaggagtagtcacactgcatagtgtggggcctacagctgccacaggaggcaccacggcaggaacagggttgctccagacaagcaaacctctcgtgacatccgtcgctaatactgtgaccacagtgtccctgcagccagagaaacccgtcgttagcggaaccgccgtcaccttgtccctccctgccgtgactttcggcgaaacctctggcgcagctatatgtcttcctagcgtaaagcctgtcgtcttctgttgggaccatataaaaccagtcataggcacacctgtgcagataaagctcgctcagcctggcccagtcctaagtcagcctgcggggattccgcaagccgttcaggtgaagcaactcttctccctctttcaggtagtccaacagcctagtgggggcaatgagaagcaagtgactacgatttctcattcctccactctgacaattcagaagtgcggccaaaagaccatgcctgttaacacaattatccccaccagccagtttccacctgcctcaatacttaagcagatcacactacctggcaataaaatactgtccttacaagcctcccccacacaaaagaataggatcaaggagaacgtgacaagttgttttcgcgacgaagatgatatcaatgatgtcacgtccatggccggtgtaaatttgaatgaggagaacgcatgcatcctagccactaacagcgaattggtgggcaccctcatccagtcttgcaaagatgaaccatttctgtttatcggcgcccttcagaaacggatccttgacattggcaaaaaacatgacatcacggaactaaactccgacgccgtaaacctcatatcccaggctacacaagaacggcttagaggactcttagagaagctgaccgctatcgcccaacatcggatgacaacatacaaggcctcagagaattacatactgtgcagcgacacccgctcacagttgaaatttttggagaaactcgaccagctcgagaagcaaaggaaagatctggaggagagggagatgctgctcaaggcagctaaaagtaggagcaacaaagaggacccagaacagctgagactcaagcagaaagctaaggagcttcaacagctcgagcttgctcagattcaacaccgcgacgctaatttaactgccctggccgccattggtcctcggaagaagcgccctctggaatccggcattgagggacttaaggataatttacttgcttcgggaacaagctcattaacagctactaagcagcttcacagaccacgaatcacccgtatctgtctgcgggatctgattttttgtatggagcaggagagggagatgaaatacagcagggcgctgtaccttgcactcctgaagtag

SEQ ID NO: 111571 - DNA, 2598 bp, Artificial Sequence
  derived and/or modified sequence
atgcctgctggtttgaccgaaccagcgggagctgccccacccgcagcagtgtctgctagcggcacagtgacaatggcccctgctggcgctctgccagtgcgcgtggagtctacacctgttgcactgggagccgttacaaaagcacccgtttcagtgtgtgtggagcctaccgctagccaacctctgcgtagtccagtcgggaccctagtgaccaaagtcgccccagtctcagcccctcccaaagtgtcctctggacctagacttcccgctcctcagattgtcgcggtcaaggccccaaataccaccacaatccagtttccagcaaaccttcagttacctcccggaaccgtcctgattaagtcaaattccggtcctctgatgctcgtgagcccccagcagactgtcacccgagccgagacgacctctaacataacttctcgtcctgccgttccagccaatcctcagaccgtcaaaatatgcacagtccctaatagctccagtcagcttatcaaaaaagtggccgtgactcccgtcaagaagctcgcccagatcgggaccaccgtggtgacaacagtgccaaaaccatcgagtgtccagagcgtcgctgtgcctacaagcgtggtgaccgtgacccctgggaagccacttaacactgtgacgacccttaaaccgtcctccctgggtgctagctcaacccccagcaacgaacctaacctaaaggctgagaactcagccgctgtgcagattaatctgagccccaccatgctggaaaacgttaaaaagtgcaaaaactttctcgccatgttgattaagttagcctgctccggctcccagagcccagaaatgggccaaaacgtaaagaagctggttgagcagctgctggacgcaaagattgaagccgaagaatttacccggaagctatacgtcgaactgaagagtagtcctcagcctcacctggtccccttcctgaagaagagtgtcgtggctttgcgccagttgctgccaaacagtcagagttttattcagcagtgcgtccagcagacgagctctgacatggtcatcgcaacgtgtacaacaacggtcactacctcacctgtggtcacaactacagtgagttcgagccaatctgaaaagtctattattgtgtcaggggcaactgcgcctaggaccgtgtctgtgcaaacgctgaacccattggcaggacccgtcggagccaaggcgggagttgttactctgcactcagttggtcccacggcagcaaccgggggaaccacggctggcaccggattactgcagaccagcaagcccctggtaactagtgtcgcgaacaccgtaacgacagtgtcgctgcagccagagaagccagtcgtgagtggtactgccgtcacactatccctgcctgccgtcacattcggcgagacttctggggctgcaatttgcctcccatccgtgaaaccagtggtgttctgctgggatcacatcaagccggttatagggacaccggtgcagatcaaattggctcagcccggaccagtcttgtcacagcctgcgggtatcccacaagctgttcaggtgaagcagttattctccctgttccaagttgtgcagcagccctccgggggtaatgagaaacaggtgaccacgatctcccacagtagtaccctcacaattcagaaatgcgggcagaagacgatgcccgtgaatactatcatcccaaccagtcagttccctccagccagcatcttgaagcagatcaccctgcccggaaacaagattctgagtctccaggccagcccaacccagaagaacaggatcaaagagaatgttacttcatgtttcagagatgaggacgacattaacgacgtaacctccatggccggagtgaatttgaatgaggaaaacgcatgtatcctcgcaaccaactccgaactcgtagggacgctcatccaatcatgcaaagacgagccctttttgttcatcggtgcccttcaaaagagaattctagatattggaaaaaagcacgatatcacagagctgaattctgatgccgtcaatttaatatcgcaagctactcaagaacgtctgcgaggcctcttggaaaaattgacagcaatcgcgcagcaccgaatgaccacttataaagcctccgagaattacatcttgtgttcagatacccgatctcagttgaaattccttgagaagctagatcagctggaaaaacagaggaaagatctggaagaacgtgagatgctgctgaaggcggcaaagtctcgctcaaataaagaagatcccgagcagcttaggctgaaacagaaggcgaaggagctgcaacaactcgagctggcccagatccaacaccgtgacgcaaatttaacagccctggctgccattgggccacggaaaaaaagacctttagaaagtggcatcgaagggctgaaagataacctgcttgctagcggaacatctagcctgactgccacaaaacagctgcacagaccgagaattactaggatctgtctcagggatttgatcttctgtatggagcaggagagagagatgaagtactcccgtgcactgtaccttgctttgctgaaatag

SEQ ID NO: 111572 - DNA, 4753 bp, Artificial Sequence
  derived and/or modified sequence
gtggctatataaacatggctggcgtggccgcgcggcggggccgtgccaatcgcgcgtagggggctgtgggcactcggggttcgtagttttgaaatttctggcgggggagcagctgcgcagttaggctcgaggtgtgagcgacgaccttccgggagccgcaagtccaggctcccccgcagcgggacccgagcctgaggcgcagggctgaggcagcgcacgtgtgagcgccgctgaggaagctgcgagaggtcgggcgggtgtcgctccgggggcagcccaggctcgcgcggacgagaggaaggtccgggacgcgcgtgtcctgccgtgcagcgggcgcccgtcactgacttcgctgctgcggcccccgcgcctctccccagcgatgctgtggaacccgaaccgcaccggagtcggctgccgcgcgccaagcctcccctcacctctgctcccggaaccgcagcgccaaagctgccgctgagcccctgggggatgcccgccggcctcaccgaacccgccggcgccgctcccccggctgctgtgagcgcctcggggaccgtgaccatggccccggccggggcgctgccggtgcgggtggagagcactccggtggccctgggcgccgtgactaaggctcctgtcagcgtctgcgtggagcccacggcgtcccagcccctgcggtcccccgtggggaccctggtgaccaaagtggctccggtcagcgcccctcctaaagtcagcagcggccctaggctgcctgctcctcagatagtcgccgtgaaagcccccaacaccacgacaatccagtttcctgctaatttgcagcttcctccaggaaccgttttgattaaaagtaacagtggtccgttgatgttggtatctcctcagcaaactgtaacaagagccgagaccacaagtaacataacctcaaggccagcagtaccagcgaatcctcaaacagtcaaaatctgtacagtgccgaactctagctcacaattaatcaagaaagtggcagtgacacctgttaaaaaattggcacaaataggaactactgtggtaaccactgttccgaagccttcctcagtacaatctgtggctgtgccaaccagtgtcgtcacagttactcctggaaagccattgaatactgtaactaccctgaagccttcaagtttgggagcatcatccactccttcaaatgagcccaatcttaaagcagagaactcagcagctgttcagattaatctttctccgacaatgctagaaaatgtgaagaaatgcaagaacttccttgcaatgttaataaaactagcatgtagtggatcacagtccccagaaatggggcaaaatgtgaagaagctggtggaacaacttttggatgcaaaaatcgaagcagaagaatttactaggaaactgtatgttgaactcaagtcttcacctcagcctcacctggttccttttcttaagaaaagcgtggttgccttacgacaacttctgcctaactcccagagcttcatccagcaatgtgttcagcagacttctagtgacatggtcattgctacctgtactacaacagtaacaacttctcctgtggtgacaactacagtgtcctcaagccagtctgaaaagtcaattattgtttctggagcaacagcacccagaactgtgtcagtgcaaactttgaacccacttgctggtccagtgggagcaaaagctggagttgtgacacttcattctgtgggcccaactgctgcaacaggaggaacaacagctggaactggtttgcttcagacttcaaaaccacttgtgacatctgtggcaaacacagtgaccacggtctcactgcaacctgaaaagccagttgtctctggaacagcagtaacactgtcccttccagcagtaacttttggagaaacttcaggtgcagctatttgtcttccatctgtgaaacctgttgttttctgctgggaccacatcaagcctgttattgggactccagttcaaatcaaacttgcccagccgggccctgtcctttcacaaccagctgggattccacaggcagttcaagtcaagcaactattctcattgtttcaggtagttcagcagccttcaggaggcaatgaaaaacaagtgaccacaatttcacattcctcaacattgaccattcagaaatgtggacagaagacgatgccagtgaacaccataatacctactagtcagtttcctccagcttccattctaaagcaaattactctgcctggaaataaaattctgtcacttcaagcatctcctactcagaaaaatagaataaaagagaatgtaacatcatgcttccgagatgaggatgacatcaatgatgtgacttctatggcaggggtcaaccttaatgaagaaaatgcctgcatcttagcaacaaactctgaattggttggcacactcattcagtcatgtaaagatgaaccatttctttttattggagctctacaaaagagaattttagacattggtaaaaagcatgacattacagaacttaactctgatgctgtgaacttgatctcccaagcaacacaggaacgactacgaggccttctagaaaaactgactgcaattgctcagcatcgaatgactacttacaaggcaagtgaaaattacatcctgtgtagtgataccaggtcacagctcaaatttcttgaaaagctggatcaattggagaagcagagaaaggatttggaagaaagagaaatgttacttaaggcagccaagagtcgttctaataaagaagatccagaacagctgagattaaagcagaaagccaaagagttacagcaattggaacttgcacagatacagcatagagacgctaatctcacagctcttgcagctattggaccaaggaagaagagaccactagaatctggaattgagggcttaaaagacaaccttcttgcttctgggacatccagcctgacagccaccaaacagttgcatcgtccaagaatcacgagaatctgcctcagggacttgatattttgtatggaacaggaacgggagatgaagtattctcgagctctatacctggcccttctgaagtgaccactccactcttccatccagatccttgctatttactgccaaagaagacacaaagcattgttgcactgtcctgaaatttcaatttctggaaaataatcaccaacatgaaagagcattgtttacagttagaaactttattaactcttacctatccatctcatgggactcttacagactcagattcatctttgtcttctgaaaatcagttatgaaatacactttgcacagaattaggcatctgcctatctgtgcattaaattaaagcaagttaaggccctatttgttactacctgcctcatttgccaaattgtagcaggtgaggtgtccttccctaatacagcatgcattgagatgcaggagaaaggaagaggcataagaaaatacaagaatgactatttcattctatattgaacctgtcccaaagtggtaggttttctgggctggaatcagaagttgcttagctaactatgacagtcaccctctgtacgtgacaggccactgtggtgactttggtcggctgagttccagtgttgtcaaaacaagacaaatggggatagattgtgcctggggttgctaattctctgcttcatatcaccatatgccgtttctggtaccaagtgaggggacatgcttgtcagggaaaccttaaaattgaatctactgatatatcttgttgaaaaaatggaaaaggtgcaaagtattagaaggaacgttagggcgttgctttcaaactgatgaggggaatgtgaaaatggtatcataaaacaggaaatgtgcttcatatgcccaagaggggaagaggtggaatcggaactccaaaacaactggtacatgttttgttgatgggcaaaaaaaatcacagcacaaccagaaaggagaatgtaccagatgttttcaaattagagtatttcaaaaggaaaatgttattttttgttttgtattgttttaaatcccaaggatagtttttatagttccttctgtcataatatattttagttatcctaatttttaagcatgttggcacatttaaaaaatcctaattgatgatgagaaatttttaacaataggactttatgttggattctgtacttaaaaggtactgtcaatatctcactcttggggatatgagctctaaatatgagaagcaagttatatgtgttcacctgaggaagaagctgacggacaaagcaaaccctctttaaaaaaaaaaaaaagaaaattccacgtgtgtggaatacagccggtgaaaaataatcactgtagttagaatcacatacagaaaaaaaatgattgaatcctccaagaaggtatttcaaaaatgggaaatgctatacttataagaattgaaggaaaaaaaaaaaaacacctcacgtatgttattcttcatcctgttcttcccattgggactgttatggccatattctacagtatagtaaattttaaattggccacatttttttttgtttcagcaagttatgtaaaatgctataaattatgtgtatgttaaaggagtactttaagaagagatctttatccaaagttgtttttgtatatttaaatgcttacctttattttttgtaaagtgcagcatactcatttgtgtataatcttactgatcagatgtttaaaattattccaaatacttcattaaaataattattttatt

SEQ ID NO: 111573 - protein, 72 aa, Artificial Sequence
  derived and/or modified sequence
MGTAGAMQLCWVILGFLLFRGHNSQPTMTQTSSSQGGLGGLSLTTEPVSSNPGYIPSSEANRPSHLSSTGTP

SEQ ID NO: 111574 - DNA, 219 bp, Artificial Sequence
  derived and/or modified sequence
atgggcaccgccggcgccatgcagctgtgctgggtgatcctgggcttcctgctgttcagaggccacaacagccagcccaccatgacccagaccagcagcagccagggcggcctgggcggcctgagcctgaccaccgagcccgtgagcagcaaccccggctacatccccagcagcgaggccaacagacccagccacctgagcagcaccggcaccccctag

SEQ ID NO: 111575 - DNA, 290 bp, Artificial Sequence
  derived and/or modified sequence
actccctctctcttctccactatggacagagcctccactgagctgctgcctgcccgccacatacccagctgacatgggcaccgcaggagccatgcagctgtgctgggtgatcctgggcttcctcctgttccgaggccacaactcccagcccacaatgacccagacctctagctctcagggaggccttggcggtctaagtctgaccacagagccagtttcttccaacccaggatacatcccttcctcagaggctaacaggccaagccatctgtccagcactggtaccccag

SEQ ID NO: 111576 - DNA, 219 bp, Artificial Sequence
  derived and/or modified sequence
atgggcacagccggggctatgcagttgtgttgggtcattctgggctttctgttatttcgcgggcacaactctcagccaacaatgacccaaacgtcatctagtcaggggggtttgggcgggttaagtcttaccacggaacccgtgtcctccaaccccggatacataccgagttctgaagccaatagaccctctcacttgtcttcaacggggacgccctag

SEQ ID NO: 111577 - DNA, 219 bp, Artificial Sequence
  derived and/or modified sequence
atgggcacagctggggccatgcagctgtgctgggtgatcctgggcttcctgctcttccggggccacaacagccagcccaccatgacccagaccagcagcagccagggcggcctgggcggcctgagcctgaccacagagcctgtgagcagcaaccctggctacatccccagcagcgaggccaaccggcccagccacctgagcagcacaggcaccccctag

SEQ ID NO: 111578 - DNA, 219 bp, Artificial Sequence
  derived and/or modified sequence
atgggcaccgccggcgccatgcagctgtgctgggtgatcctgggcttcctgctctttaggggccataattcgcagcctaccatgacacaaactagtagttcccaaggcggacttgggggtctgagcctcactactgagccagtgtcaagtaaccccggttatattcccagctcagaagctaaccggccctcacacctgtcctctacaggtaccccctag

SEQ ID NO: 111579 - DNA, 219 bp, Artificial Sequence
  derived and/or modified sequence
atgggcacagcgggtgcgatgcagctgtgctgggtgattttggggtttctcttgttcagggggcacaactcccagccgacaatgacccagaccagcagctcccaagggggtctgggtggactaagcttgactacagagccggtgtcatccaaccctggatatattccgtcaagtgaggctaaccgccctagccatcttagcagcacaggaacgccttag

SEQ ID NO: 111580 - protein, 161 aa, Artificial Sequence
  derived and/or modified sequence
MGLELYLDLLSQPCRAVYIFAKKNDIPFELRIVDLIKGVMFPVFLGEPVSPQTLAATLAELDVTLQLLEDKFLQNKAFLTGPHISLADLVAITELMHPVGAGCQVFEGRPKLATWRQRVEAAVGEDLFQEAHEVILKAKDFPPADPTIKQKLMPWVLAMIR

SEQ ID NO: 111581 - DNA, 392 bp, Artificial Sequence
  derived and/or modified sequence
gagacggagtctcgctgtgtctcccaggctggagtgcagtggcagagtgagactcctcaaaaaaaaaaaaaaagttcttgaataaagaaggattattcttccaagaatccaacgtagctgagtaccttgtaacaagtgcagtccacttactgttatactcaaagacaagtttgtatattgattggttctttcaaattcttcacctcagtttcttcttgagtacttgtagaaagaatgatgatactgatggctattttgatttcttttttacgttcttttctcgtttcatttctggaaatatttagtaattaaatgtattatatgttaaagtctgttaacttatactgagctatgttaagaaattatttccaatgtgtttgtaccaacaggtt

SEQ ID NO: 111582 - DNA, 486 bp, Artificial Sequence
  derived and/or modified sequence
atgggacttgagctgtacctggatcttttatcacaaccctgcagagccgtgtacatcttcgccaagaaaaacgacatccctttcgagcttcgcatagttgacctcatcaagggcgtgatgttccctgtgtttcttggagagcctgttagcccacagactttagccgcaaccttggctgagctggatgtcaccctccaactgctggaagacaaattcctgcaaaataaggcctttttaactggaccccacatctcgcttgcagacttagtcgctataactgagttaatgcacccagtcggggccggttgccaggtgtttgagggccggcccaagctagcgacgtggcgacagcgggtcgaagctgcggttggtgaagatctgtttcaagaggctcacgaagtaattctgaaggcgaaagacttcccaccagctgatcctacaatcaagcagaagcttatgccctgggtgttggcaatgattcggtag

SEQ ID NO: 111583 - DNA, 369 bp, Artificial Sequence
  derived and/or modified sequence
atgttcccagtgttcctgggggagcctgtcagtccacagaccctggcagccacactggcagagttagacgtgaccttgcagctgctagaagacaagttcctgcagaataaggcctttctaacgggtccacatatttcacttgctgatctcgtcgctatcacagagcttatgcatcccgtgggcgccggatgtcaagtcttcgaaggcaggcctaagctcgccacgtggagacagcgcgtagaagcggccgtgggagaagatttattccaagaagcccatgaagtaattctgaaggctaaagactttccacccgcagatcccacaatcaagcaaaaactgatgccgtgggtgcttgctatgattcggtag

SEQ ID NO: 111584 - DNA, 807 bp, Artificial Sequence
  derived and/or modified sequence
gactccctctggtttccggtcaggtcggtcggtccccactatgggcctggagctgtacctggacctgctgtcccagccctgccgcgctgtttacatctttgccaagaagaacgacattcccttcgagctgcgcatcgtggatctgattaaaggggtgatgttccctgttttcctgggtgagccagtatctccccagacactggcagccaccctggcagagttggatgtgaccctgcagttgctcgaggacaagttcctccagaacaaggccttccttactggtcctcacatctccttagctgacctcgtagccatcacggagctgatgcatcccgtgggtgctggctgccaagtcttcgaaggccgacccaagctggccacatggcggcagcgcgtggaggcagcagtgggggaggacctcttccaggaggcccatgaggtcattctgaaggccaaggacttcccacctgcagaccccaccataaagcagaagctgatgccctgggtgctggccatgatccggtgagctgggaaacctcacccttgcaccgtcctcagcagtccacaaagcattttcatttctaatggcccatgggagccaggcccagaaagcaggaatggcttgcctaagacttgcccaagtcccagagcacctcacctcccgaagccaccatccccaccctgtcttccacagccgcctgaaagccacaatgagaatgatgcacactgaggccttgtgtcctttaatcactgcatttcattttgattttggataataaacctgggctcagcctgagcctctgcttc

SEQ ID NO: 111585 - DNA, 628 bp, Artificial Sequence
  derived and/or modified sequence
gactccctctggtttccggtcaggtcggtcggtccccactatgggcctggagctgtacctggacctgctgtcccagccctgccgcgctgtttacatctttgccaagaagaacgacattcccttcgagctgcgcatcgtggatctgattaaagcccgtgggtgctggctgccaagtcttcgaaggccgacccaagctggccacatggcggcagcgcgtggaggcagcagtgggggaggacctcttccaggaggcccatgaggtcattctgaaggccaaggacttcccacctgcagaccccaccataaagcagaagctgatgccctgggtgctggccatgatccggtgagctgggaaacctcacccttgcaccgtcctcagcagtccacaaagcattttcatttctaatggcccatgggagccaggcccagaaagcaggaatggcttgcctaagacttgcccaagtcccagagcacctcacctcccgaagccaccatccccaccctgtcttccacagccgcctgaaagccacaatgagaatgatgcacactgaggccttgtgtcctttaatcactgcatttcattttgattttggataataaacctgggctcagcctgagcctctgcttc

SEQ ID NO: 111586 - DNA, 486 bp, Artificial Sequence
  derived and/or modified sequence
atgggcctggagctgtacctggacctgctgagccagccctgcagagctgtgtacatctttgccaagaagaatgacatcccctttgagctgcgcatcgtggacctgatcaagggcgtgatgtttcctgtgttcctgggggagcctgtgagcccccagaccctggccgccaccctggccgagctggatgtgaccctgcagctgctggaggacaagttcctgcagaacaaggccttcctgaccggcccccacatcagcctggccgacctggtggccatcacagagctgatgcaccctgtgggcgccggctgccaggtgtttgagggccggcccaagctggccacctggaggcagagggtggaggccgctgtgggagaagatctcttccaggaggcccacgaggtgatcctgaaggccaaggacttccccccagctgaccccaccatcaagcagaagctgatgccctgggtgctggccatgatcagatag

SEQ ID NO: 111587 - DNA, 369 bp, Artificial Sequence
  derived and/or modified sequence
atgtttcctgtgttcctgggggagcctgtgagcccccagaccctggccgccaccctggccgagctggatgtgaccctgcagctgctggaggacaagttcctgcagaacaaggccttcctgaccggcccccacatcagcctggccgacctggtggccatcacagagctgatgcaccctgtgggcgccggctgccaggtgtttgagggccggcccaagctggccacctggaggcagagggtggaggccgctgtgggggaggacctcttccaggaggcccatgaagtcatcctgaaggccaaggacttccccccagctgaccccaccatcaagcagaagctgatgccctgggtgctggccatgatcagatag

SEQ ID NO: 111588 - DNA, 486 bp, Artificial Sequence
  derived and/or modified sequence
atgggcctggagctgtacctggacctgctgagccagccctgccgggccgtatacattttcgctaaaaagaacgatattcccttcgagcttaggattgtagacttgattaagggtgtaatgtttccagtgtttctgggggagccagtgtcccctcaaactttggcagccacgcttgctgagctcgatgttacactgcaacttctggaggataaatttttgcagaacaaggcattcctgaccggaccccatattagtctggccgaccttgtcgccattactgaacttatgcaccctgtgggcgctggttgtcaagttttcgagggtcgcccaaagctcgcaacatggcgacagcgagtggaagcagcagtgggagaagacctcttccaggaggcgcatgaggtgatcttgaaagcgaaagacttccccccagcagacccaaccataaagcagaaactaatgccttgggtgctcgccatgatccgctag

SEQ ID NO: 111589 - DNA, 369 bp, Artificial Sequence
  derived and/or modified sequence
atgttccccgtgttcctgggcgagcccgtgagcccccagaccctggccgccacattggccgagttggacgtgacattgcagctgctggaagataagtttctgcagaataaggccttccttacaggacctcatatatccctcgccgacctcgtggcaattactgaactgatgcaccccgttggcgcggggtgccaggtgttcgagggaagacctaagttagccacgtggagacagcgggtggaagcggccgttggcgaggatctgtttcaggaggcccacgaggtgattcttaaagccaaggactttcctccagcggacccgactatcaaacagaaactgatgccatgggtgttggccatgatcagatag

SEQ ID NO: 111590 - DNA, 486 bp, Artificial Sequence
  derived and/or modified sequence
atgggtctggaattgtatctcgatcttctctcacagccttgccgggctgtgtatattttcgctaaaaagaatgacataccattcgagctcagaatcgtcgatttgatcaagggcgtcatgtttccggtttttctcggggaacctgtgtctccacaaactctcgccgctaccctggctgagttagacgtaaccctacagttactcgaggataaatttctgcagaataaggccttcttaactggcccacacatcagcttggccgacctggtggcaataacagagttgatgcatcccgttggtgctggttgccaggtcttcgaaggcaggccaaaactggcaacatggcgtcagcgggtggaagcagccgtcggtgaggatctcttccaggaagcccatgaagtgatattgaaagccaaggattttcctcctgccgatcccactattaaacagaaactcatgccctgggtcctggctatgatccgttag

SEQ ID NO: 111591 - DNA, 369 bp, Artificial Sequence
  derived and/or modified sequence
atgttccctgtcttccttggcgaaccagtttcgccacaaaccttggctgcgaccctagcagaacttgatgtcactctccagttgctggaggacaaattcctccagaacaaggcatttttgacgggccctcacatctctctggccgacctggtggcgatcacagaactgatgcatcccgtgggcgctggatgccaggtgttcgaaggcaggcccaagctggcgacgtggcggcagcgagtggaagctgcggtaggagaagatctattccaggaagctcacgaggtgattttgaaagcaaaagactttccgcctgctgaccctaccatcaagcaaaagctcatgccttgggtgctggccatgatcagatag

SEQ ID NO: 111592 - DNA, 486 bp, Artificial Sequence
  derived and/or modified sequence
atgggcctggagctgtacctggacctgctgagccagccctgcagagccgtgtacatcttcgccaagaagaacgacatccccttcgagctgagaatcgtggacctgatcaagggcgtgatgttccccgtgttcctgggcgagcccgtgagcccccagaccctggccgccaccctggccgagctggacgtgaccctgcagctgctggaggacaagttcctgcagaacaaggccttcctgaccggcccccacatcagcctggccgacctggtggccatcaccgagctgatgcaccccgtgggcgccggctgccaggtgttcgagggcagacccaagctggccacctggagacagagagtggaggccgccgtgggcgaggacctgttccaggaggcccacgaggtgatcctgaaggccaaggacttcccccccgccgaccccaccatcaagcagaagctgatgccctgggtgctggccatgatcagatag

SEQ ID NO: 111593 - DNA, 369 bp, Artificial Sequence
  derived and/or modified sequence
atgttccccgtgttcctgggcgagcccgtgagcccccagaccctggccgccaccctggccgagctggacgtgaccctgcagctgctggaggacaagttcctgcagaacaaggccttcctgaccggcccccacatcagcctggccgacctggtggccatcaccgagctgatgcaccccgtgggcgccggctgccaggtgttcgagggcagacccaagctggccacctggagacagagagtggaggccgccgtgggcgaggacctgttccaggaggcccacgaggtgatcctgaaggccaaggacttcccccccgccgaccccaccatcaagcagaagctgatgccctgggtgctggccatgatcagatag

SEQ ID NO: 111594 - protein, 65 aa, Artificial Sequence
  derived and/or modified sequence
MGLELYLDLLSQPCRAVYIFAKKNDIPFELRIVDLIKGQHLSDAFAQVNPLKKVPALKDGDFTLT

SEQ ID NO: 111595 - DNA, 198 bp, Artificial Sequence
  derived and/or modified sequence
atgggcctcgaactctacctggatctgttgtcgcagccctgcagggccgtttatattttcgccaagaaaaacgacatcccatttgagctccggattgtcgacctcattaagggtcaacacctgagtgacgccttcgctcaagtcaatcccctgaaaaaggtgccggccctgaaggatggtgatttcacacttacatag

SEQ ID NO: 111596 - DNA, 559 bp, Artificial Sequence
  derived and/or modified sequence
agtgttgagccaagaggatggactttggagccagactttctgggtctataatcattcagtgtctgtctcctcctctaaaatgcggacggtgggaaattctgacacacgcttcaacacagatgcaccttgaagacattatgctaagtgaaatgagcgagccaggcacgaaagggatgggactggggcctctctgtgcgtccccctgagagacaacggtctcttggccacccaccctgatcccacaggagccaggcgggcccagccctgagacaggccgcccgccgcccgcaattggactaaagagtgtcccaggcgtccgtgccgcccaatggggcacagcggtcggggtcggtcggtccccactatgggcctggagctgtacctggacctgctgtcccagccctgccgcgctgtttacatctttgccaagaagaacgacattcccttcgagctgcgcatcgtggatctgattaaaggtcagcacttaagcgatgcctttgcccaggtgaaccccctcaagaaggtgccagccttgaaggacggggacttcaccttgacg

SEQ ID NO: 111597 - DNA, 198 bp, Artificial Sequence
  derived and/or modified sequence
atgggcctggagctgtacctggacctgctgagccagccctgcagagctgtgtacatctttgccaagaagaatgacatcccctttgagctgcgcatcgtggacctgatcaagggccagcacctgagtgatgcctttgcccaggtgaaccccctgaagaaggtgcctgccctgaaggatggagacttcaccctgacctag

SEQ ID NO: 111598 - DNA, 198 bp, Artificial Sequence
  derived and/or modified sequence
atgggcctggagctgtacctggacctgctgagccagccctgccgggctgtctacatattcgccaagaagaatgatatcccttttgaactgagaatcgtcgacctaatcaagggtcagcatctgagcgacgcatttgcccaagttaatcccttgaagaaagtacccgccctgaaagacggggacttcacactgacatag

SEQ ID NO: 111599 - DNA, 198 bp, Artificial Sequence
  derived and/or modified sequence
atgggtcttgagctgtacctggatctcctgtcccagccctgtagggcggtttacatttttgccaagaaaaatgacatccctttcgaattacggattgtggacctaattaagggtcagcacttatccgatgcgttcgctcaggtgaatccactgaaaaaagtgcccgcattgaaggacggcgattttacattgacttag

SEQ ID NO: 111600 - DNA, 198 bp, Artificial Sequence
  derived and/or modified sequence
atgggcctggagctgtacctggacctgctgagccagccctgcagagccgtgtacatcttcgccaagaagaacgacatccccttcgagctgagaatcgtggacctgatcaagggccagcacctgagcgacgccttcgcccaggtgaaccccctgaagaaggtgcccgccctgaaggacggcgacttcaccctgacctag

SEQ ID NO: 111601 - protein, 72 aa, Artificial Sequence
  derived and/or modified sequence
MGLELYLDLLSQPCRAVYIFAKKNDIPFELRIVDLIKARGCWLPSLRRPTQAGHMAAARGGSSGGGPLPGGP

SEQ ID NO: 111602 - DNA, 219 bp, Artificial Sequence
  derived and/or modified sequence
atggggctggagctttatctagatctgttgagccagccttgtagagcggtgtacatctttgccaaaaaaaatgatattcccttcgagcttaggattgtcgacctcatcaaggcccgagggtgttggcttccttctttaaggcgtcccacccaggccgggcacatggcagctgcgcgagggggttcgtctggaggaggaccactgccgggtgggccctag

SEQ ID NO: 111603 - DNA, 219 bp, Artificial Sequence
  derived and/or modified sequence
atgggcctggagctgtacctggacctgctgagccagccctgcagagctgtgtacatctttgccaagaagaatgacatcccctttgagctgcgcatcgtggacctgatcaaggcccggggctgctggctgcccagcctgcggcggcccacccaggccggccacatggctgctgcccggggcggcagcagcggcggcggccccctgcccggcggcccctag

SEQ ID NO: 111604 - DNA, 219 bp, Artificial Sequence
  derived and/or modified sequence
atgggcctggagctgtacctggacctgctgagccagccctgccgggcagtttacatcttcgccaagaaaaatgatattccattcgaactgaggatcgtagacctgattaaggcaagggggtgctggttgccctcactgaggcgcccaacccaggcagggcacatggctgcagctcgcggcggcagttctggcggtggacctttaccgggggggccttag

SEQ ID NO: 111605 - DNA, 219 bp, Artificial Sequence
  derived and/or modified sequence
atgggcctggaactctacctggacctgttgagtcagccatgtagggccgtctatatttttgctaagaaaaatgatattccattcgagttgagaatagtggatctgatcaaggctcgcggttgctggctgccatctctcagacgcccaacccaggcgggacatatggccgctgctcgcggagggtcatcaggaggaggtccgctgccaggcggtccttag

SEQ ID NO: 111606 - DNA, 219 bp, Artificial Sequence
  derived and/or modified sequence
atgggcctggagctgtacctggacctgctgagccagccctgcagagccgtgtacatcttcgccaagaagaacgacatccccttcgagctgagaatcgtggacctgatcaaggccagaggctgctggctgcccagcctgagaagacccacccaggccggccacatggccgccgccagaggcggcagcagcggcggcggccccctgcccggcggcccctag

SEQ ID NO: 111607 - protein, 519 aa, Artificial Sequence
  derived and/or modified sequence
MSGVRGLSRLLSARRLALAKAWPTVLQTGTRGFHFTVDGNKRASAKVSDSISAQYPVVDHEFDAVVVGAGGAGLRAAFGLSEAGFNTACVTKLFPTRSHTVAAQGGINAALGNMEEDNWRWHFYDTSTGDGTAMITRAGLPCQDLEFVQFHPTGIYGAGCLITEGCRGEGGILINSQGERFMERYAPVAKDLASRDVVSRSMTLEIREGRGCGPEKDHVYLQLHHLPPEQLATRLPGISETAMIFAGVDVTKEPIPVLPTVHYNMGGIPTNYKGQVLRHVNGQDQIVPGLYACGEAACASVHGANRLGANSLLDLVVFGRACALSIEESCRPGDKVPPIKPNAGEESVMNLDKLRFADGSIRTSELRLSMQKSMQNHAAVFRVGSVLQEGCGKISKLYGDLKHLKTFDRGMVWNTDLVETLELQNLMLCALQTIYGAEARKESRGAHAREDYKVRIDEYDYSKPIQGQQKKPFEEHWRKHTLSYVDVGTGKVTLEYRPVIDKTLNEADCATVPPAIRSY

SEQ ID NO: 111608 - DNA, 1560 bp, Artificial Sequence
  derived and/or modified sequence
atgagcggcgtgagaggcctgagcagactgctgagcgccagaagactggccctggccaaggcctggcccaccgtgctgcagaccggcaccagaggcttccacttcaccgtggacggcaacaagagagccagcgccaaggtgagcgacagcatcagcgcccagtaccccgtggtggaccacgagttcgacgccgtggtggtgggcgccggcggcgccggcctgagagccgccttcggcctgagcgaggccggcttcaacaccgcctgcgtgaccaagctgttccccaccagaagccacaccgtggccgcccagggcggcatcaacgccgccctgggcaacatggaggaggacaactggagatggcacttctacgacaccagcaccggcgacggcaccgccatgatcaccagagccggcctgccctgccaggacctggagttcgtgcagttccaccccaccggcatctacggcgccggctgcctgatcaccgagggctgcagaggcgagggcggcatcctgatcaacagccagggcgagagattcatggagagatacgcccccgtggccaaggacctggccagcagagacgtggtgagcagaagcatgaccctggagatcagagagggcagaggctgcggccccgagaaggaccacgtgtacctgcagctgcaccacctgccccccgagcagctggccaccagactgcccggcatcagcgagaccgccatgatcttcgccggcgtggacgtgaccaaggagcccatccccgtgctgcccaccgtgcactacaacatgggcggcatccccaccaactacaagggccaggtgctgagacacgtgaacggccaggaccagatcgtgcccggcctgtacgcctgcggcgaggccgcctgcgccagcgtgcacggcgccaacagactgggcgccaacagcctgctggacctggtggtgttcggcagagcctgcgccctgagcatcgaggagagctgcagacccggcgacaaggtgccccccatcaagcccaacgccggcgaggagagcgtgatgaacctggacaagctgagattcgccgacggcagcatcagaaccagcgagctgagactgagcatgcagaagagcatgcagaaccacgccgccgtgttcagagtgggcagcgtgctgcaggagggctgcggcaagatcagcaagctgtacggcgacctgaagcacctgaagaccttcgacagaggcatggtgtggaacaccgacctggtggagaccctggagctgcagaacctgatgctgtgcgccctgcagaccatctacggcgccgaggccagaaaggagagcagaggcgcccacgccagagaggactacaaggtgagaatcgacgagtacgactacagcaagcccatccagggccagcagaagaagcccttcgaggagcactggagaaagcacaccctgagctacgtggacgtgggcaccggcaaggtgaccctggagtacagacccgtgatcgacaagaccctgaacgaggccgactgcgccaccgtgccccccgccatcagaagctactag

SEQ ID NO: 111609 - DNA, 1560 bp, Artificial Sequence
  derived and/or modified sequence
atgtccggcgtaagaggcctgagccgcctgttgagcgcacgaaggctcgcgctggcgaaagcatggccgacggtgctacaaactggtacaagagggtttcactttacagtagacggaaacaaaagggcatctgccaaggtctccgacagtatctctgcccagtaccccgttgtcgatcatgagtttgacgccgtggttgttggcgccggaggtgctggcctgcgcgccgcctttgggctgagcgaagccgggttcaataccgcctgtgtgacgaagctttttcccaccagatctcacacggtggctgcccagggagggattaatgccgccctgggcaatatggaggaggacaactggcgctggcacttttatgatacgtcaaccggcgacggtacagctatgattactagggccggcctaccctgtcaggatctcgaattcgtgcagttccaccctaccggcatctatggggcgggctgtctgattacagagggatgtcggggagaaggcggaattctcatcaattcacagggggaacgattcatggaacgttacgcaccggtcgccaaggacctcgcatctagggatgtggtgtcccgcagcatgacactggagattagagaagggagaggatgcggcccagaaaaggaccacgtgtatctgcagctccaccatctccctcccgaacagctggccacacggctacctggcatctctgagaccgccatgatatttgctggcgtcgacgttaccaaagagcccatccccgtcctccctacggtgcactataatatgggggggatccccacaaattataagggccaggtactgcggcatgtgaatggtcaggatcagattgtccccgggctctatgcctgcggcgaggctgcctgcgctagcgtgcacggtgctaacaggcttggagcaaattcattgttggatctggtcgttttcgggagagcgtgtgcattatccattgaagaatcctgtcggcctggagacaaggtgccacctataaaacccaatgcaggagaggagtctgtgatgaatctggacaagctcaggtttgccgatgggagcatcaggacctcagaactccggctgtctatgcagaaatccatgcagaaccacgccgcggtcttccgcgtcggcagcgtcctgcaggagggctgcggtaagatttctaaactctatggagatttgaagcacctgaaaacgtttgacagaggtatggtttggaacacggacttggttgaaacactcgaactacagaacctcatgctttgtgctctccagaccatatatggggcagaggctcggaaggagtccagaggtgcccacgctcgcgaagattataaagtgcggatcgacgaatacgactatagtaaacctatacaaggccagcagaagaaacccttcgaagaacactggcgcaagcacaccctgtcttacgtggacgttggaacggggaaagttacactagaatatagacccgtaatagataaaactctgaacgaggctgactgcgcaactgtgccgcctgctatccgttcctactag

SEQ ID NO: 111610 - DNA, 1560 bp, Artificial Sequence
  derived and/or modified sequence
atgtctggagtgcggggcctgagccggctgctgagcgcccggcggctggccctggccaaggcctggcccaccgtgctgcagacaggcacccggggcttccacttcaccgtggatggcaacaagagggccagcgccaaggtgtctgacagcatcagcgcccagtaccctgtggtggaccacgagtttgatgctgtggtggtgggcgccggcggggccggcctgcgggccgccttcggcctgtctgaggccggcttcaacacagcctgtgtgaccaagctgttccccaccaggagccacacagtggccgcccagggcggcatcaatgctgccctgggcaacatggaggaggacaactggcgctggcacttctatgacaccagcactggagatggaacagccatgatcacccgggccggcctgccctgccaggacctggagtttgtgcagttccaccccaccggcatctacggggccggctgcctgatcacagagggctgccgcggggagggcggcatcctgatcaacagccagggcgagcgcttcatggagagatatgcccctgtggccaaggacctggccagcagagatgtggtgagccgctccatgaccctggagatccgggagggccggggctgcggccctgagaaggaccacgtgtacctgcagctgcaccacctgcccccagagcagctggccacccggctgcccggcatcagcgagacagccatgatctttgctggggtggatgtgaccaaggagcccatccctgtgctgcccaccgtgcactacaacatgggcggcatccccaccaactacaagggccaggtgctgcggcacgtgaatggccaggaccagatcgtgcccggcctgtatgcctgtggggaggccgcctgtgcctctgtgcacggggccaaccggctgggcgccaacagcctgctggacctggtggtgtttggccgggcctgtgccctgagcattgaggagagctgcaggcctggggacaaggtgccccccatcaagcccaatgctggggaggagagcgtgatgaacctggacaagctgcgctttgctgatggcagcatccgcaccagcgagctgcggctgtccatgcagaagtccatgcagaaccacgccgctgtgttccgggtgggctctgtgctgcaggagggctgcggcaagatcagcaagctgtatggagacctgaagcacctgaagacctttgaccggggcatggtgtggaacacagacctggtggagaccctggagctgcagaacctgatgctgtgtgccctgcagaccatctatggagctgaggccaggaaggagagcagaggagcccacgcccgggaggactacaaggtgagaattgatgaatatgactacagcaagcccatccagggccagcagaagaagccctttgaggagcactggaggaagcacaccctgtcctatgtggatgtgggcaccgggaaggtgaccctggagtacagacctgtgattgacaagaccctgaatgaagctgactgtgccaccgtgcccccagccatccgcagctactag

SEQ ID NO: 111611 - DNA, 1560 bp, Artificial Sequence
  derived and/or modified sequence
atgagcggcgtgcggggcctgagccggctgctgagcgcccggcggctggcccttgcaaaggcctggccaaccgtactgcaaacaggcactcggggattccattttaccgtggatggaaacaagcgagcctcagccaaagtgtctgactccattagcgctcaatatccggttgtggatcatgagtttgacgctgtcgtggtgggcgccgggggtgcgggtctgcgagcggcctttggattaagtgaggctggtttcaatactgcctgtgtaaccaaactgtttccaacaaggagccatacagtagccgcgcagggaggcattaatgccgccctggggaacatggaggaggacaattggcggtggcatttctacgacacttctacgggagatggcacggcgatgattactagggctggtttgccctgccaggacttggagtttgttcagttccatcctaccggcatctatggtgccggctgtctaattaccgaaggatgccggggggaagggggcattcttatcaattcccagggcgaacgcttcatggagaggtacgcgccagtggccaaggacctggcctcccgcgatgtggtgtctcgcagcatgacactggagatccgagaaggcagagggtgcggccccgagaaagatcacgtgtatttgcaactccatcacctgccacctgagcaattagctactcggctaccgggcatctccgaaaccgcaatgatattcgcgggcgttgacgtgaccaaggaacccattcccgtgctcccaaccgtacactacaatatggggggaatccccacaaattataagggacaagtcctccggcacgtgaacggccaggaccagatagtgcctggtctgtacgcttgtggggaggcggcctgcgccagcgttcatggggctaaccgattgggcgctaactctctgttagacctggtcgtgtttgggagggcgtgcgccctgagcattgaagaatcatgccgccccggagataaagtcccacctattaagccaaacgcgggagaagagtctgtaatgaacctggataaactccgctttgctgacggtagtatccggacttcagaactgagactctctatgcaaaagagcatgcagaaccacgctgccgtattcagggtggggtccgtgcttcaggagggctgtggaaagatctctaaactgtatggagatctgaaacacctcaagacattcgacagaggaatggtttggaatactgatctggtggaaacactggagctgcagaacttgatgttatgtgcactccagacaatttacggcgcagaagctaggaaggaatctagaggagcacacgccagagaagattacaaagtgagaattgacgaatacgattattcaaaaccaatccagggacaacagaaaaaaccctttgaggagcactggcggaagcacaccctgtcttacgtggacgtcggcaccggcaaagtgaccttggaatacaggcccgtcattgataaaaccttaaacgaggcagactgcgccacagtaccacctgccatacggagttactag

SEQ ID NO: 111612 - DNA, 1560 bp, Artificial Sequence
  derived and/or modified sequence
atgagcggagtgcggggactgtctcgactgttatccgcaaggcggctggctctcgcgaaagcatggccaacggtactgcaaaccggcacccggggatttcatttcacggtggacggaaataagcgcgcaagtgcgaaggtctccgacagtatctccgctcagtaccccgtcgttgatcacgagtttgacgctgtggtggtcggagccggaggcgctggcctcagagccgcatttggattaagcgaagccggttttaatacagcctgtgtgaccaaactcttcccgaccaggagccacacagttgctgcgcaggggggaatcaatgccgctctgggaaatatggaggaggacaattggcgctggcatttctatgacacttctacgggggacggcactgccatgatcaccagagccggactcccatgtcaggaccttgaatttgttcaatttcacccgaccgggatatacggggctggctgcttaattacagaaggatgccgcggtgaggggggaatattgatcaacagtcaaggtgaacgatttatggaacgctacgcacccgttgcaaaggatctggcatcgagagacgtagtgtcacgcagcatgaccctcgaaatccgggaagggaggggatgcggcccagagaaagatcacgtgtacctacaattgcaccacttgccccctgaacagctcgccacacgtttgcctggcatctccgagactgctatgatctttgccggagtggatgtaacaaaggagcccattcccgtgctacccaccgtgcactataatatgggagggattcccacgaactacaaaggccaggtgttaaggcatgtaaacggacaggatcagatcgtgcccggattgtacgcttgcggcgaggccgcttgcgcttctgtccacggtgccaatcgcttgggtgccaactcccttctagatttggttgtgttcggcagggcttgtgctctcagcattgaagagtcttgtcggcctggcgataaggtccccccaatcaagcctaacgcgggagaggaaagcgtgatgaatttggacaagctgcgttttgccgatggctccatccgcacttctgaattacgattaagtatgcagaagtcaatgcaaaatcatgcggctgttttcagggtgggctcagtcctgcaggagggatgcggaaaaatcagtaagctgtatggcgacctgaaacacctgaaaaccttcgacagagggatggtgtggaacacagatctggtggagacactcgagctgcaaaatctgatgctctgcgcacttcagacaatctatggtgccgaagctcgtaaggagagtaggggggctcatgccagagaggattataaggtgaggatcgacgaatacgactattcgaagcctatccagggccaacagaaaaaaccttttgaggaacattggaggaaacacacattgtcctacgtggatgtcggcactgggaaggtaacattagagtacagacctgtcattgacaagactctgaatgaggccgattgtgccaccgtgccgccagccatccggtcatattag

SEQ ID NO: 111613 - DNA, 1886 bp, Artificial Sequence
  derived and/or modified sequence
cgaccccggtgtggtgcgcaggcgcagtctgcgcagggactggcgggactgcgcggcggcaacagcagacatgtcgggggtccggggcctgtcgcggctgctgagcgctcggcgcctggcgctggccaaggcgtggccaacagtgttgcaaacaggaacccgaggttttcacttcactgttgatgggaacaagagggcatctgctaaagtttcagattccatttctgctcagtatccagtagtggatcatgaatttgatgcagtggtggtaggcgctggaggggcaggcttgcgagctgcatttggcctttctgaggcagggtttaatacagcatgtgttaccaagctgtttcctaccaggtcacacactgttgcagcacagggaggaatcaatgctgctctggggaacatggaggaggacaactggaggtggcatttctacgacaccagcactggcgacggcacggccatgatcaccagggcaggccttccttgccaggacctagagtttgttcagttccaccctacaggcatatatggtgctggttgtctcattacggaaggatgtcgtggagagggaggcattctcattaacagtcaaggcgaaaggtttatggagcgatacgcccctgtcgcgaaggacctggcgtctagagatgtggtgtctcggtccatgactctggagatccgagaaggaagaggctgtggccctgagaaagatcacgtctacctgcagctgcaccacctacctccagagcagctggccacgcgcctgcctggcatttcagagacagccatgatcttcgctggcgtggacgtcacgaaggagccgatccctgtcctccccaccgtgcattataacatgggcggcattcccaccaactacaaggggcaggtcctgaggcacgtgaatggccaggatcagattgtgcccggcctgtacgcctgtggggaggccgcctgtgcctcggtacatggtgccaaccgcctcggggcaaactcgctcttggacctggttgtctttggtcgggcatgtgccctgagcatcgaagagtcatgcaggcctggagataaagtccctccaattaaaccaaacgctggggaagaatctgtcatgaatcttgacaaattgagatttgctgatggaagcataagaacatcggaactgcgactcagcatgcagaagtcaatgcaaaatcatgctgccgtgttccgtgtgggaagcgtgttgcaagaaggttgtgggaaaatcagcaagctctatggagacctaaagcacctgaagacgttcgaccggggaatggtctggaacacggacctggtggagaccctggagctgcagaacctgatgctgtgtgcgctgcagaccatctacggagcagaggcacggaaggagtcacggggcgcgcatgccagggaagactacaaggtgcggattgatgagtacgattactccaagcccatccaggggcaacagaagaagccctttgaggagcactggaggaagcacaccctgtcctatgtggacgttggcactgggaaggtcactctggaatatagacccgtgatcgacaaaactttgaacgaggctgactgtgccaccgtcccgccagccattcgctcctactgatgagacaagatgtggtgatgacagaatcagcttttgtaattatgtataatagctcatgcatgtgtccatgtcataactgtcttcatacgcttctgcactctggggaagaaggagtacattgaagggagattggcacctagtggctgggagcttgccaggaacccagtggccagggagcgtggcacttacctttgtcccttgcttcattcttgtgagatgataaaactgggcacagctcttaaataaaatataaatg

SEQ ID NO: 111614 - protein, 1584 aa, Artificial Sequence
  derived and/or modified sequence
MENTGWMGKGHRMTPACPLLLSVILSLRLATAFDPAPSACSALASGVLYGAFSLQDLFPTIASGCSWTLENPDPTKYSLYLRFNRQEQVCAHFAPRLLPLDHYLVNFTCLRPSPEEAVAQAESEVGRPEEEEAEAAAGLELCSGSGPFTFLHFDKNFVQLCLSAEPSEAPRLLAPAALAFRFVEVLLINNNNSSQFTCGVLCRWSEECGRAAGRACGFAQPGCSCPGEAGAGSTTTTSPGPPAAHTLSNALVPGGPAPPAEADLHSGSSNDLFTTEMRYGEEPEEEPKVKTQWPRSADEPGLYMAQTGDPAAEEWSPWSVCSLTCGQGLQVRTRSCVSSPYGTLCSGPLRETRPCNNSATCPVHGVWEEWGSWSLCSRSCGRGSRSRMRTCVPPQHGGKACEGPELQTKLCSMAACPVEGQWLEWGPWGPCSTSCANGTQQRSRKCSVAGPAWATCTGALTDTRECSNLECPATDSKWGPWNAWSLCSKTCDTGWQRRFRMCQATGTQGYPCEGTGEEVKPCSEKRCPAFHEMCRDEYVMLMTWKKAAAGEIIYNKCPPNASGSASRRCLLSAQGVAYWGLPSFARCISHEYRYLYLSLREHLAKGQRMLAGEGMSQVVRSLQELLARRTYYSGDLLFSVDILRNVTDTFKRATYVPSADDVQRFFQVVSFMVDAENKEKWDDAQQVSPGSVHLLRVVEDFIHLVGDALKAFQSSLIVTDNLVISIQREPVSAVSSDITFPMRGRRGMKDWVRHSEDRLFLPKEVLSLSSPGKPATSGAAGSPGRGRGPGTVPPGPGHSHQRLLPADPDESSYFVIGAVLYRTLGLILPPPRPPLAVTSRVMTVTVRPPTQPPAEPLITVELSYIINGTTDPHCASWDYSRADASSGDWDTENCQTLETQAAHTRCQCQHLSTFAVLAQPPKDLTLELAGSPSVPLVIGCAVSCMALLTLLAIYAAFWRFIKSERSIILLNFCLSILASNILILVGQSRVLSKGVCTMTAAFLHFFFLSSFCWVLTEAWQSYLAVIGRMRTRLVRKRFLCLGWGLPALVVAVSVGFTRTKGYGTSSYCWLSLEGGLLYAFVGPAAVIVLVNMLIGIIVFNKLMARDGISDKSKKQRAGSERCPWASLLLPCSACGAVPSPLLSSASARNAMASLWSSCVVLPLLALTWMSAVLAMTDRRSVLFQALFAVFNSAQGFVITAVHCFLRREVQDVVKCQMGVCRADESEDSPDSCKNGQLQILSDFEKDVDLACQTVLFKEVNTCNPSTITGTLSRLSLDEDEEPKSCLVGPEGSLSFSPLPGNILVPMAASPGLGEPPPPQEANPVYMCGEGGLRQLDLTWLRPTEPGSEGDYMVLPRRTLSLQPGGGGGGGEDAPRARPEGTPRRAAKTVAHTEGYPSFLSVDHSGLGLGPAYGSLQNPYGMTFQPPPPTPSARQVPEPGERSRTMPRTVPGSTMKMGSLERKKLRYSDLDFEVMHTRKRHSELYHELNQKFHTFDRYRSQSTAKREKRWSVSSGGAAERSVCTDKPSPGERPSLSQHRRHQSWSTFKSMTLGSLPPKPRERLTLHRAAAWEPTEPPDGDFQTEV

SEQ ID NO: 111615 - DNA, 4755 bp, Artificial Sequence
  derived and/or modified sequence
atggaaaacacaggttggatgggaaagggacatcgaatgactccagcctgccctctgctactgtctgtgatcctaagcctgcgattggctaccgcattcgacccagccccaagcgcctgctctgctctggcctcaggagtcctgtacggcgctttttccctacaggaccttttcccaaccattgcgtctggatgtagttggactcttgagaatcccgaccctactaaatactccctgtacctccgtttcaaccgtcaggagcaggtgtgtgctcactttgctcctcgactgctgccacttgaccactacttagtaaattttacttgcctgagaccctcaccagaagaggccgtcgctcaagctgaatcggaggtaggccgcccagaggaggaggaagccgaagctgccgcgggtctggagttgtgcagcggcagcgggccgtttaccttcttgcattttgataaaaatttcgttcaactgtgtctgagcgccgaaccatctgaggctccccgtttgttggcccccgccgccctggctttccgatttgtggaagtgctgctcattaataataataactcaagccagtttacctgtggagtcctttgccggtggtcggaggagtgcggaagagctgccggacgagcatgtgggtttgctcagccagggtgtagttgcccaggggaggctggggcaggtagcacaaccactacgagcccaggtcctccagccgcacataccctgtcaaacgctcttgtgccaggaggcccagcgcccccagctgaagccgacttgcacagcggaagctccaatgatctgttcacgactgaaatgcggtacggtgaagaaccagaggaggaaccaaaggtcaaaacccaatggccacgcagcgccgatgagcccggcctgtacatggcccagacgggggacccagcagcagaggagtggtccccttggtccgtgtgttcactgacctgtggtcagggcctgcaagtgcggacccggtcatgcgtcagttctccatacggtaccttgtgttccggacctctgagagagacacggccctgtaataacagcgccacatgtcccgtgcatggggtctgggaagagtggggctcatggtcactgtgtagccgctcatgtggacgaggcagtcggtcccggatgcgaacctgcgtcccaccccagcacgggggaaaggcatgtgagggacccgagttacagaccaagctgtgtagtatggcagcttgccccgtggagggtcagtggttggaatgggggccctggggaccttgctcaacatcatgtgcgaatggaactcagcaacggagcaggaagtgctccgtggccgggccagcatgggctacttgtaccggcgcccttactgacacccgcgaatgctctaatcttgaatgcccagctacagatagcaaatgggggccctggaacgcctggagtctttgctcgaagacttgcgataccgggtggcagaggcgatttcggatgtgccaggctactgggacacagggctacccttgcgagggcacgggcgaagaggtgaagccttgtagcgagaagagatgcccagcttttcacgagatgtgtagggacgaatacgtgatgctcatgacgtggaagaaagcagccgctggggagatcatttataacaagtgtcctcccaatgcaagcgggagcgcatcccggaggtgcctcctgagcgcacaaggcgttgcctattggggactaccaagcttcgcaaggtgcattagtcacgagtatcgatatctgtacttgagtctccgagagcatctggcaaagggccagcgtatgctcgcaggggagggtatgtcccaggtggtaagaagcctgcaggagctgctcgcccgtcgaacttactattccggagatctcctgtttagcgtcgatatcctgcgcaacgtcacagacacattcaagagagccacctacgtgccaagtgcagatgacgtgcagaggttttttcaggtggttagcttcatggtagacgccgaaaataaggagaagtgggacgacgcccagcaggtgagtcctggcagtgtgcaccttttgcgcgtagtggaggacttcatccacctggttggagatgccctgaaagccttccagagctctcttatagtcaccgataacctggtaatctccatacagcgcgaaccagtgagtgcagttagcagcgacatcacatttcctatgcgcggtaggagagggatgaaggactgggtcaggcattccgaggaccgactcttcctgccaaaagaagttctcagcttgagcagccctggaaaacctgcaacttctggggcagcgggatcacccggacgaggtcgcggcccagggacggtccctcccgggcccggccatagccaccaaagactgttgcctgccgacccagatgaatcttcctatttcgtgattggggccgtcctctaccggaccctgggtcttattctccccccccctcgtccaccccttgctgttacgagcagagtgatgaccgtaactgtccgcccccctacacagcccccagcagagccactcattaccgtggaactatcgtacatcataaatggtacaaccgacccccactgtgcctcatgggactatagcagagcagatgctagcagtggagattgggacaccgagaactgtcagacactggaaactcaggcagctcacacccgctgtcagtgtcagcacctgtctacctttgctgtgttggcacagccacccaaagacttaacactcgaacttgcgggctcaccatctgtccctctggtgataggctgcgctgtgtcctgcatggccctcttgactctgctggccatttatgctgccttttggcgctttattaaaagtgagcggtctataatcctgctgaacttctgcctgtccattttagcgtcaaatattcttattctcgtgggccaatctagggtcctgtctaaaggcgtctgcactatgaccgctgcctttctgcacttcttctttcttagttccttttgttgggtcctgacagaagcctggcagagctacctggccgtaatcggccgtatgagaacgaggctggtgcgtaaacggtttttgtgtctgggctggggcttgcctgcactggtagttgccgtgtctgtcggatttactcgtactaagggatacgggactagctcatactgttggctcagtctcgagggcggactcttgtacgcattcgttgggccggctgctgtgattgttctggtgaatatgttgattggtatcattgtatttaacaagcttatggccagggatgggatctctgataaatcgaaaaagcagagagcaggctccgagcggtgtccttgggcaagtctcctccttccttgcagtgcgtgtggtgctgttccatcccccctgctttccagcgcctcagctaggaatgcaatggcgagcctctggtcgtcgtgtgtagtcctgccactgctggccctaacctggatgagcgctgtcctggccatgaccgaccggcgttcggtgctgttccaggcactcttcgctgtgtttaattccgcccagggattcgtgattaccgccgtccactgtttcctacgtcgggaagtgcaggatgtagtcaaatgtcagatgggtgtctgtcgcgccgacgagtcagaagattcaccagactcctgtaagaatggacagttgcagatattgtcagattttgagaaggatgtggacctcgcatgccagactgtgctctttaaagaagtcaacacttgcaacccgtctaccattaccggaaccctctcacggctgtccctcgacgaggatgaggagcccaagagctgtctcgtgggcccggaaggatcactgtcatttagtccattgcctggcaatatcctagtgcctatggctgcctctccggggctgggcgagccccctcctccccaagaggctaatcctgtctatatgtgtggtgaagggggactgcgccaactagacctgacctggctgcggcccactgagcccgggtccgagggggactacatggtactgccaaggagaactttatccctgcaacctgggggaggaggcggaggaggagaagacgctccgagagctcggccggaaggaacccctcgaagggccgccaaaacagttgcgcataccgagggctacccctcattcctgagtgtagatcattctggactggggctcggaccggcctacggttcattgcaaaacccatacgggatgacttttcaaccgcccccccccacaccatcggcccgacaggtgcctgaacccggtgagcggtccaggaccatgccccgtactgttcccgggtccaccatgaagatgggttctctggagaggaagaaactcaggtactccgatctggactttgaggtcatgcatacacgtaagcgacattctgagctgtatcacgagctcaatcagaaattccatacatttgacagatataggagccagagcacggctaaacgggagaaaagatggagtgtgtcctctggaggtgcggctgagaggtcggtgtgcactgacaagccctcaccaggagagcggccctccctctcccagcatcgacggcaccagtcttggtcgaccttcaaatccatgacacttggcagcctcccaccgaaacctcgcgagagactgactctgcaccgtgcagctgcttgggagccgactgaaccccccgacggcgattttcaaacagaagtgtag

SEQ ID NO: 111616 - DNA, 4755 bp, Artificial Sequence
  derived and/or modified sequence
atggagaacacaggctggatgggcaagggccacaggatgaccccagcctgccccctgctgctgagcgtcatcctgagcctgcggctggccacagcctttgatcctgcccccagcgcctgcagcgccctggccagcggcgtgctgtatggagccttcagcctgcaggacctcttccccaccatcgccagcggctgctcctggaccctggagaacccagaccccaccaagtacagcctgtacctgcgcttcaaccggcaggagcaggtgtgtgcccactttgccccccggctgctgcccctggaccactacctggtgaacttcacctgcctgcggcccagccctgaggaggccgtggcccaggccgagagcgaggtgggccggcctgaggaggaggaggccgaggccgctgctggcctggagctgtgcagcggcagcggccccttcaccttcctgcactttgacaagaactttgtgcagctgtgcctgtctgctgagcccagcgaggccccccggctgctggccccagctgccctggccttccgctttgtggaggtgctgctgatcaacaacaacaacagcagccagttcacctgtggggtgctgtgccgctggagcgaagaatgtggccgggccgccggccgggcctgtggctttgcccagcccggctgcagctgccctggagaggccggggccggcagcaccaccaccaccagccctggccccccagctgcccacaccctgagcaatgccctggtgcctgggggccctgcccccccagctgaggccgacctgcacagcggcagcagcaatgacctcttcaccacagagatgagatatggagaggagcctgaggaggagcccaaggtgaagacccagtggcccaggtctgcagatgagcccggcctgtacatggcccagacaggagaccctgctgctgaggagtggagcccctggagcgtgtgcagcctgacctgtggccagggcctgcaggtgaggaccaggagctgtgtgagcagcccctacggcaccctgtgcagcggccccctgcgggagacccggccctgcaacaacagcgccacctgccctgtgcacggcgtgtgggaggagtggggctcctggagcctgtgcagccgcagctgtggccggggcagccgcagcaggatgaggacctgtgtgcccccccagcacggcggcaaggcctgtgagggccctgagctgcagaccaagctgtgcagcatggccgcctgccctgtggagggccagtggctggagtggggcccctggggcccctgcagcaccagctgtgccaacggcacccagcagaggagcaggaaatgttctgtggccggccctgcctgggccacctgcacaggagccctgacagacaccagagaatgtagcaacctggagtgcccagccacagacagcaagtggggcccctggaatgcctggagcctgtgcagcaagacctgtgacaccggctggcagaggcgcttcaggatgtgccaggccaccggcacccagggctacccctgtgagggcactggagaggaggtgaagccctgcagcgagaagcgctgcccagccttccacgagatgtgcagagatgaatatgtgatgctgatgacctggaagaaggctgctgctggggagatcatctacaacaagtgccccccaaatgccagcggcagcgccagccgccgctgcctgctgagcgcccagggcgtggcctactggggcctgcccagctttgcccgctgcatcagccatgagtaccgctacctgtacctgagcctgcgggagcacctggccaagggccagaggatgctggccggggagggcatgagccaggtggtgcgcagcctgcaggagctgctggcccggaggacctactacagcggggacctgctcttctctgtggacatcctgagaaatgtgacagacaccttcaagagggccacctacgtgcccagcgcagatgatgtgcagcgcttcttccaggtggtgtccttcatggtggatgctgagaacaaggagaagtgggatgatgcccagcaggtgtccccaggctctgtgcacctgctgcgggtggtggaggacttcatccacctggtgggagatgccctgaaggccttccagagcagcctgattgtgacagacaacctggtgatcagcatccagcgggagcctgtgtctgctgtgtccagtgacatcaccttccccatgagaggaagaagaggcatgaaggactgggtgcgccacagcgaggacaggctcttcctgcccaaggaggtgctgagcctgagcagccctgggaagccagccaccagcggggccgccggcagccctggccggggccggggccctggcaccgtgcccccaggccctggccacagccaccagaggctgctgcctgctgaccctgatgagagcagctacttcgtcatcggggctgtgctgtaccgcaccctgggcctcatcctgcccccacccaggcctcccctggccgtgaccagccgggtgatgacagtgacagtgcggccccccacccagcccccagctgagcccctcatcaccgtggagctgagctacatcatcaatggcaccacagacccccactgtgcctcctgggactacagcagagcagatgccagcagcggggactgggacacagagaactgccagaccctggagacccaggccgcccacacccgctgccagtgccagcacctgagcacctttgctgtgctggcccagccccccaaggacctgaccctggagctggccggcagccccagcgtgcccctggtgattggctgtgctgtgtcctgcatggccctgctgaccctgctggccatctatgctgccttctggaggttcatcaagtctgagaggagcatcatcctgctgaacttctgcctgagcatcctggccagcaacatcctgatcctggtgggccagagccgggtgctgagcaaaggagtgtgcaccatgacagctgccttcctgcacttcttcttcctgagcagcttctgctgggtgctgacagaggcctggcagagctacctggccgtcatcggccgcatgaggacccggctggtgaggaagcgcttcctgtgcctgggctggggcctgcctgccctggtggtggccgtgtctgtgggcttcaccaggaccaagggctacggcaccagcagctactgctggctgagcctggagggcggcctgctgtatgcctttgtgggccctgctgctgtgattgtgctggtgaacatgctgattggcatcatcgtgttcaacaagctgatggccagagatggcatcagtgacaagagcaagaagcagagagctggcagcgagcgctgcccctgggccagcctgctgctgccctgcagcgcctgtggggctgtgcccagccccctgctgagcagcgccagcgccagaaatgccatggccagcctgtggagcagctgtgtggtgctgcccctgctggccctgacctggatgtctgctgtgctggccatgacagaccggcgctctgtgctcttccaggccctgtttgctgtgttcaacagcgcccagggcttcgtcatcacagctgtgcactgcttcctgcggcgggaggtgcaggatgtggtgaagtgccagatgggcgtgtgcagagcagatgaaagtgaggacagcccagacagctgcaagaatggccagctgcagatcctgagtgactttgagaaggatgtggacctggcctgccagacagtgctcttcaaggaggtgaacacctgcaaccccagcaccatcaccggcaccctgagccggctgagcctggatgaagatgaggagcccaagagctgcctggtgggccctgagggcagcctgtccttcagccccctgcccggcaacatcctggtgcccatggccgccagccctggcctgggggagcccccaccaccccaggaggccaaccctgtgtacatgtgtggggagggcggcctgcggcagctggacctgacctggctgcggcccacagagcccggcagcgagggggactacatggtgctgcccaggaggaccctgagcctgcagcccggcggcggcggcggcggcggagaagatgccccccgggcccggcctgagggcaccccaagaagagctgccaagacagtggcccacacagagggctaccccagcttcctgtctgtggaccacagcggcctgggcctgggccctgcctacggcagcctgcagaacccctacggcatgaccttccagcccccaccacccaccccatctgcccggcaggtgcctgagcccggggagaggagcaggaccatgcccaggacagtgcccggcagcaccatgaagatgggcagcctggagaggaagaagctgcgctacagcgacctggactttgaggtgatgcacaccaggaagaggcacagcgagctgtaccacgagctgaaccagaagttccacacctttgaccgctaccgcagccagagcacagccaagcgggagaagcgctggagcgtgtcctctggaggagctgctgagaggtctgtgtgcacagacaagcccagccctggagagcggcccagcctgagccagcaccggcggcaccagagctggagcaccttcaagtccatgaccctgggcagcctgccccccaagccccgggagcggctgaccctgcacagagctgctgcctgggagcccacagagcccccagatggagacttccagacagaggtgtag

SEQ ID NO: 111617 - DNA, 4755 bp, Artificial Sequence
  derived and/or modified sequence
atggagaacaccggctggatgggcaagggccaccggatgacccccgcctgccccctgcttctttcggtgattctgagtctgagactggccacagcattcgaccccgccccatctgcctgcagtgccctggcctctggcgtactgtacggcgctttcagcttgcaggacctgtttcccacaattgccagtggatgttcctggactctggagaaccccgaccctactaagtacagcctgtacctgcggttcaatcggcaagagcaggtgtgcgctcatttcgccccgcggctgctacctctggatcattatctggttaactttacttgtctgcggccttcaccggaggaggccgtcgcacaggcagaaagcgaggtgggacggccagaggaggaggaagccgaagcagcggcaggcttggagctttgcagtgggtctggccctttcaccttccttcactttgataagaattttgtacagctgtgtttaagtgccgagccttcggaggctccgcgattgctcgcccctgcagccctcgccttccggttcgttgaggtgttattgatcaataataacaacagcagccagttcacctgcggggttctttgcaggtggagcgaagaatgtgggcgggctgccgggagggcatgcggctttgcccagcctggctgctcatgtcctggagaagccggggctgggtccactaccaccaccagccctggccctcccgcagcacacacactgtccaacgccctggtacctggaggtccagctccccccgcggaggcagaccttcattctggttcaagcaatgatttatttaccactgagatgcgttacggcgaggagcccgaggaagagcctaaggtcaaaactcaatggccacgttcagccgacgaaccaggactgtatatggcccagaccggagacccggctgccgaagagtggtctccatggagcgtttgcagcctgacttgcggccaaggactccaggtgaggacccgtagctgcgtctccagtccatatggaacgctgtgttctggacccctcagagagacccgaccttgcaacaacagtgccacctgccccgtgcacggagtttgggaggagtggggcagttggagtctctgctcaaggtcatgtgggagagggtctaggagccgcatgcgcacatgtgtgcccccccaacatggcgggaaagcatgtgagggcccagaactccagactaaactgtgcagtatggccgcatgtccggtggagggccagtggctggaatggggaccgtggggcccatgttccaccagctgtgccaacggaactcagcagaggagccgcaaatgctcggtggctgggcctgcctgggctacctgcactggggcgttgaccgatacacgggagtgctcgaatctggaatgccctgcaaccgattcaaagtggggcccatggaacgcttggagtctatgctcaaagacctgcgataccgggtggcagcggcggttcaggatgtgccaggccaccggaacccagggctacccctgtgagggaacaggtgaggaggtcaaaccttgcagcgaaaaaagatgtcctgccttccacgagatgtgcagagacgagtacgtgatgttaatgacatggaagaaggcagcagccggcgagattatttataacaagtgtccacctaatgcatccggctctgccagccgccggtgcctgttgagcgcccagggggttgcttattggggcttacccagtttcgcccgctgtatttcacatgagtaccgctacctgtatctgagcctgcgagagcacctggctaaggggcaaaggatgctggcaggggagggcatgagccaggtcgtgcgcagtcttcaggagttgctggcgcgccggacctactactcaggggatctgctcttctctgtggatattttaagaaacgtcacagacaccttcaaacgggctacttacgttccatctgctgatgacgtgcaaagatttttccaagtcgtttcctttatggtcgatgcggaaaacaaggagaaatgggatgacgcacaacaggtcagccctgggtcggttcacctcctccgggtggtcgaggactttatccacctggtgggggatgcattgaaggcgttccagagtagcctgatcgtgacagataatctggtaatctccattcagcgcgagcctgtgagcgccgtgagttccgatataactttcccaatgcgaggcagacgggggatgaaagactgggtacgccattcagaagacagattatttttaccaaaggaggtacttagtctttctagccctgggaagccagcaactagtggggctgctggcagcccaggacgcggtcggggtcctggtactgtgcccccgggaccaggtcactcgcaccaaaggttactacctgccgaccctgatgaatctagttacttcgtaatcggagccgtattatacaggactttaggactcatcctgcctccaccaaggcccccgctggcagtcacaagtcgcgtaatgacagtcactgtcagaccacctacgcagccccctgctgaaccactgatcactgtcgaactcagctacattatcaatggaaccaccgatccacattgtgcgagctgggattacagtcgtgctgatgcatccagtggagactgggacactgagaactgccagaccctggagactcaggccgcccatactagatgccagtgccagcatctgagcacttttgcagtcctagcccagccaccgaaagacctgaccctcgaactggcaggatccccctcagtcccactcgtgattggctgcgccgtgtcatgtatggccctgttaaccctcttagctatatacgcagcattctggagatttattaaatcagagagatcaatcatcttgctgaatttttgtttatccatcctcgctagtaacattctgatccttgtgggacaatcacgagtgctatccaagggcgtctgtaccatgacagcagctttcctgcattttttttttctcagcagcttctgttgggtgcttacagaggcttggcagagttatctggccgtaatcggtcgcatgcggacacggttggtgcgcaaaagattcctctgccttggctggggcctgcccgccctggtagtcgcggttagcgtgggcttcacccgcactaagggttacggtactagctcctattgctggctgagtttagaaggaggtctgctgtatgccttcgtgggtccagctgcggtcatagtgttagtgaacatgctcattgggataattgtgtttaacaaattaatggcaagggatggcatctccgacaagtctaagaagcagagagcaggctccgagagatgcccgtgggccagcctgctcctaccttgcagcgcatgcggggccgtcccatcgcctcttctcagttctgccagcgctcgaaatgccatggccagcttgtggtccagctgtgtggtgcttcctttactggctctaacttggatgtccgctgtgcttgcgatgaccgacagaaggtctgtgttgttccaagcactgtttgccgtcttcaactctgcccagggcttcgtaataacagctgtgcactgctttctgcgccgtgaggtgcaggatgtcgttaaatgtcagatgggcgtatgtagagctgatgagagtgaggatagccccgactcctgtaaaaacggacagttgcagatcctgtctgactttgagaaggatgtggacttagcctgtcaaacagtgctattcaaggaagtgaatacgtgcaacccaagcacaatcaccggaaccttgagccgcttatcattggatgaagacgaggaaccaaaaagctgcttagtgggccctgaagggtctctgtcctttagcccactgcccggtaatattttggtgccgatggccgccagtcctggtctaggagagccacctccccctcaggaagccaaccctgtttacatgtgcggggaggggggactaaggcagttggatctgacctggttacgccccaccgaacccggatctgaaggcgattatatggttcttccccgccgaacgctcagcttgcaacctggaggcgggggtggaggcggtgaggacgccccccgtgctagacccgagggcaccccccgtcgcgccgctaaaaccgtcgctcatactgaggggtatccatcttttctgtcagtagatcattctggattaggcctgggtccagcatatggaagccttcagaacccatacgggatgactttccagccccctccccctactccatcagcccgccaagtcccggaaccaggtgaacggagccgcactatgcctagaaccgtgcccggctctactatgaagatgggctcgctggaaagaaagaagctgcgctattcagatctggactttgaagtgatgcatacaagaaagagacatagcgagttatatcacgagctcaatcagaagttccataccttcgaccggtatagatcacaatcgacagccaagagggagaagcgctggagcgtgtcaagcggaggcgccgccgagaggagcgtgtgtactgataagccttctcccggcgagcgcccatcactctctcaacaccggcggcatcaaagctggagcacgtttaaaagcatgactctaggctcgttaccccctaagccaagagagaggttgactctgcaccgggccgccgcttgggaaccgaccgaaccacctgacggggattttcaaactgaagtgtag

SEQ ID NO: 111618 - DNA, 4755 bp, Artificial Sequence
  derived and/or modified sequence
atggagaatactggctggatgggaaagggccaccgcatgacccccgcatgccctctcttgctttctgttattctgtccctcagacttgcgactgcgtttgatcccgctccctcagcatgtagcgcactcgcctccggagttctgtacggcgcatttagtctccaagacctgttccccacgatcgcatccgggtgctcttggacactcgagaatcccgaccctacgaagtacagcttatacttgcgctttaacagacaggagcaggtttgcgctcacttcgctcccagactccttccgttagatcactatctggtgaactttacctgtctgagaccgagtccagaagaagcagtggctcaggcggagtccgaagtgggcaggccagaagaggaagaagcggaagcagccgctgggctggagctttgctccggcagcggtccttttacctttctgcacttcgataaaaatttcgttcaactctgcttaagcgcagagccctcagaagccccaaggttattggcaccagcagcattggctttcagatttgtcgaagtactgcttataaacaacaataacagctcccagttcacttgcggtgtgttatgccggtggagcgaggaatgcggaagggcagccggacgcgcatgtggcttcgcccagcccggttgttcatgtcccggagaggcgggagccggatcaaccacaactacttctcctgggcctccagctgcccataccctgtccaacgctctggtgccaggcggacccgcaccaccggcagaggctgacctgcactctggttcttctaatgatctgttcacaactgagatgcgatacggcgaggagcccgaagaggagcccaaagtgaaaacccagtggccccgtagtgccgacgaacccggactatacatggcccagacaggagacccggcagctgaggagtggtccccctggagcgtgtgctcactcacttgtggccagggactccaggtgcgcacccgttcgtgcgtctctagcccttatggcaccctgtgcagtggacccctcagagagactagaccgtgcaataacagtgccacctgtcccgttcacggggtgtgggaagaatggggtagttggtctctgtgtagtcggtcgtgtggtcgaggaagtcgctcacggatgaggacttgcgtacctccacagcacggcggaaaagcttgtgaaggccctgagttgcaaaccaagctctgttcaatggcggcttgccctgttgaaggccaatggctggagtggggaccgtggggcccatgcagcacatcctgtgccaacggcacacagcaaagatccagaaagtgctcagtggctggtcccgcatgggctacttgcaccggggctcttactgacacaagagagtgctcaaacctcgaatgtcccgctacagactccaagtggggcccatggaatgcttggtcactatgtagtaaaacctgtgatacgggatggcaacggaggttccgcatgtgccaagccaccggcacacagggctatccctgcgaaggtaccggagaggaagtaaagccttgtagcgagaagaggtgccctgcattccatgaaatgtgtagggatgaatacgttatgctgatgacatggaagaaagcagctgctggcgagatcatctacaataagtgtccccctaatgctagcggcagtgccagcaggagatgtcttctgtccgcacagggcgtggcttattgggggctgcccagtttcgctcgctgtatctctcatgaatatcgctacttgtacctgagtctgagggagcacttggctaaggggcagcgaatgctggccggagaggggatgagccaggtggtccggtcactccaggaactgctggcgagaagaacatactattccggcgacctgttattttctgtggatattctgcggaatgtgacagatacctttaaaagagccacctatgtcccaagcgccgacgacgtgcagcgcttcttccaggttgtgtcatttatggtggatgctgaaaacaaggaaaaatgggatgatgctcaacaggtgagtccgggttctgtccacctgctgcgtgttgtagaggattttatccatctcgttggcgatgctctcaaggctttccagtcttcactcattgtgacagataatctcgtcatcagcatccagcgcgagcccgtgagtgcggtttcatccgatataacgttccccatgagagggaggaggggtatgaaagattgggtcaggcattccgaggaccgcctgttcctaccaaaagaggtgctgtcactttccagcccgggtaagcccgctacttcaggtgccgcaggctccccagggaggggaagggggcctggtaccgttccacccggacccggtcattctcaccagcggttattacctgcggatccagacgagagcagttacttcgtcattggggcagtgctataccgcacactgggcctgatcttgccaccacccagaccgccactggcagttacctctagggttatgaccgtcacagttcgccctcccactcagcccccagcggagcccctcattaccgtggagttatcctatattataaacgggacgactgatccacactgcgcaagctgggactattctagggcggacgcatcttccggtgattgggatacagagaactgtcagaccctggagacccaggcggctcatactaggtgccaatgccagcacctgtctacctttgccgtgcttgcgcagccccctaaggatcttactctggagctggctggatcccctagcgtccctttagtcataggatgtgcagtatcctgcatggctctcctcaccctgttagccatctacgccgcattctggcgttttatcaagtcagagaggtcaatcatcctgttgaacttctgtctctctatccttgcatccaatattctcatccttgttggacaaagccgggtgctgagcaaaggtgtgtgcacgatgaccgctgccttcctgcacttctttttcctgagttccttctgctgggtactgaccgaggcgtggcagtcttatctcgctgtcatcggcagaatgcggacgcgcttagttcggaaacgttttctttgtctcgggtggggtttgcccgcattagttgtggctgtgtcagtgggttttacacgtacaaagggctatggaacaagctcatactgttggctttccttggaaggtggattactctatgcattcgtgggacccgcagctgtaattgttctggtcaatatgctgatcggaatcatcgtattcaacaagctcatggcacgcgacggcataagcgacaagagtaagaaacagcgcgctggatctgaacgttgcccctgggccagcctgctcctcccctgcagcgcctgtggcgcagtgccgtccccactcctgtcttcagcctccgccagaaacgctatggctagcttgtggtctagctgtgttgtcctcccactcctggcactaacatggatgtcagcagttctggctatgacagaccggagaagtgtactgtttcaagctttgttcgcggtgtttaactccgcccagggcttcgtgatcaccgccgtccattgcttcctgcgtcgggaggttcaggatgttgtcaagtgtcagatgggcgtttgcagggcagacgaatccgaggacagcccagatagctgtaagaatggtcagctccaaatactctccgattttgaaaaggacgtggatctggcatgtcagaccgtcttattcaaggaggtgaacacatgtaatccatccactattaccggaaccttgagtcgcttgtccttagacgaggacgaggagcccaagtcctgtctggtcgggcctgagggttccctgagtttcagtcccctgcccggtaacattcttgtgcctatggcagccagtccgggactcggggaaccgccacccccacaggaagcaaacccagtgtacatgtgtggagaagggggtctccgacagctggacctaacatggctgagaccgactgaacctggctcagagggggactacatggtactccctcgcaggaccctctccctccagcccggaggaggcggtggcggaggggaagatgcccctagagcaagacctgagggcaccccacgtcgggctgccaaaaccgttgcccatactgaggggtacccatctttcctttctgtggatcactccggcttaggcctcggtccagcttacggttctctgcagaacccatatggtatgactttccagcctcctccccctaccccatcggccagacaggtgcctgaaccaggcgaaagaagtcgcacaatgccacggaccgtgccaggctccacaatgaaaatggggtcactggaacgaaagaaactgcgctattccgaccttgacttcgaagttatgcacaccagaaagcggcactcagagctctatcatgaactcaaccagaaatttcacacatttgaccgttacaggtcacaatctaccgcaaaacgtgaaaagagatggagtgtctcttcggggggagctgcggagcgttccgtgtgcaccgataagccctctccaggcgaacgaccctcattatcccagcacagaaggcaccagtcatggtcaacttttaagtcaatgacattgggttcactgccacctaaacccagggaaaggcttacattgcacagggccgcagcctgggaaccaaccgaacctcctgatggagacttccagaccgaagtttag

SEQ ID NO: 111619 - DNA, 5400 bp, Artificial Sequence
  derived and/or modified sequence
gccgcccgggagagcgggagcctcggccctccgcgcggctgcagctacctaccctgcgcccggcccggtccccgacttagggatggcaaacttgcgccccgtggccgcccccgccagcgccggcccccgctcctgctgctgacggcgcccaggaaatccacagcagtgatacatgtgacgtccacactgacagtgccctcctgtgggcatggctcaggttgtgcgcagttcctggcacactggctgtaactccgcccctttctctccctctcagtaaagcaagattacgcggtgacatgcctcacagctgatcacgacacacggggatggagagcaagagttatggagaatacaggttggatgggcaagggacataggatgaccccagcctgtcccctcttactgtctgtgattctgtccctgcgcctggccaccgccttcgaccccgcccccagtgcctgctctgccctggcctcgggtgtgctctacggggccttctcgctgcaggacctctttcctaccatcgcctcgggctgctcctggaccctggagaaccctgaccccaccaagtactccctctacctgcgcttcaaccgccaggagcaggtgtgcgcacactttgccccccgcctgctgcccctggaccactacctggtcaactttacctgcctgcggcctagccccgaggaggcggtggcccaggcggagtcagaggtggggcggccagaagaggaggaggcagaggcggcagcggggttggagctgtgcagcggctcaggcccctttaccttcctgcacttcgacaagaacttcgtgcagctgtgcctgtcggctgagccctccgaggccccgcgcctgctggcgcccgctgccctagccttccgctttgtcgaggtcttgctcatcaacaacaacaactctagccaattcacctgtggtgtgctctgccgctggagtgaggagtgtggccgcgctgccggcagggcctgcggctttgctcagccaggctgcagctgccctggagaggcgggggccggctccaccaccaccacatctccaggccctcctgctgcccacaccctgtccaatgccctggtgcccgggggcccagccccacctgctgaggccgatttgcactcggggagcagcaatgatctgttcacaaccgagatgagatatggtgaggagccggaagaggaaccgaaagtgaaaacccagtggccgaggtctgcagatgagcctgggctatacatggcgcagacaggcgacccggcggctgaggagtggtccccgtggagcgtgtgttccctgacgtgtgggcagggtctgcaggtgcggacccgctcctgtgtgtcctccccctatgggaccctgtgcagcgggcccctgcgggagaccaggccctgcaacaattcagccacctgcccagtgcacggcgtgtgggaggagtgggggtcctggagcctgtgctcccgcagctgcgggcgggggtcccggagccggatgcggacctgcgtgcccccccagcacggcggcaaggcctgcgagggtcctgagctgcagactaagctctgcagtatggctgcctgcccggtggaaggccagtggttagaatggggtccctggggcccatgctccacgtcctgtgccaatgggacccaacagcgcagccggaagtgcagcgtggcgggcccagcctgggccacatgcacgggtgccctcactgacacccgggagtgcagcaacctcgagtgcccggccactgatagcaagtgggggccatggaatgcgtggagcctgtgctctaagacgtgtgacacaggctggcagcgccgcttccgcatgtgccaggccacgggcacgcagggctacccctgcgagggcaccggagaggaggtgaagccttgtagtgagaagaggtgtccagccttccatgagatgtgcagggatgagtacgtgatgctgatgacgtggaagaaggcagctgctggcgagatcatctacaacaagtgccccccgaatgcctcagggtctgccagccgccgctgtctcctcagtgcccaaggcgtggcgtactgggggctgcccagctttgctcgctgcatctcccatgagtaccgctacctgtatctgtcacttagggagcacctggccaaggggcagcgcatgctggcaggcgagggcatgtcgcaggtggtgcgcagcctgcaggagctactggcccggcgcacctactatagtggggacctgctcttctctgtggacattctgaggaatgtcactgacacctttaagagggccacctacgtgccctcggctgatgatgtgcagcgcttcttccaggtggtgagcttcatggtggatgcggaaaacaaggagaagtgggacgatgctcagcaggtgtcccctggctctgtgcacctgctccgtgtcgtggaggacttcattcacctggtgggcgatgctctcaaggccttccagagctctctgattgtcacagataatctagtgatcagcattcagcgagagcccgtctcagctgtgtccagtgacatcacgttccccatgcggggccgccggggcatgaaggactgggtgcggcactcagaggaccgcctcttcctgcccaaggaggtgctcagcctctcctccccagggaagccagccacatctggggcagcaggcagccctggcagggggaggggcccaggaacggtgcctcctggcccaggccactcccaccagcgcctcctcccagcagaccctgatgagtcctcctactttgtgatcggtgctgtactctaccgcacccttggcctcatcctgccgcctcccaggcccccgctggccgtcacatcccgggtgatgacagtgactgtgcgcccccctacccagcctccagctgagcccctcatcactgtggagctctcctacatcatcaatgggaccacggatccccattgcgccagctgggactactccagagcagatgccagctcaggagactgggacactgaaaattgccagaccctggagacccaggcagctcacacccgctgccagtgccagcacctgtccacctttgctgtactagcccagccgcccaaggacctgaccctggagctggcgggctccccctcggtccccctggtgatcggctgtgcagtgtcgtgcatggcgctgctcaccctgctcgccatctatgccgccttttggaggttcataaaatctgaacgctccatcatcttgctgaacttctgcctgtccatcttggcatccaacatcctgatcctcgtgggccagtcccgggtgctgagcaagggcgtgtgcaccatgacggctgccttcctgcacttcttctttctctcctccttttgctgggtgcttaccgaggcctggcagtcctacctggctgtcattgggcggatgcgcacccgcctcgttcgcaagcgcttcctctgcctgggctggggtctgcctgccctggtggtggccgtgtctgttggctttacccgaacgaaaggatacggtacatccagctactgctggctctccctggagggcggcctgctctacgcctttgtgggccctgcagccgtcattgtcctggtgaacatgctcatcggaatcatcgtcttcaacaagctcatggcacgtgatggcatctccgacaaatccaagaagcagagggccgggtcggagcggtgcccctgggccagcctgctcctcccctgctcagcgtgtggagcggtccccagccccctgctcagctcagcctcggccaggaacgccatggcctcactctggagctcctgcgtggtgctgcccctgctggcgctcacctggatgtctgccgtcctggctatgacagaccgccgttccgtcctcttccaggccctctttgctgtcttcaactccgcgcagggctttgtcatcactgctgtgcactgcttcctgcgccgagaggtccaggatgtggtgaagtgccagatgggggtgtgccgggctgatgagagcgaagactcccctgactcgtgtaagaacgggcagctgcagatcctgtcagactttgaaaaggatgtggatctggcttgtcaaacagtgctgttcaaggaggtcaacacttgcaacccgtccaccatcacgggcacactatcccgcctgtccctggatgaggatgaggagcccaagtcctgcctcgtgggccctgagggcagcctcagcttctcaccactgcctgggaatatcctggtgcccatggcagcctcaccagggctgggggagcctccgcccccacaggaggccaaccctgtttacatgtgtggggagggtggcctgcggcagctggacctcacatggctgcggcccactgagccaggctctgagggagactacatggtgctgccccggcggactttgagcctgcagcctggcggtgggggtggaggtggtgaggatgcccccagggcccggccggaggggaccccccggcgagctgccaagacagtggcccacactgaaggctaccccagcttcctgtccgtggaccactcgggcctggggctgggccctgcctatggatctctccagaatccctatggaatgaccttccaaccgccaccgccgacacccagcgcccgccaagtgcccgagccaggggagcgcagccggaccatgcctcgcaccgtgcccggctctaccatgaagatgggctccctggagcgaaagaaattacggtattcagacctggactttgaggtgatgcacacccggaaacggcattcagaactctaccacgagctcaaccagaagttccacactttcgaccgctaccgcagccagtccacggccaagagggagaagcggtggagtgtgtcctcgggtggggcagccgagcggagcgtgtgcaccgataagcccagccctggggagcgccccagcttgtcccaacatcggcgccatcagagctggagcaccttcaaatctatgacactgggctcgctgccccccaagccccgagaacggctgactctgcaccgggcagcagcctgggagcccacagaaccaccggatggtgacttccagacagaggtgtgagtgccacgctggactgcccactgcatataaatatatatatctctctattttcacactccactttggaactacccaggagccagcgccctctcccctctcccgagggctgggcagggaggcgccgtggactcagccaggctgggggagccggacatggcttggcctggggtcccagggcccttccttgtttctcagaggcccctcagccactggaaccccatcttcagcccagcctgtccgtccctgtcccgggctggggaggggggaggggaactttgttgggaataaacttcactctgtgga

SEQ ID NO: 111620 - DNA, 4755 bp, Artificial Sequence
  derived and/or modified sequence
atggagaacaccggctggatgggcaagggccacagaatgacccccgcctgccccctgctgctgagcgtgatcctgagcctgagactggccaccgccttcgaccccgcccccagcgcctgcagcgccctggccagcggcgtgctgtacggcgccttcagcctgcaggacctgttccccaccatcgccagcggctgcagctggaccctggagaaccccgaccccaccaagtacagcctgtacctgagattcaacagacaggagcaggtgtgcgcccacttcgcccccagactgctgcccctggaccactacctggtgaacttcacctgcctgagacccagccccgaggaggccgtggcccaggccgagagcgaggtgggcagacccgaggaggaggaggccgaggccgccgccggcctggagctgtgcagcggcagcggccccttcaccttcctgcacttcgacaagaacttcgtgcagctgtgcctgagcgccgagcccagcgaggcccccagactgctggcccccgccgccctggccttcagattcgtggaggtgctgctgatcaacaacaacaacagcagccagttcacctgcggcgtgctgtgcagatggagcgaggagtgcggcagagccgccggcagagcctgcggcttcgcccagcccggctgcagctgccccggcgaggccggcgccggcagcaccaccaccaccagccccggcccccccgccgcccacaccctgagcaacgccctggtgcccggcggccccgccccccccgccgaggccgacctgcacagcggcagcagcaacgacctgttcaccaccgagatgagatacggcgaggagcccgaggaggagcccaaggtgaagacccagtggcccagaagcgccgacgagcccggcctgtacatggcccagaccggcgaccccgccgccgaggagtggagcccctggagcgtgtgcagcctgacctgcggccagggcctgcaggtgagaaccagaagctgcgtgagcagcccctacggcaccctgtgcagcggccccctgagagagaccagaccctgcaacaacagcgccacctgccccgtgcacggcgtgtgggaggagtggggcagctggagcctgtgcagcagaagctgcggcagaggcagcagaagcagaatgagaacctgcgtgcccccccagcacggcggcaaggcctgcgagggccccgagctgcagaccaagctgtgcagcatggccgcctgccccgtggagggccagtggctggagtggggcccctggggcccctgcagcaccagctgcgccaacggcacccagcagagaagcagaaagtgcagcgtggccggccccgcctgggccacctgcaccggcgccctgaccgacaccagagagtgcagcaacctggagtgccccgccaccgacagcaagtggggcccctggaacgcctggagcctgtgcagcaagacctgcgacaccggctggcagagaagattcagaatgtgccaggccaccggcacccagggctacccctgcgagggcaccggcgaggaggtgaagccctgcagcgagaagagatgccccgccttccacgagatgtgcagagacgagtacgtgatgctgatgacctggaagaaggccgccgccggcgagatcatctacaacaagtgcccccccaacgccagcggcagcgccagcagaagatgcctgctgagcgcccagggcgtggcctactggggcctgcccagcttcgccagatgcatcagccacgagtacagatacctgtacctgagcctgagagagcacctggccaagggccagagaatgctggccggcgagggcatgagccaggtggtgagaagcctgcaggagctgctggccagaagaacctactacagcggcgacctgctgttcagcgtggacatcctgagaaacgtgaccgacaccttcaagagagccacctacgtgcccagcgccgacgacgtgcagagattcttccaggtggtgagcttcatggtggacgccgagaacaaggagaagtgggacgacgcccagcaggtgagccccggcagcgtgcacctgctgagagtggtggaggacttcatccacctggtgggcgacgccctgaaggccttccagagcagcctgatcgtgaccgacaacctggtgatcagcatccagagagagcccgtgagcgccgtgagcagcgacatcaccttccccatgagaggcagaagaggcatgaaggactgggtgagacacagcgaggacagactgttcctgcccaaggaggtgctgagcctgagcagccccggcaagcccgccaccagcggcgccgccggcagccccggcagaggcagaggccccggcaccgtgccccccggccccggccacagccaccagagactgctgcccgccgaccccgacgagagcagctacttcgtgatcggcgccgtgctgtacagaaccctgggcctgatcctgcccccccccagaccccccctggccgtgaccagcagagtgatgaccgtgaccgtgagaccccccacccagccccccgccgagcccctgatcaccgtggagctgagctacatcatcaacggcaccaccgacccccactgcgccagctgggactacagcagagccgacgccagcagcggcgactgggacaccgagaactgccagaccctggagacccaggccgcccacaccagatgccagtgccagcacctgagcaccttcgccgtgctggcccagccccccaaggacctgaccctggagctggccggcagccccagcgtgcccctggtgatcggctgcgccgtgagctgcatggccctgctgaccctgctggccatctacgccgccttctggagattcatcaagagcgagagaagcatcatcctgctgaacttctgcctgagcatcctggccagcaacatcctgatcctggtgggccagagcagagtgctgagcaagggcgtgtgcaccatgaccgccgccttcctgcacttcttcttcctgagcagcttctgctgggtgctgaccgaggcctggcagagctacctggccgtgatcggcagaatgagaaccagactggtgagaaagagattcctgtgcctgggctggggcctgcccgccctggtggtggccgtgagcgtgggcttcaccagaaccaagggctacggcaccagcagctactgctggctgagcctggagggcggcctgctgtacgccttcgtgggccccgccgccgtgatcgtgctggtgaacatgctgatcggcatcatcgtgttcaacaagctgatggccagagacggcatcagcgacaagagcaagaagcagagagccggcagcgagagatgcccctgggccagcctgctgctgccctgcagcgcctgcggcgccgtgcccagccccctgctgagcagcgccagcgccagaaacgccatggccagcctgtggagcagctgcgtggtgctgcccctgctggccctgacctggatgagcgccgtgctggccatgaccgacagaagaagcgtgctgttccaggccctgttcgccgtgttcaacagcgcccagggcttcgtgatcaccgccgtgcactgcttcctgagaagagaggtgcaggacgtggtgaagtgccagatgggcgtgtgcagagccgacgagagcgaggacagccccgacagctgcaagaacggccagctgcagatcctgagcgacttcgagaaggacgtggacctggcctgccagaccgtgctgttcaaggaggtgaacacctgcaaccccagcaccatcaccggcaccctgagcagactgagcctggacgaggacgaggagcccaagagctgcctggtgggccccgagggcagcctgagcttcagccccctgcccggcaacatcctggtgcccatggccgccagccccggcctgggcgagcccccccccccccaggaggccaaccccgtgtacatgtgcggcgagggcggcctgagacagctggacctgacctggctgagacccaccgagcccggcagcgagggcgactacatggtgctgcccagaagaaccctgagcctgcagcccggcggcggcggcggcggcggcgaggacgcccccagagccagacccgagggcacccccagaagagccgccaagaccgtggcccacaccgagggctaccccagcttcctgagcgtggaccacagcggcctgggcctgggccccgcctacggcagcctgcagaacccctacggcatgaccttccagccccccccccccacccccagcgccagacaggtgcccgagcccggcgagagaagcagaaccatgcccagaaccgtgcccggcagcaccatgaagatgggcagcctggagagaaagaagctgagatacagcgacctggacttcgaggtgatgcacaccagaaagagacacagcgagctgtaccacgagctgaaccagaagttccacaccttcgacagatacagaagccagagcaccgccaagagagagaagagatggagcgtgagcagcggcggcgccgccgagagaagcgtgtgcaccgacaagcccagccccggcgagagacccagcctgagccagcacagaagacaccagagctggagcaccttcaagagcatgaccctgggcagcctgccccccaagcccagagagagactgaccctgcacagagccgccgcctgggagcccaccgagccccccgacggcgacttccagaccgaggtgtag

SEQ ID NO: 111621 - protein, 1551 aa, Artificial Sequence
  derived and/or modified sequence
MENTGWMGKGHRMTPACPLLLSVILSLRLATAFDPAPSACSALASGVLYGAFSLQDLFPTIASGCSWTLENPDPTKYSLYLRFNRQEQVCAHFAPRLLPLDHYLVNFTCLRPSPEEAVAQAESEVGRPEEEEAEAAAGLELCSGSGPFTFLHFDKNFVQLCLSAEPSEAPRLLAPAALAFRFVEVLLINNNNSSQFTCGVLCRWSEECGRAAGRACGFAQPGCSCPGEAGAGSTTTTSPGPPAAHTLSNALVPGGPAPPAEADLHSGSSNDLFTTEMRYGEEPEEEPKVKTQWPRSADEPGLYMAQTGDPAAEEWSPWSVCSLTCGQGLQVRTRSCVSSPYGTLCSGPLRETRPCNNSATCPVHGVWEEWGSWSLCSRSCGRGSRSRMRTCVPPQHGGKACEGPELQTKLCSMAACPVEGQWLEWGPWGPCSTSCANGTQQRSRKCSVAGPAWATCTGALTDTRECSNLECPATDSKWGPWNAWSLCSKTCDTGWQRRFRMCQATGTQGYPCEGTGEEVKPCSEKRCPAFHEMCRDEYVMLMTWKKAAAGEIIYNKCPPNASGSASRRCLLSAQGVAYWGLPSFARCISHEYRYLYLSLREHLAKGQRMLAGEGMSQVVRSLQELLARRTYYSGDLLFSVDILRNVTDTFKRATYVPSADDVQRFFQVVSFMVDAENKEKWDDAQQVSPGSVHLLRVVEDFIHLVGDALKAFQSSLIVTDNLVISIQREPVSAVSSDITFPMRGRRGMKDWVRHSEDRLFLPKEVLSLSSPGKPATSGAAGSPGRGRGPGTVPPGPGHSHQRLLPADPDESSYFVIGAVLYRTLGLILPPPRPPLAVTSRVMTVTVRPPTQPPAEPLITVELSYIINGTTDPHCASWDYSRADASSGDWDTENCQTLETQAAHTRCQCQHLSTFAVLAQPPKDLTLELAGSPSVPLVIGCAVSCMALLTLLAIYAAFWRFIKSERSIILLNFCLSILASNILILVGQSRVLSKGVCTMTAAFLHFFFLSSFCWVLTEAWQSYLAVIGRMRTRLVRKRFLCLGWGLPALVVAVSVGFTRTKGYGTSSYCWLSLEGGLLYAFVGPAAVIVLVNMLIGIIVFNKLMARDGISDKSKKQRAGASLWSSCVVLPLLALTWMSAVLAMTDRRSVLFQALFAVFNSAQGFVITAVHCFLRREVQDVVKCQMGVCRADESEDSPDSCKNGQLQILSDFEKDVDLACQTVLFKEVNTCNPSTITGTLSRLSLDEDEEPKSCLVGPEGSLSFSPLPGNILVPMAASPGLGEPPPPQEANPVYMCGEGGLRQLDLTWLRPTEPGSEGDYMVLPRRTLSLQPGGGGGGGEDAPRARPEGTPRRAAKTVAHTEGYPSFLSVDHSGLGLGPAYGSLQNPYGMTFQPPPPTPSARQVPEPGERSRTMPRTVPGSTMKMGSLERKKLRYSDLDFEVMHTRKRHSELYHELNQKFHTFDRYRSQSTAKREKRWSVSSGGAAERSVCTDKPSPGERPSLSQHRRHQSWSTFKSMTLGSLPPKPRERLTLHRAAAWEPTEPPDGDFQTEV

SEQ ID NO: 111622 - DNA, 4656 bp, Artificial Sequence
  derived and/or modified sequence
atggagaatactggttggatgggcaagggccatagaatgaccccagcgtgccctctgctcctcagtgtgatcctgtccctgcggctggcaactgcattcgatccagctccatcagcatgctccgctctggctagtggagttctgtacggagcatttagcttgcaagatctgttcccgactatcgcaagcggctgttcctggactttggagaaccctgatccaacaaagtactccctctatttgcggttcaatagacaggaacaagtttgtgcccactttgccccccgactccttcctctggatcactacctggtgaacttcacatgcttgagaccttcccccgaggaagccgtggcacaggctgagagtgaggtgggccggccggaggaagaggaagccgaggccgcagccggattggagctgtgtagtgggagcggacctttcacctttctgcatttcgataagaacttcgttcagctgtgtctgtccgcagagcccagtgaagcccctagactcctcgcgcccgcagccctggcgttcaggttcgttgaggttctgctgataaataacaacaattctagccaatttacctgcggcgtcctctgccgatggtcggaagaatgcggtcgcgctgctggccgagcatgtggctttgctcagccaggatgttcttgccccggggaggctggtgctggatcaacaaccaccactagtccagggcctcccgcagcccataccctcagtaacgcgctggtgcccggcggccctgcaccaccagccgaagctgaccttcattctggaagttcaaatgatctgttcacaactgagatgcgctatggcgaggaacccgaggaggaacccaaggtcaagactcaatggcccagatcagccgatgagcccgggttgtacatggcccagactggtgatccagcggcagaggagtggtcaccctggtcagtgtgcagtctgacttgtggacaaggcctccaggttagaacacgaagttgtgtgtcttctccgtatgggacactctgctctggtcctctgcgggagacgcggccatgcaataacagtgcaacgtgtcccgtacacggggtttgggaagagtggggctcttggtccctgtgctccaggagctgcggccggggatcacggagtcggatgcgcacatgtgtacccccccagcatggaggcaaagcttgtgaaggcccggagctccagactaaactgtgctccatggccgcttgtcccgttgagggacaatggctcgaatggggaccatggggaccctgcagtaccagctgcgccaacgggacgcagcagagatcacgaaagtgtagcgtggccggcccagcatgggcgacttgcactggagctctgacagatactcgggaatgtagtaatctggagtgtccagccacagactccaagtggggcccctggaacgcctggtcattatgtagcaagacctgcgatacaggctggcagaggcgctttcgaatgtgtcaagctacagggacccagggttatccttgtgaagggaccggggaggaagtgaagccgtgcagtgagaagaggtgccctgcattccatgagatgtgccgagatgaatacgtaatgctaatgacctggaagaaagctgcggcaggcgagatcatctacaacaagtgtcctcccaatgctagtgggtcagcctctaggcggtgtctgctaagtgcccagggtgtcgcctattggggcctaccatcgttcgcccgctgcatttctcatgagtatagatacctctatctgtcactgcgggaacatcttgcaaaaggtcagcgcatgctggctggagagggtatgtcacaggtggtgcgctccctacaagagctcctggctagacggacatactacagtggcgatctactgttctccgtggacatcctcagaaacgtgaccgataccttcaagcgcgctacctacgtccccagtgccgatgacgttcagaggttcttccaagtggtgtcattcatggtggatgccgaaaacaaggaaaagtgggacgacgcccagcaagtaagcccaggaagcgtccatctgcttagggtggtggaggattttatccatctggtgggggatgctctcaaggcctttcagtcaagcctcatagtgactgataatttagtgattagtatccagagggagccagtctctgcggtttcatccgacatcacattccctatgaggggaaggcgcggaatgaaggactgggtccgtcattctgaggaccgcctgttcttgcctaaggaagtgcttagcctttcctcccctggtaagccggctacttctggggccgccggctcacctggaaggggaagaggccccggtacagtgcctcctggaccaggtcactcacatcagaggctcctgcccgccgatccagacgaatccagctacttcgtcatcggcgccgttctgtaccggactctagggttgattctgccccctccgcggccccctctggctgttacctcacgcgtaatgaccgttaccgttaggccacccacacagccgccagccgagcctctgatcacagttgagctgagctacatcatcaatggtactacagatccacattgtgcttcatgggattactccagagccgacgcgagttctggtgattgggacaccgaaaattgtcagaccctagaaacacaagctgctcacactcgctgccagtgccagcatcttagtacatttgccgtgctggctcagcccccaaaggatttgactctcgaattagccggctctcccagtgtaccacttgtgataggatgtgcagtgtcctgtatggctctcctcactctgcttgccatctacgccgctttctggcgattcatcaagagcgagcgctccattatcttgttgaacttttgcttatcaatcctggcttctaatatcttgatcctggtgggtcagtctcgtgtcctcagcaaaggcgtttgtacaatgacggccgcctttctgcactttttctttttgagctctttctgttgggtgctcaccgaggcttggcagtcttatctggccgtgattgggaggatgcgtacccgtctcgttagaaagcgcttcctatgtttgggctggggtctcccggctctggtggtagcagtgagcgtcgggtttacacgcaccaaagggtacggcacctccagttattgttggttatctctcgaaggcggattgctctacgcatttgtgggtcctgccgctgtgatcgttctcgtcaacatgcttattggcatcatcgtgttcaataaactcatggctcgggatggaatatcggacaagagcaagaagcagcgtgcaggcgccagcctttggtcgtcctgcgttgtcctcccattactcgccctgacctggatgagcgcagtcctggccatgaccgaccgtcgatctgtactctttcaggctctctttgcagtctttaactctgcccaaggctttgtgattaccgcagttcactgctttctccgcagagaggtacaggatgtagtaaaatgccagatgggtgtttgtcgggccgacgagtctgaggacagccccgactcatgtaagaacggtcagctacaaatcctctcagattttgaaaaggatgtcgatctggcctgtcagaccgtgctctttaaggaagtgaacacgtgtaacccgtctaccatcacaggaactctatcacgattaagcctggacgaggacgaggagcccaaatcatgcctggtggggcccgagggctcactgagtttctcgccactgcctggaaacatactggttcctatggccgccagtcccgggctgggggagcccccacctccccaggaggcaaatcctgtgtacatgtgtggagagggcggactgcgccagctggatttgacatggctccggcccactgagcctggcagcgagggagattacatggtcctgccacgccgaaccctgtctcttcagccgggtgggggcggcggtgggggcgaggacgcacctcgggccaggcccgagggcaccccaagacgtgctgccaagaccgtggcgcatactgaaggataccccagttttctgagcgtggatcatagcggccttggactcgggcccgcctacggttctttacagaacccttatgggatgacctttcaaccgccgcctccgacccccagcgcgcgtcaggttcccgagcccggcgaaagatcccgtaccatgccccggaccgtccccggaagcactatgaaaatgggaagtctggaaaggaagaaactcaggtatagcgaccttgatttcgaggttatgcatacaagaaaacgacacagcgaactgtatcatgagttgaatcagaagtttcacacctttgaccgataccgctcacaaagtacagccaagagggaaaagaggtggtctgtgagttcaggcggggcggccgagcgctcggtatgcaccgataagccttccccaggagaaaggcctagcttgtcccagcaccgccgacatcagtcctggagcactttcaagagcatgaccttaggctcattgcctcccaagcccagggaaagacttaccttgcaccgggccgccgcatgggagccgactgagccaccggatggggactttcagacagaggtatag

SEQ ID NO: 111623 - DNA, 4656 bp, Artificial Sequence
  derived and/or modified sequence
atggagaacaccggatggatgggaaaaggccaccggatgactcccgcgtgccctttgctgttgtccgtcatcctatccctgcggcttgcaacagcgtttgaccctgcacccagtgcctgcagtgcccttgcctccggggtgttgtacggtgcgtttagtctccaggatttgtttccaacaatcgctagcggctgcagttggacgctagagaaccccgacccgaccaaatactccttatacctcaggtttaaccggcaagagcaggtctgtgcacacttcgcacctcgcctcctgcccttagaccactacctggtgaacttcacctgcctgaggccatcaccagaggaagccgttgcccaggcggagagcgaggtcggccgtcccgaggaagaggaggccgaggccgcggcgggtttggaattatgttccggtagcggccccttcacgtttctacattttgataagaactttgttcagctttgcctgtctgctgagccgtccgaagctccgcggttgcttgcccccgcagcactggctttcaggttcgtggaagtgttgctgatcaataacaacaatagctcacagtttacctgtggggtgctgtgcaggtggagtgaggagtgtgggcgcgccgccggcagggcttgcggctttgctcagcccggttgcagctgtccgggcgaagcgggcgcaggttctactactactacttcgccggggcctcctgccgcacacactctgtccaacgccctggtccccggcggcccggcacctcccgcggaggctgatctgcattctgggagttccaatgatctatttactaccgaaatgcgatatggtgaggaacctgaagaggaacctaaggtgaagactcagtggcccaggagcgctgacgagccagggctgtatatggcccagacaggggaccctgcagctgaagaatggagcccctggtctgtctgttcattgacttgcggccagggcctccaggtcaggaccaggtcatgtgtgagttctccctacggaactctgtgcagtggccctctgcgagaaacacgcccatgcaacaacagcgccacgtgtccagttcatggcgtgtgggaagaatggggctcgtggtcactgtgcagccgtagctgcggacgaggcagccggagcagaatgagaacttgcgtgcctcctcagcacgggggtaaagcctgcgagggacccgaactgcagaccaaactttgtagtatggccgcctgtccagttgagggacaatggctggaatggggcccttgggggccctgtagcacttcctgcgcgaatggcactcagcaaagatccagaaagtgctccgtagccggccctgcctgggccacgtgtaccggggccttaacggacactcgggagtgcagcaacctggagtgcccagcaaccgattccaagtggggcccctggaatgcttggagcctttgttcaaagacctgtgacaccggttggcagaggaggtttcggatgtgtcaggcaaccggaacccaggggtatccctgtgagggcaccggcgaagaggttaagccatgttccgagaaaaggtgtcctgcgtttcacgaaatgtgccgggatgagtacgtcatgcttatgacctggaagaaggctgctgctggggaaatcatctataacaagtgcccgcctaatgcaagcggcagcgcctcgcgccgctgcctgctgtcagcccaaggagtcgcatactggggcctaccctctttcgccaggtgcatctctcatgagtataggtatctctacctgagcctccgggaacacttggccaaaggtcagcgtatgctcgctggggaaggcatgtcgcaggttgttcggtcattacaggaactactggccagaaggacgtattatagtggcgaccttctttttagtgtggacattctgcggaatgttacagacactttcaagcgagcaacgtacgttccttcagcagacgacgttcagcggttctttcaagtcgtgagctttatggtggacgccgagaataaggagaaatgggacgatgcccagcaggtgtctcctggctccgtgcatctgctgagagtggtggaggattttatccacctagttggggatgcccttaaggcatttcagagttctctaatagtcactgataacctggtaattagcatccagagagagcctgttagcgccgtaagtagcgacatcacattcccaatgagaggtcgccgagggatgaaagattgggtacggcactctgaagataggttgttccttcccaaggaagtgctgagtctgtcgtcaccagggaaacccgcgacctcgggcgccgccgggagcccaggtagaggtcggggaccaggtactgttccacccggacccgggcacagccaccaaagactgttgccggccgaccctgatgagtcatcatattttgtgataggggcagtgctgtacaggacgctgggactgattttaccaccgcccagaccacctctagcagtgaccagccgggtcatgacagtaaccgtgcgtcccccaactcagccccctgccgagcctctcataactgtagagctatcctatataatcaacggcactacggatccacattgtgcctcatgggactattcccgggccgacgccagcagcggcgactgggatactgagaattgccagacgctagaaacccaggcagcccacacgagatgccaatgtcagcatctgtctacattcgcagtgctagctcagcccccaaaggacctgacactggagttggccggtagcccatcggtgcccctcgtgatagggtgtgcagtttcatgcatggccttgcttaccctactcgccatctacgctgccttctggcgattcatcaagagcgagcgaagcataatactcttaaacttctgcctgagtattttggcaagtaatattctgattctcgtagggcagtcacgtgtgctgagcaagggagtgtgcacgatgactgctgctttcctgcacttcttctttttaagcagtttttgctgggttttaaccgaggcatggcaaagttatctcgctgtaattggcaggatgcggaccagacttgtgagaaaacgatttctctgcttagggtggggcttacccgctttagtggttgccgtgtctgtgggcttcacaaggacaaagggctatggtacctcaagttactgctggctgtcccttgagggtggcttactatatgcgttcgttggccctgccgcagtgattgtccttgtgaatatgctgattggtatcatcgtgttcaataaacttatggccagagatggcatcagtgacaagtccaagaaacagcgtgcgggagcctcattatggtctagctgcgtagtgttgcctctcctcgccctcacatggatgtctgccgttctggctatgaccgacaggcgctccgttttgtttcaggccttgtttgccgtgttcaatagcgcacagggcttcgtcatcacagccgtccattgctttttgcgtcgcgaggtgcaagatgtggtgaaatgtcaaatgggtgtctgcagggcagatgagagcgaggattcccctgatagctgcaaaaatgggcaactccaaatcctgtccgacttcgagaaggacgtggatctggcttgtcagaccgtgctcttcaaagaagtgaacacatgcaacccaagcacaattacaggtaccctgtcaaggttgagccttgatgaggacgaagagcctaaaagctgtctcgtcggaccagagggcagcctctcatttagtccattgccaggaaacatcttagtgcccatggccgcatcccccgggttaggggaacctccaccaccacaggaagcgaatccagtgtacatgtgcggtgaagggggcctccgccagttggacctgacgtggttgcgacccaccgagcccggatcggagggtgactacatggtcctgccccgcaggactctctctttacagcccggaggcggtggcggcggtggggaggatgcaccccgggctcgacccgaagggacgcctagacgggccgcgaaaaccgtggcccacacagagggctacccgagcttcttgtccgttgatcatagcgggctgggccttggccccgcatacgggtctttgcagaacccttatgggatgactttccagcctcctccgcctactccaagcgccagacaggttcctgagcctggggagaggtctaggactatgcccagaaccgttccgggctccaccatgaaaatgggcagtctcgaacgcaaaaagcttagatacagcgatctggacttcgaagtcatgcatacaagaaaacggcattctgagctttaccacgaacttaatcagaagttccacactttcgaccggtaccgatcacagtctactgcaaagagagaaaagaggtggtccgtgagttcaggcggtgctgcggaacgatctgtgtgcactgacaaacctagccccggagagcgccccagcttatcccagcacaggaggcaccagtcctggtcgacttttaagtctatgaccttaggctcgctccctcctaagccacgagagcggctgaccctgcaccgtgccgctgcgtgggaacctacagaacctcctgatggtgactttcagaccgaagtttag

SEQ ID NO: 111624 - DNA, 4656 bp, Artificial Sequence
  derived and/or modified sequence
atggagaacacaggctggatgggcaagggccacaggatgaccccagcctgccccctgctgctgagcgtcatcctgagcctgcggctggccacagcctttgatcctgcccccagcgcctgcagcgccctggccagcggcgtgctgtatggagccttcagcctgcaggacctcttccccaccatcgccagcggctgctcctggaccctggagaacccagaccccaccaagtacagcctgtacctgcgcttcaaccggcaggagcaggtgtgtgcccactttgccccccggctgctgcccctggaccactacctggtgaacttcacctgcctgcggcccagccctgaggaggccgtggcccaggccgagagcgaggtgggccggcctgaggaggaggaggccgaggccgctgctggcctggagctgtgcagcggcagcggccccttcaccttcctgcactttgacaagaactttgtgcagctgtgcctgtctgctgagcccagcgaggccccccggctgctggccccagctgccctggccttccgctttgtggaggtgctgctgatcaacaacaacaacagcagccagttcacctgtggggtgctgtgccgctggagcgaagaatgtggccgggccgccggccgggcctgtggctttgcccagcccggctgcagctgccctggagaggccggggccggcagcaccaccaccaccagccctggccccccagctgcccacaccctgagcaatgccctggtgcctgggggccctgcccccccagctgaggccgacctgcacagcggcagcagcaatgacctcttcaccacagagatgagatatggagaggagcctgaggaggagcccaaggtgaagacccagtggcccaggtctgcagatgagcccggcctgtacatggcccagacaggagaccctgctgctgaggagtggagcccctggagcgtgtgcagcctgacctgtggccagggcctgcaggtgaggaccaggagctgtgtgagcagcccctacggcaccctgtgcagcggccccctgcgggagacccggccctgcaacaacagcgccacctgccctgtgcacggcgtgtgggaggagtggggctcctggagcctgtgcagccgcagctgtggccggggcagccgcagcaggatgaggacctgtgtgcccccccagcacggcggcaaggcctgtgagggccctgagctgcagaccaagctgtgcagcatggccgcctgccctgtggagggccagtggctggagtggggcccctggggcccctgcagcaccagctgtgccaacggcacccagcagaggagcaggaaatgttctgtggccggccctgcctgggccacctgcacaggagccctgacagacaccagagaatgtagcaacctggagtgcccagccacagacagcaagtggggcccctggaatgcctggagcctgtgcagcaagacctgtgacaccggctggcagaggcgcttcaggatgtgccaggccaccggcacccagggctacccctgtgagggcactggagaggaggtgaagccctgcagcgagaagcgctgcccagccttccacgagatgtgcagagatgaatatgtgatgctgatgacctggaagaaggctgctgctggggagatcatctacaacaagtgccccccaaatgccagcggcagcgccagccgccgctgcctgctgagcgcccagggcgtggcctactggggcctgcccagctttgcccgctgcatcagccatgagtaccgctacctgtacctgagcctgcgggagcacctggccaagggccagaggatgctggccggggagggcatgagccaggtggtgcgcagcctgcaggagctgctggcccggaggacctactacagcggggacctgctcttctctgtggacatcctgagaaatgtgacagacaccttcaagagggccacctacgtgcccagcgcagatgatgtgcagcgcttcttccaggtggtgtccttcatggtggatgctgagaacaaggagaagtgggatgatgcccagcaggtgtccccaggctctgtgcacctgctgcgggtggtggaggacttcatccacctggtgggagatgccctgaaggccttccagagcagcctgattgtgacagacaacctggtgatcagcatccagcgggagcctgtgtctgctgtgtccagtgacatcaccttccccatgagaggaagaagaggcatgaaggactgggtgcgccacagcgaggacaggctcttcctgcccaaggaggtgctgagcctgagcagccctgggaagccagccaccagcggggccgccggcagccctggccggggccggggccctggcaccgtgcccccaggccctggccacagccaccagaggctgctgcctgctgaccctgatgagagcagctacttcgtcatcggggctgtgctgtaccgcaccctgggcctcatcctgcccccacccaggcctcccctggccgtgaccagccgggtgatgacagtgacagtgcggccccccacccagcccccagctgagcccctcatcaccgtggagctgagctacatcatcaatggcaccacagacccccactgtgcctcctgggactacagcagagcagatgccagcagcggggactgggacacagagaactgccagaccctggagacccaggccgcccacacccgctgccagtgccagcacctgagcacctttgctgtgctggcccagccccccaaggacctgaccctggagctggccggcagccccagcgtgcccctggtgattggctgtgctgtgtcctgcatggccctgctgaccctgctggccatctatgctgccttctggaggttcatcaagtctgagaggagcatcatcctgctgaacttctgcctgagcatcctggccagcaacatcctgatcctggtgggccagagccgggtgctgagcaaaggagtgtgcaccatgacagctgccttcctgcacttcttcttcctgagcagcttctgctgggtgctgacagaggcctggcagagctacctggccgtcatcggccgcatgaggacccggctggtgaggaagcgcttcctgtgcctgggctggggcctgcctgccctggtggtggccgtgtctgtgggcttcaccaggaccaagggctacggcaccagcagctactgctggctgagcctggagggcggcctgctgtatgcctttgtgggccctgctgctgtgattgtgctggtgaacatgctgattggcatcatcgtgttcaacaagctgatggccagagatggcatcagtgacaagagcaagaagcagagagctggggccagcctgtggagcagctgtgtggtgctgcccctgctggccctgacctggatgtctgctgtgctggccatgacagacagaagatctgtgctcttccaggccctgtttgctgtgttcaacagcgcccagggctttgtgatcacagctgtgcactgcttcctgcggcgggaggtgcaggatgtggtgaagtgccagatgggcgtgtgcagagcagatgaaagtgaggacagcccagacagctgcaagaatggccagctgcagatcctgagtgactttgagaaggatgtggacctggcctgccagacagtgctcttcaaggaggtgaacacctgcaaccccagcaccatcaccggcaccctgagccggctgagcctggatgaagatgaggagcccaagagctgcctggtgggccctgagggcagcctgtccttcagccccctgcccggcaacatcctggtgcccatggccgccagccctggcctgggggagcccccaccaccccaggaggccaaccctgtgtacatgtgtggggagggcggcctgcggcagctggacctgacctggctgcggcccacagagcccggcagcgagggggactacatggtgctgcccaggaggaccctgagcctgcagcccggcggcggcggcggcggcggggaggatgccccccgggcccggcctgagggcaccccccggcgggccgccaagacagtggcccacacagagggctaccccagcttcctgtctgtggaccacagcggcctgggcctgggccctgcctacggcagcctgcagaacccctacggcatgaccttccagcccccaccacccacccccagcgcccggcaggtgcctgagcctggagagaggagcaggaccatgcccaggacagtgcccggcagcaccatgaagatgggcagcctggagaggaagaagctgcgctacagcgacctggactttgaggtgatgcacaccaggaagaggcacagcgagctgtaccacgagctgaaccagaagttccacacctttgaccgctaccgcagccagagcacagccaagcgggagaagcgctggagcgtgagcagcggcggcgctgctgagaggtctgtgtgcacagacaagcccagccctggagagcggcccagcctgagccagcacagaagacaccagagctggagcaccttcaagtccatgaccctgggcagcctgccccccaagccccgggagcggctgaccctgcacagagctgctgcctgggagcccacagagcccccagatggagacttccagacagaggtgtag

SEQ ID NO: 111625 - DNA, 4656 bp, Artificial Sequence
  derived and/or modified sequence
atggagaacaccggctggatgggcaagggccaccggatgacccccgcctgcccccttctcctgtctgtgattctgtcgttgcgcctggcgactgcctttgaccccgcgccttcagcctgctccgcgcttgcttcaggagtactgtatggtgcgttcagcctgcaagaccttttcccaacgatcgcgtcaggttgctcttggacactggaaaaccctgaccctaccaagtactccctgtatttacgttttaacagacaggagcaggtgtgtgcacactttgctccacgcctgctccctctggatcattacttagtcaatttcacctgtcttcgaccctctcccgaggaagcagtggctcaggcagaaagcgaggtcgggcggcccgaagaggaggaagcggaagcagccgcaggtctcgaattgtgctcagggtcaggaccgttcacctttcttcacttcgacaagaatttcgtccaactctgtctgagcgcagagccctcagaggccccaaggctgcttgctccagcagcgttggcttttcggttcgtggaggttctgctgatcaacaacaataacagctctcagtttacctgtggagttctttgcaggtggtccgaagagtgtgggcgtgctgctggccgcgcatgtggctttgcccagccaggatgctcttgccctggggaggccggggctgggagtactacgactacgtccccagggccgccagcagcccataccttaagcaacgccctcgtcccggggggcccggcacccccagcagaagcagacctacattccggatcctccaatgacttatttactacagagatgagatacggcgaggagcctgaggaggagccaaaggtcaagacacagtggcccaggtctgccgacgaaccaggcctgtacatggcacagaccggggacccggccgctgaggagtggagcccctggtcagtttgctctctaacctgtggccagggcctccaggtgcgtacgcgaagctgcgtgagcagcccctacggaactctttgttcgggtccattgagggagactcgcccttgtaacaacagcgccacctgtcctgtacacggcgtgtgggaggagtgggggagctggagtctttgttctagaagctgtgggcgggggtctaggagtcggatgcgcacttgtgtgccacctcagcacggcggaaaggcttgcgaggggccagaattgcaaactaaactatgctccatggcggcttgccctgtggaggggcagtggttagagtggggtccctggggcccatgctctacctcttgcgccaatggtactcagcagagatcacggaaatgttcagttgccggacctgcatgggccacctgtaccggtgcccttaccgacacgagggaatgctccaacctggagtgtcccgcaacagacagtaaatggggtccatggaatgcttggtctctgtgtagtaagacttgtgatactgggtggcagaggaggtttaggatgtgtcaagctaccggtacgcaagggtatccctgcgagggaacgggtgaagaggtgaaaccttgttcagaaaagagatgcccggccttccacgagatgtgtcgtgatgaatacgtcatgcttatgacctggaagaaggcggctgcaggtgagattatttacaacaagtgcccgcctaacgcctccggcagcgcctccagacgctgcttgctctcagcacagggcgtggcatattgggggcttccatccttcgcaagatgtatctcccatgagtacagatacctgtatctctctctgcgcgagcatctggccaaggggcagcggatgcttgctggagaaggtatgagtcaggtggtgcggtctctccaggagttgttagcccggaggacatattattccggggatttgctcttcagcgtggatatactccgaaacgtgacagacacatttaagcgcgccacgtacgtgccttccgcagatgatgtgcagcgcttctttcaagtggtttcgtttatggtggacgctgagaataaggagaaatgggacgacgctcaacaggtctcacccggttctgtccacctgcttagagtggttgaggactttattcatctggtgggagacgccttaaaggcctttcaatcttctttgatcgtcactgacaatctggtgatctcaatacagcgcgaaccagtcagtgctgtaagcagcgacataacatttcctatgcgaggacgacgcggaatgaaagattgggttcgtcatagcgaggatcgcctgttcctgcccaaggaagtactcagcctgagctcccccggaaaacctgcaacttccggggccgccggcagtcccggccgtggccgcggtcctgggaccgtgcccccggggcccggacatagtcatcagagactgttacccgctgaccccgacgagagttcttactttgtcattggagctgttctgtacagaacattgggtctgatcttgcccccaccacgccctcccctcgctgtgacaagcagggtgatgacggtcactgtccgaccgccgacacagccccctgcagaaccactgatcactgttgagctgagctatattatcaatgggaccactgatccccattgcgccagctgggactatagccgcgccgatgcttcctccggcgattgggacactgagaactgccaaacattagaaacccaggcagcccatacaagatgccagtgccaacacctgagtacttttgcagtactagctcagcccccgaaggacctgaccttagagctcgctggtagcccatctgtcccccttgtgatcggttgcgcagtttcctgtatggccctactgacactcttggcaatctatgcagcgttttggcggttcattaagagtgaacggtctataattctgctgaacttctgtctgagtatcctggcgtccaatatcctcattcttgtcggtcaatccagggttttatcaaagggagtttgcactatgaccgccgcgttcttgcactttttttttctgagctctttttgttgggttctgaccgaggcgtggcaaagttacctcgcggtgattggacgcatgcgcaccaggctcgtgcgaaagcggttcctgtgccttggatggggccttccggctctggtagtcgcagtatctgtcggatttacgaggactaaggggtatggcacttcatcctactgttggttaagcctggaaggaggtttgctctacgcatttgtcggccctgcggcagttatcgtccttgtgaacatgttaattggcatcatcgtatttaataagctcatggccagggacgggatcagcgacaagagtaagaaacagcgcgcaggcgcttcactgtggtctagctgcgtggtcctgcccctgctggctctcacatggatgtctgcggtgctggcgatgacggaccggcggtccgtgctgtttcaggccctttttgctgtattcaattcagctcagggttttgttattacagccgtgcactgcttcctgaggagggaggttcaagacgtagtcaagtgccagatgggcgtgtgtcgggccgacgagtctgaggatagtcccgacagttgtaagaatggacagttgcagattttgtccgactttgagaaagatgtggacctggcctgtcagaccgtcctattcaaagaagtgaacacttgtaacccaagcactataactggtacactttcgcggctttccctggacgaagacgaggagccaaagagctgtctcgtcggcccagagggctcactgagctttagccctcttccaggaaacatcctggtaccgatggcagctagccctggtttaggagaaccaccgccacctcaggaggcgaaccctgtgtacatgtgtggtgaaggcggtctgagacagctggacttgacatggctcagaccaacagagcccggttctgagggcgactatatggtgttgcctcggcgaacgctcagcctccagccaggaggaggtggaggcggaggtgaagacgctccccgagcgcggcctgagggcactccgagacgagcggccaagacagtggcccatacggaaggatacccttctttcctctcagtggaccactccggacttggacttggacctgcctatggctcactccagaatccctacgggatgaccttccaaccgcctccccccacccccagcgccagacaagtgccagagcccggagagcgaagccgtactatgcctcggaccgtccccggctccacaatgaagatggggtcactggaaaggaaaaagctacgctactctgatcttgacttcgaggtgatgcatacaagaaagcgtcactccgaactatatcacgaactgaaccagaagttccacactttcgatcggtataggtcacagtccacagcgaaacgcgaaaagaggtggagtgtgtcaagcggtggggctgctgagcggagtgtttgcaccgacaaaccaagcccaggagagcggccaagtctgtcccagcacaggcgacaccagagctggagcacgttcaaatctatgaccctggggagcctgcctcctaagccccgggagagactgaccctgcacagagccgccgcctgggagcccaccgagccaccggacggcgatttccagaccgaggtctag

SEQ ID NO: 111626 - DNA, 4656 bp, Artificial Sequence
  derived and/or modified sequence
atggagaacaccggctggatgggcaagggccaccggatgacccccgcatgcccattgttgctgtcagtgatactctctctcagactggcgactgcgtttgatcctgcgcctagcgcgtgtagcgcactagctagcggcgtgctgtacggcgctttcagcctccaggacctgttccccactattgccagtggatgttcttggactctcgagaatccagaccccacaaagtattcgttatacttacggtttaaccggcaggaacaggtgtgtgctcatttcgcacctagactactgccacttgaccattatctcgtcaacttcacatgtctccggccctctcccgaagaagcagttgctcaagccgaatctgaagttgggagaccggaagaagaagaagcagaggccgccgcggggttggaactttgctctggctccgggcctttcaccttcctccacttcgacaagaatttcgtgcagttgtgtctctccgcggagccctcagaagcccctagactcttggcacccgcagcactcgctttccgctttgtggaggtcctgcttattaataacaataatagctcccagtttacgtgtggtgtgctgtgcaggtggtcagaagagtgtggacgggctgccgggcgcgcgtgtgggtttgcacagccgggttgtagctgtccaggagaagcgggggccggatccaccaccacaacgtcgcccggaccgccggccgcccatacactgagcaacgctctagttccgggggggcctgcaccacctgcagaagccgatctccattctggatcatccaacgacctgttcactaccgagatgaggtatggtgaagaacccgaggaagaaccaaaggtcaaaacacagtggccccggtccgcagacgagcctggtctctatatggcgcagacaggtgaccccgccgctgaggagtggtccccttggtccgtctgctctttgacgtgtggccaggggttacaggtccggacccgttcctgcgtgtctagtccctacggcaccctttgctccggcccactgagagagacacgaccgtgtaacaactctgccacctgtccagttcatggagtttgggaagaatggggctcctggtccctgtgctcccggtcctgtggtcgcggaagtaggagtagaatgcggacatgtgtccccccccagcatggcgggaaggcgtgtgaggggcctgagctgcaaactaagctttgcagcatggcagcctgcccagttgagggacagtggctggagtggggaccctgggggccctgcagcacgagctgcgcaaatgggacgcagcagcgcagtcgcaagtgctcagtggcaggcccagcatgggccacatgtacaggcgcccttactgacacccgggagtgcagtaacctcgaatgtcccgctacagactctaagtggggtccatggaacgcctggtctctttgctcaaagacctgcgatactgggtggcagcgccgattccgcatgtgtcaggccactggaacccaaggctacccgtgcgaaggcaccggtgaggaggtgaagccatgttcagagaaacgctgccctgctttccatgagatgtgcagggacgagtacgtgatgctgatgacctggaaaaaggccgccgccggtgaaatcatttacaacaaatgtcctccaaacgcgtccggctccgcaagtcggcgctgcctcctctccgcccagggagtcgcatattggggcctgccttcattcgctcgatgcatttcccatgagtatcgttacttgtacctgagtttgagggagcatcttgccaagggacaaaggatgctggcgggtgagggcatgtcccaggtggtcagatccttacaagagctcctggcgcggagaacttattatagtggagatctgctgttctccgtggacattctgcgtaatgtcacagacacatttaagcgggcaacgtacgtgccttccgccgacgatgtgcaaagattctttcaggttgtcagttttatggttgacgctgaaaacaaggagaagtgggacgacgctcagcaggttagtcctggatcagtccacctgctgagggtggtggaagactttattcatctggtgggcgatgctctgaaagcattccagagcagcctaatcgtcaccgacaatttagttatcagcatccaacgtgaacctgtgtctgcagtgtcctcagacatcacattcccaatgagaggtcgaagaggtatgaaggactgggtgcgccattcagaggaccggttgttccttcccaaggaagttctgtccttgagctcgccagggaagcccgcaacctccggggctgctggctccccaggaagggggcgggggcctggtactgtgccccctggcccagggcattcacatcagcgcttgctgcctgctgatcccgacgagtcatcttatttcgtaataggcgctgttttataccgtaccttaggcctgattctgccaccgccaaggcccccgttggcggtcacgtccagggtgatgactgtgaccgttcgaccgcctacacagccgcctgctgaaccactgataactgtggagctcagctacataataaacggtaccacggatccccactgtgcctcctgggattattctcgagccgatgcatcctccggcgattgggacactgagaattgccagaccctggaaacccaggccgcgcacactcgttgccagtgccagcacctatcgaccttcgccgtgctcgcccagccccccaaggacctcaccctggaactcgcagggtcaccaagcgtcccgctcgtcatagggtgtgcagtttcctgtatggcactgctgaccctcctggcaatctacgcagccttctggcgattcatcaaatccgagcgcagcatcatcctgctcaatttctgcctaagtatcctggcctcgaatattctcatcctggtcgggcagtcccgagtgctgagcaagggggtgtgtaccatgacagctgcgttcctacacttcttcttcctttcgagtttctgttgggtacttactgaggcttggcaatcatatctggctgtaatcggtaggatgagaacccgcttggtgcgcaagcgattcctgtgcctgggatgggggctccctgcgcttgtggtggcggtgtcagtgggcttcacacgaacaaagggctacggcacgagcagctattgttggcttagtttagagggaggtctgttatatgctttcgtgggtcctgccgcggtcattgtgctggtgaatatgttaattggaattattgtttttaataaactgatggcacgggatggtattagcgacaagtcgaaaaaacaacgggccggcgccagtttgtggagtagctgtgtagtcctgcccttgctggccttaacatggatgtctgcagtgctcgcgatgacagaccgacgttccgtcctgtttcaggccctcttcgccgtgtttaactctgctcagggattcgtaataacggccgtccactgtttcctgcgtagagaggtgcaggatgtcgtgaagtgccagatgggcgtgtgtagagccgatgagagcgaggacagcccagattcatgcaaaaatggtcagctccagatcctgagcgattttgagaaagatgtggaccttgcctgtcaaaccgttctttttaaagaagtgaatacatgcaatccctcaacgatcacaggcaccctgagccgactctctcttgacgaagacgaagagcccaaaagttgcctagttggccccgagggatctctctctttcagcccactccccgggaatattctcgtccctatggccgcaagccctggcctcggagaacctccaccccctcaagaagcaaaccctgtttacatgtgtggggaagggggactgaggcagctcgatctaacctggctcaggcccacagaacctgggtctgaaggagattacatggtgctgccacgacggactctgagcctgcagccaggcggtggcggtggggggggagaggatgcacctagggcccgcccagaagggacccctagacgggctgccaagaccgtggcgcacactgaaggctatccctccttcctgtctgtggatcactctggtctgggactggggcccgcttatggatcactgcaaaacccttacggtatgacctttcagccccctccaccgacacccagtgcccgccaggtgcccgagcccggagaacgatccaggactatgcctaggacagtacccggctcgacaatgaagatgggatccttggaaagaaagaaactgcgatattcagacctggatttcgaagtcatgcacactcggaagagacactctgagctttaccacgagctgaaccagaaattccacacttttgaccggtaccgctcccagagcactgcaaaaagggagaagcgatggagcgtctcctccggaggcgccgcagagagaagtgtgtgcacagataagcctagtccaggcgaacggcctagcttgtctcaacaccggcggcaccagtcctggtctaccttcaaaagcatgaccttagggtcgctcccaccgaaacccagggagcgtctgactctgcatcgcgcagccgcctgggagcccacggaacccccagatggggatttccagacggaggtttag

SEQ ID NO: 111627 - DNA, 4656 bp, Artificial Sequence
  derived and/or modified sequence
atggaaaacactggttggatgggcaagggtcataggatgacccctgcttgccctctactcttatccgttatcctgtcgttgcgcctggcgacggcctttgacccggctcctagtgcttgctctgctctggctagcggagtgctgtacggcgcttttagcctacaagatcttttccccaccatcgcctctggttgctcctggacactggagaaccccgacccgacaaagtatagtctgtatctgcgtttcaatagacaagagcaggtgtgtgcgcatttcgcccctcgcctgctgcctctggaccactacttggtcaattttacgtgtctcaggccaagcccagaggaagccgtcgcacaagctgaaagcgaggttggaagaccggaggaggaagaggccgaggcagccgcaggtcttgagctctgcagcggttcaggcccattcacttttctgcatttcgacaaaaacttcgttcagctctgcctcagtgcagagccttcagaggctccgcgactcttggcacccgctgctttggcattcagatttgtcgaggttctgcttattaacaacaataatagctcccaatttacttgtggcgtgctttgtcggtggtcagaagagtgcggcagagccgctggtcgggcttgcggtttcgcccaacccggttgctcttgtccaggcgaagctggcgctgggagcactactaccacctctccaggaccgcctgccgcacataccttgtctaacgcccttgtgcccggaggtcctgccccaccagcagaggcggacctgcacagtggatctagcaatgatctctttacaactgaaatgaggtatggtgaggaacctgaggaagagcctaaggtcaaaacgcaatggcccaggtccgcggatgaacccggtctctacatggcacagacaggcgaccctgccgctgaagaatggtcgccttggtctgtgtgtagccttacgtgcggtcaaggcctccaggtgcgaacaagatcttgtgtttcatctccttacggcacgttgtgctcaggtccactgagggaaacgcgcccatgtaataattctgccacatgtccagtgcacggcgtatgggaggagtgggggtcatggtccttgtgctcccgcagctgtggtcgtggttcccgctccagaatgcggacgtgcgtcccaccgcaacatgggggaaaggcatgcgaaggccctgaattacagaccaaattgtgttccatggctgcttgtcctgttgagggtcagtggctggagtgggggccttggggtccatgtagcacatcgtgtgctaacgggactcaacagaggtcaaggaagtgttcagtggccggaccagcctgggcaacatgcaccggcgcattgactgacacacgggagtgctctaatttggagtgccccgcaaccgacagcaagtggggcccatggaacgcctggagcttgtgttccaagacatgcgacacaggatggcaacgaagattccgaatgtgtcaggcgactggcacacaaggctatccatgcgagggtactggggaggaagtgaagccgtgcagcgagaaaaggtgcccagcttttcacgagatgtgtagagacgaatatgtgatgttgatgacctggaagaaagcagcagctggtgagatcatttacaataaatgcccacctaatgcatccggttctgcctcccgccgatgtctcctgtctgctcagggcgtggcgtattggggcctgccgtcttttgccagatgcattagccacgagtataggtatctgtacctctccctgagggaacacctggctaaagggcaacggatgctagctggtgagggaatgtcacaggtggtgcgctccttgcaggaactactagcgcgacggacttactactccggggacttactcttcagtgtagacatcctacgcaatgtgacggatacatttaaacgggctacctacgttccatccgcagatgatgtgcagaggtttttccaagtagtctcattcatggttgacgctgagaacaaggaaaagtgggatgatgcacagcaagtctctcccggatctgtgcatcttctcagagtcgtggaagactttattcatctggtgggtgatgctctgaaggcatttcaatcctccctgattgtgacagataatctggtaattagcatccaaagggagcccgtttccgcagtttcctcggacatcacctttcctatgcgaggaagacgaggaatgaaggattgggtgcgccactccgaagatcgtctgttcctaccaaaggaggttctgagcctcagcagccctggtaaaccagcaacatccggtgcagctgggtcccccggacgaggccgagggccaggcaccgtgcctccaggaccaggccatagtcaccaacgcctgctacctgcggacccagacgaatcaagctatttcgtcatcggagctgtcctgtatcgtactttgggtttaattcttcctccgcctcgcccacccttagccgtgacatcaagagttatgaccgtcactgtcagaccaccaacccagccccctgcagagcccctcattaccgtggagctcagctacatcatcaatggaactacagatccccattgcgcatcatgggattactccagggcagacgcttcttcaggcgactgggataccgagaactgtcaaactttggagacccaggcagcccacactcggtgtcagtgccagcatttatctacattcgccgtgttggcccagccacccaaggacctcaccctagagctcgccggaagcccatctgtgcctctggtgattgggtgtgccgtgtcttgcatggcacttcttaccctgctggccatatatgcggctttttggaggtttataaagagcgaacggtccatcatcttactgaatttctgtctgagtatacttgccagcaacattctcatcctggttggacagagcagggttctctccaaaggagtctgcacaatgactgctgccttcctacacttcttttttctgagctccttctgttgggtgcttaccgaggcctggcagagctacttggcggtgattgggcgaatgcgaaccagactcgtgcgtaagagattcctctgcctgggatggggcctgcccgctctggtggttgcagtgtctgttggcttcacgaggacaaagggctacggcacctcttcgtactgttggctgtctttggaagggggactattgtatgccttcgttgggcctgccgctgtgatcgtgctagtcaatatgctgatcggcatcatcgtctttaacaagttgatggccagggatggcatctcagataagtcaaaaaagcagagagccggtgcatctctgtggtcatcttgtgttgttctgcccctcctggctctgacctggatgtccgccgtcctcgcaatgaccgataggagaagcgtgctgttccaggccttgttcgcagtattcaactccgcacaaggatttgttataaccgccgtccactgtttcctacgtcgtgaagttcaggatgtggtgaaatgccaaatgggagtctgcagagccgacgagtctgaagattctcctgatagttgcaagaatggtcagctccaaatactcagcgattttgaaaaggatgtggacctagcatgccagaccgtcttgttcaaagaggttaatacctgcaaccccagtacaatcaccggtacgctcagcagactaagcttggacgaggacgaggaacctaagtcctgcctggtggggcctgagggttctctgtcattcagccccctgccaggcaatatcctggtgccaatggcggcaagcccgggacttggggaaccccctccccctcaagaagccaatccggtgtatatgtgcggcgagggtggcctgcggcagctggacctgacgtggctgcggcctactgagccaggctccgagggcgactacatggttctgcccagacgaacattatctttgcagccagggggtggcggaggtggaggtgaggacgcccctagagccaggccggagggcacgcccagacgggcagccaaaaccgtggctcacacagaaggataccccagtttcctcagtgtggatcactctggtcttggcctcggacctgcttatggatctctccagaacccctatggcatgacctttcagcccccacctcctacaccatcggcgaggcaggtgcctgagcctggtgagcgttcccgcacaatgccaaggacagtgccgggtagcacaatgaaaatgggcagcttagagcgcaaaaagctcagatattctgacctggattttgaggttatgcacacacgaaagcgccattctgagctttaccacgagcttaatcagaaatttcacacgtttgacaggtatcgaagtcagtcaactgccaagcgcgagaagcggtggtcagtgtctagcggaggcgcagctgagcgctccgtgtgtaccgataagccctccccaggtgaacgcccaagcctgtcccagcacaggcgccatcaatcctggtccaccttcaaatccatgacgctcggaagcctgcccccaaagccacgcgaaaggcttaccctacatagagctgccgcttgggaaccgaccgagccacctgacggcgactttcagacagaggtttag

SEQ ID NO: 111628 - DNA, 4656 bp, Artificial Sequence
  derived and/or modified sequence
atggagaatacaggctggatggggaagggacaccgtatgacgcccgcatgcccactgctcctatctgtgattctttccctgagactcgccaccgctttcgatcccgctccatcggcttgttccgctcttgcatcaggtgtcctctacggggcttttagcctgcaggacctgtttcccaccatcgcatctgggtgctcttggacactggagaacccagatccaactaagtattctctgtatctgcgatttaatcgccaggaacaggtgtgtgcccactttgccccacgccttctgcctttagatcattatttggtcaacttcacttgcctgaggccttcgccggaagaagccgttgcccaggcagagtccgaagtcggaagacccgaagaagaagaagcggaggccgctgctggattggagctctgctccggttctggtccctttaccttcttgcactttgataagaacttcgtacaactttgtcttagtgccgagccgtcagaggccccacggttgctggcacccgcagccttggcattcaggttcgttgaagtattgctaattaacaacaataattcatcgcagttcacatgtggcgtgctgtgtcgatggtcagaagagtgtggacgtgctgctggacgcgcttgtggatttgcacaaccaggctgttcctgcccaggtgaggcaggagccggtagcaccacaacgacctcaccgggaccccctgcagcccataccctgagcaatgccttggtgcccggaggacctgctccaccagctgaagctgatctacattctggttcttcgaatgacctgttcaccactgaaatgagatatggcgaggagccagaagaagaaccaaaagtgaagactcaatggccaaggtccgccgacgagcctggcttgtacatggcacaaactggagaccctgcagcggaggagtggtcaccctggtcagtttgctcattgacgtgtgggcaagggctccaagttcgtaccagatcatgtgtctcatccccttatggcaccctttgcagtgggccactgcgcgagacacgcccttgtaacaattcagccacatgtcctgtccatggggtctgggaagaatggggttcttggtcgctctgttctaggtcctgtggccgagggagccggagtaggatgaggacctgtgtgccgcctcaacatgggggaaaggcctgtgaggggcctgaactccagactaaactctgctccatggctgcctgcccagtcgaaggccaatggcttgaatggggtccctggggtccttgttcgacaagctgtgccaatggcacccagcagcgatcgcgaaagtgtagcgtcgcaggccctgcgtgggccacatgtacgggggctctgaccgatacccgggaatgctccaatctggaatgcccggcaactgacagcaaatggggaccatggaacgcctggtccctctgctctaagacctgtgatacgggttggcagaggcgctttcgcatgtgccaggccacgggcacccagggatatccttgtgagggaactggtgaggaagtgaagccatgcagcgagaagaggtgtccggcattccacgaaatgtgccgtgacgaatatgtaatgcttatgacatggaagaaagcagccgctggcgagatcatctacaataagtgcccaccaaacgctagcggctctgcaagcaggcggtgcctgctcagcgctcagggggtggcgtactggggtctcccatcttttgccagatgcatttcacacgaatacaggtatctctatttatctctcagagagcacctggccaaaggccagagaatgctcgccggagaaggcatgtcgcaagttgtgaggtcactgcaggaactactggctaggcgaacgtactactcaggcgatctgctcttttcagttgatatactgaggaatgttacggacaccttcaagagggcaacatacgtgccctccgccgacgacgtacagagattctttcaggttgtgtcattcatggtggacgccgaaaataaagagaaatgggacgacgcccagcaagtctctcccggatcggtccatcttttaagggtggtggaggacttcatccaccttgtcggcgacgctcttaaagcatttcagagtagtttgatcgtcactgacaatttggtgataagtatccagagggaacccgtctctgccgtttcttccgatattacatttcctatgcgaggacggagaggaatgaaagattgggtccgtcactctgaggatcggctgtttctgccgaaagaggtcctgtctctgagctccccgggaaagcccgcaacttctggcgcagcgggaagcccagggaggggtaggggacctggtactgtcccccctggcccaggccactctcaccagcgtctcctccccgcagatcctgacgagtcaagctattttgtgattggcgcagttctgtacagaaccctgggcctgatactacctcctccacgtccccctctggctgtcacctccagggttatgaccgtcacggttcgacccccaacacagccacctgcagagcccttaattacagtcgaattgtcatacatcatcaatggcacaactgacccccactgcgctagctgggactactctagagctgatgcgtcttctggcgactgggatacggagaactgtcagactctcgaaacccaggccgcacatacccgctgtcagtgccagcatctaagcacattcgctgtgctggctcagcctccaaaggatttaacactggagttggctggctctccctcagtgccgctggtgattgggtgcgccgtgtcatgcatggcgcttctcactcttttggctatttacgcagcgttctggcgctttatcaagagcgagagatcgatcatcttgctaaacttctgtctgagcatccttgcctcaaacatcctaattctggtaggccagtccagagtgctatccaagggagtttgtacaatgactgctgctttccttcattttttcttcctgtcgagcttttgttgggtgctaacagaagcttggcagtcctatctcgctgttatcggccgtatgcgcaccaggctcgttcgaaaaagatttctctgtctggggtgggggcttccagcacttgttgtggcggtctccgtggggttcactcgcactaaaggctacggaaccagctcatactgctggctgagcctagaagggggtctgctgtacgctttcgtgggacccgcagccgtcatcgttctcgtgaacatgctgataggaatcattgtgtttaataaactcatggcacgagacgggatttcggacaagagcaagaagcagagggccggagccagcttgtggtcatcttgcgtggtgctcccactgttggctctgacatggatgtcggcagtcctcgcaatgaccgatcggagaagtgtgctctttcaggcactattcgccgtgttcaattctgcccagggcttcgtaattacagctgtacattgcttcctgcggagggaagttcaggacgtcgttaaatgccagatgggggtgtgtagagctgatgaatctgaggactcccctgactcatgcaagaatggccagctgcagatcctgtctgattttgaaaaggacgtcgatctcgcctgccagaccgtgttgttcaaggaggttaacacctgcaatccatccactattaccggcacactatctcggctctcactcgacgaagatgaggagccgaagtcttgtttggttggaccagaaggatctctgtcattcagccctttgccgggaaatatcctcgtgcctatggctgcaagcccaggcctcggcgaaccccctcctccccaggaagcgaatccagtgtacatgtgcggcgaaggcggacttaggcaattagacctaacttggctgcggcctaccgagccgggatccgaaggagattacatggttcttcccagacgaacactcagcttacagccaggagggggaggtggcggaggcgaggatgccccacgggcacgcccagagggcacccccagaagggccgctaagacggtggcacacacagagggatacccctcttttctgagtgtcgaccattccggtctggggctgggtcccgcttatggatctcttcagaacccttacggcatgactttccaacctcccccaccaacgccgtcagcacggcaggtgcctgaacctggtgagaggagtcgtactatgcccagaaccgttcccggatcaactatgaagatgggctccctagagcgcaagaagcttagatattccgacttggacttcgaagtgatgcacaccagaaaaagacacagtgaattgtaccatgaactcaatcagaaatttcatacattcgatcgatatagaagtcaatcaacggccaaaagggagaaaaggtggtcagtgtctagcggcggagccgcagaacggtctgtatgtacggataagcccagtccaggcgagcgtcccagtttgtctcagcaccgcaggcatcagtcctggtcgacatttaagtccatgactctgggttctttacctcctaagccaagagagcgtctgacccttcatagggccgctgcatgggagcccaccgagccacccgacggggactttcagaccgaagtgtag

SEQ ID NO: 111629 - DNA, 5312 bp, Artificial Sequence
  derived and/or modified sequence
ttttctgcacccgccgcccgggagagcgggagcctcggccctccgcgcggctgcagctacctaccctgcgcccggcccggtccccgacttagggatggcaaacttgcgccccgtggccgcccccgccagcgccggcccccgctcctgctgctgacggcgcccaggaaatccacagcagtgatacatgtgacgtccacactgacagtgccctcctgtgggcatggctcaggttgtgcgcagttcctggcacactggctgtaactccgcccctttctctccctctcagtaaagcaagattacgcggtgacatgcctcacagctgatcacgacacacggggatggagagcaagagttatggagaatacaggttggatgggcaagggacataggatgaccccagcctgtcccctcttactgtctgtgattctgtccctgcgcctggccaccgccttcgaccccgcccccagtgcctgctctgccctggcctcgggtgtgctctacggggccttctcgctgcaggacctctttcctaccatcgcctcgggctgctcctggaccctggagaaccctgaccccaccaagtactccctctacctgcgcttcaaccgccaggagcaggtgtgcgcacactttgccccccgcctgctgcccctggaccactacctggtcaactttacctgcctgcggcctagccccgaggaggcggtggcccaggcggagtcagaggtggggcggccagaagaggaggaggcagaggcggcagcggggttggagctgtgcagcggctcaggcccctttaccttcctgcacttcgacaagaacttcgtgcagctgtgcctgtcggctgagccctccgaggccccgcgcctgctggcgcccgctgccctagccttccgctttgtcgaggtcttgctcatcaacaacaacaactctagccaattcacctgtggtgtgctctgccgctggagtgaggagtgtggccgcgctgccggcagggcctgcggctttgctcagccaggctgcagctgccctggagaggcgggggccggctccaccaccaccacatctccaggccctcctgctgcccacaccctgtccaatgccctggtgcccgggggcccagccccacctgctgaggccgatttgcactcggggagcagcaatgatctgttcacaaccgagatgagatatggtgaggagccggaagaggaaccgaaagtgaaaacccagtggccgaggtctgcagatgagcctgggctatacatggcgcagacaggcgacccggcggctgaggagtggtccccgtggagcgtgtgttccctgacgtgtgggcagggtctgcaggtgcggacccgctcctgtgtgtcctccccctatgggaccctgtgcagcgggcccctgcgggagaccaggccctgcaacaattcagccacctgcccagtgcacggcgtgtgggaggagtgggggtcctggagcctgtgctcccgcagctgcgggcgggggtcccggagccggatgcggacctgcgtgcccccccagcacggcggcaaggcctgcgagggtcctgagctgcagactaagctctgcagtatggctgcctgcccggtggaaggccagtggttagaatggggtccctggggcccatgctccacgtcctgtgccaatgggacccaacagcgcagccggaagtgcagcgtggcgggcccagcctgggccacatgcacgggtgccctcactgacacccgggagtgcagcaacctcgagtgcccggccactgatagcaagtgggggccatggaatgcgtggagcctgtgctctaagacgtgtgacacaggctggcagcgccgcttccgcatgtgccaggccacgggcacgcagggctacccctgcgagggcaccggagaggaggtgaagccttgtagtgagaagaggtgtccagccttccatgagatgtgcagggatgagtacgtgatgctgatgacgtggaagaaggcagctgctggcgagatcatctacaacaagtgccccccgaatgcctcagggtctgccagccgccgctgtctcctcagtgcccaaggcgtggcgtactgggggctgcccagctttgctcgctgcatctcccatgagtaccgctacctgtatctgtcacttagggagcacctggccaaggggcagcgcatgctggcaggcgagggcatgtcgcaggtggtgcgcagcctgcaggagctactggcccggcgcacctactatagtggggacctgctcttctctgtggacattctgaggaatgtcactgacacctttaagagggccacctacgtgccctcggctgatgatgtgcagcgcttcttccaggtggtgagcttcatggtggatgcggaaaacaaggagaagtgggacgatgctcagcaggtgtcccctggctctgtgcacctgctccgtgtcgtggaggacttcattcacctggtgggcgatgctctcaaggccttccagagctctctgattgtcacagataatctagtgatcagcattcagcgagagcccgtctcagctgtgtccagtgacatcacgttccccatgcggggccgccggggcatgaaggactgggtgcggcactcagaggaccgcctcttcctgcccaaggaggtgctcagcctctcctccccagggaagccagccacatctggggcagcaggcagccctggcagggggaggggcccaggaacggtgcctcctggcccaggccactcccaccagcgcctcctcccagcagaccctgatgagtcctcctactttgtgatcggtgctgtactctaccgcacccttggcctcatcctgccgcctcccaggcccccgctggccgtcacatcccgggtgatgacagtgactgtgcgcccccctacccagcctccagctgagcccctcatcactgtggagctctcctacatcatcaatgggaccacggatccccattgcgccagctgggactactccagagcagatgccagctcaggagactgggacactgaaaattgccagaccctggagacccaggcagctcacacccgctgccagtgccagcacctgtccacctttgctgtactagcccagccgcccaaggacctgaccctggagctggcgggctccccctcggtccccctggtgatcggctgtgcagtgtcgtgcatggcgctgctcaccctgctcgccatctatgccgccttttggaggttcataaaatctgaacgctccatcatcttgctgaacttctgcctgtccatcttggcatccaacatcctgatcctcgtgggccagtcccgggtgctgagcaagggcgtgtgcaccatgacggctgccttcctgcacttcttctttctctcctccttttgctgggtgcttaccgaggcctggcagtcctacctggctgtcattgggcggatgcgcacccgcctcgttcgcaagcgcttcctctgcctgggctggggtctgcctgccctggtggtggccgtgtctgttggctttacccgaacgaaaggatacggtacatccagctactgctggctctccctggagggcggcctgctctacgcctttgtgggccctgcagccgtcattgtcctggtgaacatgctcatcggaatcatcgtcttcaacaagctcatggcacgtgatggcatctccgacaaatccaagaagcagagggccggggcctcactctggagctcctgcgtggtgctgcccctgctggcgctcacctggatgtctgccgtcctggctatgacagaccgccgttccgtcctcttccaggccctctttgctgtcttcaactccgcgcagggctttgtcatcactgctgtgcactgcttcctgcgccgagaggtccaggatgtggtgaagtgccagatgggggtgtgccgggctgatgagagcgaagactcccctgactcgtgtaagaacgggcagctgcagatcctgtcagactttgaaaaggatgtggatctggcttgtcaaacagtgctgttcaaggaggtcaacacttgcaacccgtccaccatcacgggcacactatcccgcctgtccctggatgaggatgaggagcccaagtcctgcctcgtgggccctgagggcagcctcagcttctcaccactgcctgggaatatcctggtgcccatggcagcctcaccagggctgggggagcctccgcccccacaggaggccaaccctgtttacatgtgtggggagggtggcctgcggcagctggacctcacatggctgcggcccactgagccaggctctgagggagactacatggtgctgccccggcggactttgagcctgcagcctggcggtgggggtggaggtggtgaggatgcccccagggcccggccggaggggaccccccggcgagctgccaagacagtggcccacactgaaggctaccccagcttcctgtccgtggaccactcgggcctggggctgggccctgcctatggatctctccagaatccctatggaatgaccttccaaccgccaccgccgacacccagcgcccgccaagtgcccgagccaggggagcgcagccggaccatgcctcgcaccgtgcccggctctaccatgaagatgggctccctggagcgaaagaaattacggtattcagacctggactttgaggtgatgcacacccggaaacggcattcagaactctaccacgagctcaaccagaagttccacactttcgaccgctaccgcagccagtccacggccaagagggagaagcggtggagtgtgtcctcgggtggggcagccgagcggagcgtgtgcaccgataagcccagccctggggagcgccccagcttgtcccaacatcggcgccatcagagctggagcaccttcaaatctatgacactgggctcgctgccccccaagccccgagaacggctgactctgcaccgggcagcagcctgggagcccacagaaccaccggatggtgacttccagacagaggtgtgagtgccacgctggactgcccactgcatataaatatatatatctctctattttcacactccactttggaactacccaggagccagcgccctctcccctctcccgagggctgggcagggaggcgccgtggactcagccaggctgggggagccggacatggcttggcctggggtcccagggcccttccttgtttctcagaggcccctcagccactggaaccccatcttcagcccagcctgtccgtccctgtcccgggctggggaggggggaggggaactttgttgggaataaacttcactctgtgg

SEQ ID NO: 111630 - DNA, 4919 bp, Artificial Sequence
  derived and/or modified sequence
cagctgatcacgacacacggggatggagagcaagagttatggagaatacaggttggatgggcaagggacataggatgaccccagcctgtcccctcttactgtctgtgattctgtccctgcgcctggccaccgccttcgaccccgcccccagtgcctgctctgccctggcctcgggtgtgctctacggggccttctcgctgcaggacctctttcctaccatcgcctcgggctgctcctggaccctggagaaccctgaccccaccaagtactccctctacctgcgcttcaaccgccaggagcaggtgtgcgcacactttgccccccgcctgctgcccctggaccactacctggtcaactttacctgcctgcggcctagccccgaggaggcggtggcccaggcggagtcagaggtggggcggccagaagaggaggaggcagaggcggcagcggggttggagctgtgcagcggctcaggcccctttaccttcctgcacttcgacaagaacttcgtgcagctgtgcctgtcggctgagccctccgaggccccgcgcctgctggcgcccgctgccctagccttccgctttgtcgaggtcttgctcatcaacaacaacaactctagccaattcacctgtggtgtgctctgccgctggagtgaggagtgtggccgcgctgccggcagggcctgcggctttgctcagccaggctgcagctgccctggagaggcgggggccggctccaccaccaccacatctccaggccctcctgctgcccacaccctgtccaatgccctggtgcccgggggcccagccccacctgctgaggccgatttgcactcggggagcagcaatgatctgttcacaaccgagatgagatatggtgaggagccggaagaggaaccgaaagtgaaaacccagtggccgaggtctgcagatgagcctgggctatacatggcgcagacaggcgacccggcggctgaggagtggtccccgtggagcgtgtgttccctgacgtgtgggcagggtctgcaggtgcggacccgctcctgtgtgtcctccccctatgggaccctgtgcagcgggcccctgcgggagaccaggccctgcaacaattcagccacctgcccagtgcacggcgtgtgggaggagtgggggtcctggagcctgtgctcccgcagctgcgggcgggggtcccggagccggatgcggacctgcgtgcccccccagcacggcggcaaggcctgcgagggtcctgagctgcagactaagctctgcagtatggctgcctgcccggtggaaggccagtggttagaatggggtccctggggcccatgctccacgtcctgtgccaatgggacccaacagcgcagccggaagtgcagcgtggcgggcccagcctgggccacatgcacgggtgccctcactgacacccgggagtgcagcaacctcgagtgcccggccactgatagcaagtgggggccatggaatgcgtggagcctgtgctctaagacgtgtgacacaggctggcagcgccgcttccgcatgtgccaggccacgggcacgcagggctacccctgcgagggcaccggagaggaggtgaagccttgtagtgagaagaggtgtccagccttccatgagatgtgcagggatgagtacgtgatgctgatgacgtggaagaaggcagctgctggcgagatcatctacaacaagtgccccccgaatgcctcagggtctgccagccgccgctgtctcctcagtgcccaaggcgtggcgtactgggggctgcccagctttgctcgctgcatctcccatgagtaccgctacctgtatctgtcacttagggagcacctggccaaggggcagcgcatgctggcaggcgagggcatgtcgcaggtggtgcgcagcctgcaggagctactggcccggcgcacctactatagtggggacctgctcttctctgtggacattctgaggaatgtcactgacacctttaagagggccacctacgtgccctcggctgatgatgtgcagcgcttcttccaggtggtgagcttcatggtggatgcggaaaacaaggagaagtgggacgatgctcagcaggtgtcccctggctctgtgcacctgctccgtgtcgtggaggacttcattcacctggtgggcgatgctctcaaggccttccagagctctctgattgtcacagataatctagtgatcagcattcagcgagagcccgtctcagctgtgtccagtgacatcacgttccccatgcggggccgccggggcatgaaggactgggtgcggcactcagaggaccgcctcttcctgcccaaggaggtgctcagcctctcctccccagggaagccagccacatctggggcagcaggcagccctggcagggggaggggcccaggaacggtgcctcctggcccaggccactcccaccagcgcctcctcccagcagaccctgatgagtcctcctactttgtgatcggtgctgtactctaccgcacccttggcctcatcctgccgcctcccaggcccccgctggccgtcacatcccgggtgatgacagtgactgtgcgcccccctacccagcctccagctgagcccctcatcactgtggagctctcctacatcatcaatgggaccacggatccccattgcgccagctgggactactccagagcagatgccagctcaggagactgggacactgaaaattgccagaccctggagacccaggcagctcacacccgctgccagtgccagcacctgtccacctttgctgtactagcccagccgcccaaggacctgaccctggagctggcgggctccccctcggtccccctggtgatcggctgtgcagtgtcgtgcatggcgctgctcaccctgctcgccatctatgccgccttttggaggttcataaaatctgaacgctccatcatcttgctgaacttctgcctgtccatcttggcatccaacatcctgatcctcgtgggccagtcccgggtgctgagcaagggcgtgtgcaccatgacggctgccttcctgcacttcttctttctctcctccttttgctgggtgcttaccgaggcctggcagtcctacctggctgtcattgggcggatgcgcacccgcctcgttcgcaagcgcttcctctgcctgggctggggtctgcctgccctggtggtggccgtgtctgttggctttacccgaacgaaaggatacggtacatccagctactgctggctctccctggagggcggcctgctctacgcctttgtgggccctgcagccgtcattgtcctggtgaacatgctcatcggaatcatcgtcttcaacaagctcatggcacgtgatggcatctccgacaaatccaagaagcagagggccggggcctcactctggagctcctgcgtggtgctgcccctgctggcgctcacctggatgtctgccgtcctggctatgacagaccgccgttccgtcctcttccaggccctctttgctgtcttcaactccgcgcagggctttgtcatcactgctgtgcactgcttcctgcgccgagaggtccaggatgtggtgaagtgccagatgggggtgtgccgggctgatgagagcgaagactcccctgactcgtgtaagaacgggcagctgcagatcctgtcagactttgaaaaggatgtggatctggcttgtcaaacagtgctgttcaaggaggtcaacacttgcaacccgtccaccatcacgggcacactatcccgcctgtccctggatgaggatgaggagcccaagtcctgcctcgtgggccctgagggcagcctcagcttctcaccactgcctgggaatatcctggtgcccatggcagcctcaccagggctgggggagcctccgcccccacaggaggccaaccctgtttacatgtgtggggagggtggcctgcggcagctggacctcacatggctgcggcccactgagccaggctctgagggagactacatggtgctgccccggcggactttgagcctgcagcctggcggtgggggtggaggtggtgaggatgcccccagggcccggccggaggggaccccccggcgagctgccaagacagtggcccacactgaaggctaccccagcttcctgtccgtggaccactcgggcctggggctgggccctgcctatggatctctccagaatccctatggaatgaccttccaaccgccaccgccgacacccagcgcccgccaagtgcccgagccaggggagcgcagccggaccatgcctcgcaccgtgcccggctctaccatgaagatgggctccctggagcgaaagaaattacggtattcagacctggactttgaggtgatgcacacccggaaacggcattcagaactctaccacgagctcaaccagaagttccacactttcgaccgctaccgcagccagtccacggccaagagggagaagcggtggagtgtgtcctcgggtggggcagccgagcggagcgtgtgcaccgataagcccagccctggggagcgccccagcttgtcccaacatcggcgccatcagagctggagcaccttcaaatctatgacactgggctcgctgccccccaagccccgagaacggctgactctgcaccgggcagcagcctgggagcccacagaaccaccggatggtgacttccagacagaggtgtgagtgccacgctggactgcccactgcatataaatatatatatctctctattttcacactccactttggaactacccaggagccagcgccctctcccctctcccgagggctgggcagggaggcgccgtggactcagccaggctgggggagccggacatggcttggcctggggtcccagggcccttccttgtttctcagaggcccctcagccactggaaccccatcttc

SEQ ID NO: 111631 - DNA, 4656 bp, Artificial Sequence
  derived and/or modified sequence
atggagaacaccggctggatgggcaagggccacagaatgacccccgcctgccccctgctgctgagcgtgatcctgagcctgagactggccaccgccttcgaccccgcccccagcgcctgcagcgccctggccagcggcgtgctgtacggcgccttcagcctgcaggacctgttccccaccatcgccagcggctgcagctggaccctggagaaccccgaccccaccaagtacagcctgtacctgagattcaacagacaggagcaggtgtgcgcccacttcgcccccagactgctgcccctggaccactacctggtgaacttcacctgcctgagacccagccccgaggaggccgtggcccaggccgagagcgaggtgggcagacccgaggaggaggaggccgaggccgccgccggcctggagctgtgcagcggcagcggccccttcaccttcctgcacttcgacaagaacttcgtgcagctgtgcctgagcgccgagcccagcgaggcccccagactgctggcccccgccgccctggccttcagattcgtggaggtgctgctgatcaacaacaacaacagcagccagttcacctgcggcgtgctgtgcagatggagcgaggagtgcggcagagccgccggcagagcctgcggcttcgcccagcccggctgcagctgccccggcgaggccggcgccggcagcaccaccaccaccagccccggcccccccgccgcccacaccctgagcaacgccctggtgcccggcggccccgccccccccgccgaggccgacctgcacagcggcagcagcaacgacctgttcaccaccgagatgagatacggcgaggagcccgaggaggagcccaaggtgaagacccagtggcccagaagcgccgacgagcccggcctgtacatggcccagaccggcgaccccgccgccgaggagtggagcccctggagcgtgtgcagcctgacctgcggccagggcctgcaggtgagaaccagaagctgcgtgagcagcccctacggcaccctgtgcagcggccccctgagagagaccagaccctgcaacaacagcgccacctgccccgtgcacggcgtgtgggaggagtggggcagctggagcctgtgcagcagaagctgcggcagaggcagcagaagcagaatgagaacctgcgtgcccccccagcacggcggcaaggcctgcgagggccccgagctgcagaccaagctgtgcagcatggccgcctgccccgtggagggccagtggctggagtggggcccctggggcccctgcagcaccagctgcgccaacggcacccagcagagaagcagaaagtgcagcgtggccggccccgcctgggccacctgcaccggcgccctgaccgacaccagagagtgcagcaacctggagtgccccgccaccgacagcaagtggggcccctggaacgcctggagcctgtgcagcaagacctgcgacaccggctggcagagaagattcagaatgtgccaggccaccggcacccagggctacccctgcgagggcaccggcgaggaggtgaagccctgcagcgagaagagatgccccgccttccacgagatgtgcagagacgagtacgtgatgctgatgacctggaagaaggccgccgccggcgagatcatctacaacaagtgcccccccaacgccagcggcagcgccagcagaagatgcctgctgagcgcccagggcgtggcctactggggcctgcccagcttcgccagatgcatcagccacgagtacagatacctgtacctgagcctgagagagcacctggccaagggccagagaatgctggccggcgagggcatgagccaggtggtgagaagcctgcaggagctgctggccagaagaacctactacagcggcgacctgctgttcagcgtggacatcctgagaaacgtgaccgacaccttcaagagagccacctacgtgcccagcgccgacgacgtgcagagattcttccaggtggtgagcttcatggtggacgccgagaacaaggagaagtgggacgacgcccagcaggtgagccccggcagcgtgcacctgctgagagtggtggaggacttcatccacctggtgggcgacgccctgaaggccttccagagcagcctgatcgtgaccgacaacctggtgatcagcatccagagagagcccgtgagcgccgtgagcagcgacatcaccttccccatgagaggcagaagaggcatgaaggactgggtgagacacagcgaggacagactgttcctgcccaaggaggtgctgagcctgagcagccccggcaagcccgccaccagcggcgccgccggcagccccggcagaggcagaggccccggcaccgtgccccccggccccggccacagccaccagagactgctgcccgccgaccccgacgagagcagctacttcgtgatcggcgccgtgctgtacagaaccctgggcctgatcctgcccccccccagaccccccctggccgtgaccagcagagtgatgaccgtgaccgtgagaccccccacccagccccccgccgagcccctgatcaccgtggagctgagctacatcatcaacggcaccaccgacccccactgcgccagctgggactacagcagagccgacgccagcagcggcgactgggacaccgagaactgccagaccctggagacccaggccgcccacaccagatgccagtgccagcacctgagcaccttcgccgtgctggcccagccccccaaggacctgaccctggagctggccggcagccccagcgtgcccctggtgatcggctgcgccgtgagctgcatggccctgctgaccctgctggccatctacgccgccttctggagattcatcaagagcgagagaagcatcatcctgctgaacttctgcctgagcatcctggccagcaacatcctgatcctggtgggccagagcagagtgctgagcaagggcgtgtgcaccatgaccgccgccttcctgcacttcttcttcctgagcagcttctgctgggtgctgaccgaggcctggcagagctacctggccgtgatcggcagaatgagaaccagactggtgagaaagagattcctgtgcctgggctggggcctgcccgccctggtggtggccgtgagcgtgggcttcaccagaaccaagggctacggcaccagcagctactgctggctgagcctggagggcggcctgctgtacgccttcgtgggccccgccgccgtgatcgtgctggtgaacatgctgatcggcatcatcgtgttcaacaagctgatggccagagacggcatcagcgacaagagcaagaagcagagagccggcgccagcctgtggagcagctgcgtggtgctgcccctgctggccctgacctggatgagcgccgtgctggccatgaccgacagaagaagcgtgctgttccaggccctgttcgccgtgttcaacagcgcccagggcttcgtgatcaccgccgtgcactgcttcctgagaagagaggtgcaggacgtggtgaagtgccagatgggcgtgtgcagagccgacgagagcgaggacagccccgacagctgcaagaacggccagctgcagatcctgagcgacttcgagaaggacgtggacctggcctgccagaccgtgctgttcaaggaggtgaacacctgcaaccccagcaccatcaccggcaccctgagcagactgagcctggacgaggacgaggagcccaagagctgcctggtgggccccgagggcagcctgagcttcagccccctgcccggcaacatcctggtgcccatggccgccagccccggcctgggcgagcccccccccccccaggaggccaaccccgtgtacatgtgcggcgagggcggcctgagacagctggacctgacctggctgagacccaccgagcccggcagcgagggcgactacatggtgctgcccagaagaaccctgagcctgcagcccggcggcggcggcggcggcggcgaggacgcccccagagccagacccgagggcacccccagaagagccgccaagaccgtggcccacaccgagggctaccccagcttcctgagcgtggaccacagcggcctgggcctgggccccgcctacggcagcctgcagaacccctacggcatgaccttccagccccccccccccacccccagcgccagacaggtgcccgagcccggcgagagaagcagaaccatgcccagaaccgtgcccggcagcaccatgaagatgggcagcctggagagaaagaagctgagatacagcgacctggacttcgaggtgatgcacaccagaaagagacacagcgagctgtaccacgagctgaaccagaagttccacaccttcgacagatacagaagccagagcaccgccaagagagagaagagatggagcgtgagcagcggcggcgccgccgagagaagcgtgtgcaccgacaagcccagccccggcgagagacccagcctgagccagcacagaagacaccagagctggagcaccttcaagagcatgaccctgggcagcctgccccccaagcccagagagagactgaccctgcacagagccgccgcctgggagcccaccgagccccccgacggcgacttccagaccgaggtgtag

SEQ ID NO: 111632 - protein, 70 aa, Artificial Sequence
  derived and/or modified sequence
MVAPAARVFLRAVRAALTSTVPDLLCLLARGSPRGLASGRLPLAVHSAQHGPGSGAPWLRIARRALSQRI

SEQ ID NO: 111633 - DNA, 213 bp, Artificial Sequence
  derived and/or modified sequence
atggttgccccagccgcacgtgtgttcttaagggcagtccgggctgctctgacctctactgtacctgatctgctctgtctcctggccagaggtagtccacgcggattagcatccgggcgtctgccccttgccgtgcacagcgctcagcatggacccggttctggggcaccatggctgcggattgccagacgagcactctcccagcgtatctag

SEQ ID NO: 111634 - DNA, 213 bp, Artificial Sequence
  derived and/or modified sequence
atggtggcaccagccgcacgagtctttctgcgagcggtgagagctgcactgacctccacagttcctgacctgctgtgcttattggctcgcggatcccctcgaggactggcttccggccggctgcccctcgccgtgcatagcgcccagcatgggccaggtagtggggccccttggttacgcatcgctagacgtgccctttcccaacgcatctag

SEQ ID NO: 111635 - DNA, 387 bp, Artificial Sequence
  derived and/or modified sequence
actaggcagaggccgcccgcggtcaggccaggccgggtccaattaggggactcacagcctgccccgctgtgcaccccgaggaggcccggcccctgtgtccaatccggaagtcgcagggaagtggggaggtcaggatggtggcgcccgcggctcgggtcttcctccgggcagtgcgcgcggctctcacttccacggtcccggacctgctctgcctcctggcccgaggctccccgcgtggcctcgcgtctggtcgcctacccctcgcggtccactccgcccagcatggacctggatccggggcgccttggttgcgaattgccaggagggccctgagccaaagaatttagaacgagtctacgtggacacgcaagtttcagcgagcgggga

SEQ ID NO: 111636 - DNA, 213 bp, Artificial Sequence
  derived and/or modified sequence
atggtggcccccgccgccagagtgttcctgagagccgtgagagccgccctgaccagcaccgtgcccgacctgctgtgcctgctggccagaggcagccccagaggcctggccagcggcagactgcccctggccgtgcacagcgcccagcacggccccggcagcggcgccccctggctgagaatcgccagaagagccctgagccagagaatctag

SEQ ID NO: 111637 - DNA, 213 bp, Artificial Sequence
  derived and/or modified sequence
atggtggcccctgccgccagggtattcttacgggccgttagggccgcgctgacttccacagtgcctgatctgctgtgtctcctggcccgcggatcccctcgagggttagccagcggacggctgcctctggccgtccattcagcccaacatgggcccggctccggtgctccgtggttgcggattgctcgccgagcgctatcccaaaggatctag

SEQ ID NO: 111638 - DNA, 213 bp, Artificial Sequence
  derived and/or modified sequence
atggtggccccagctgcccgggtcttcctgcgggctgtgcgggccgccctgaccagcacagtgcctgacctgctgtgcctgctggcccggggcagcccccggggcctggccagcggccgcctgcccctggccgtgcacagcgcccagcacggccctggcagcggggccccctggctgagaattgcccggcgggccctgagccagaggatctag

SEQ ID NO: 111639 - DNA, 213 bp, Artificial Sequence
  derived and/or modified sequence
atggtggcccccgccgcccgggtgttcctgcgggccgtgcgggccgccttaacatccactgtgcctgatcttttatgcctcctggcccggggctcaccgcgcggcttggcttcgggacggctgcctcttgcagtccattccgctcagcacggccccggaagcggcgcaccatggttgaggatcgccaggagggccttaagtcagcggatctag

SEQ ID NO: 111640 - RNA, 213 nt, Artificial Sequence
  derived and/or modified sequence
augguggcaccagccgcacgagucuuucugcgagcggugagagcugcacugaccuccacaguuccugaccugcugugcuuauuggcucgcggauccccucgaggacuggcuuccggccggcugccccucgccgugcauagcgcccagcaugggccagguaguggggccccuugguuacgcaucgcuagacgugcccuuucccaacgcaucuag

SEQ ID NO: 111641 - protein, 499 aa, Artificial Sequence
  derived and/or modified sequence
MPHPRRYHSSERGSRGSYREHYRSRKHKRRRSRSWSSSSDRTRRRRREDSYHVRSRSSYDDRSSDRRVYDRRYCGSYRRNDYSRDRGDAYYDTDYRHSYEYQRENSSYRSQRSSRRKHRRRRRRSRTFSRSSSQHSSRRAKSVEDDAEGHLIYHVGDWLQERYEIVSTLGEGTFGRVVQCVDHRRGGARVALKIIKNVEKYKEAARLEINVLEKINEKDPDNKNLCVQMFDWFDYHGHMCISFELLGLSTFDFLKDNNYLPYPIHQVRHMAFQLCQAVKFLHDNKLTHTDLKPENILFVNSDYELTYNLEKKRDERSVKSTAVRVVDFGSATFDHEHHSTIVSTRHYRAPEVILELGWSQPCDVWSIGCIIFEYYVGFTLFQTHDNREHLAMMERILGPIPSRMIRKTRKQKYFYRGRLDWDENTSAGRYVRENCKPLRRYLTSEAEEHHQLFDLIESMLEYEPAKRLTLGEALQHPFFARLRAEPPNKLWDSSRDISR

SEQ ID NO: 111642 - protein, 271 aa, Artificial Sequence
  derived and/or modified sequence
MFDWFDYHGHMCISFELLGLSTFDFLKDNNYLPYPIHQVRHMAFQLCQAVKFLHDNKLTHTDLKPENILFVNSDYELTYNLEKKRDERSVKSTAVRVVDFGSATFDHEHHSTIVSTRHYRAPEVILELGWSQPCDVWSIGCIIFEYYVGFTLFQTHDNREHLAMMERILGPIPSRMIRKTRKQKYFYRGRLDWDENTSAGRYVRENCKPLRRYLTSEAEEHHQLFDLIESMLEYEPAKRLTLGEALQHPFFARLRAEPPNKLWDSSRDISR

SEQ ID NO: 111643 - DNA, 816 bp, Artificial Sequence
  derived and/or modified sequence
atgttcgattggtttgactaccacggccacatgtgtatatcattcgagctcctaggattatcgacattcgacttcctaaaggacaacaactacctcccttatcccatccaccaggtaaggcatatggcttttcaactatgtcaggcggtcaagttcctgcacgataataaattaactcatacagacctgaagccagaaaatatactctttgttaattccgactacgaactgacatacaacttagagaaaaagagagacgaacggagcgtcaaatccacggcagtgagggtggtcgatttcgggtcagctacgttcgatcacgaacaccactccacaatagtgtctactaggcactacagggctcctgaggtcatcctggaactcggatggagccagccatgcgatgtctggtccatcggttgcatcatattcgagtattatgtcggatttaccttgtttcagacacatgataatcgggaacacctggcaatgatggagaggattcttggtcccatcccatcccgcatgattcgcaagactcggaagcaaaaatacttctaccgtggacgcttggattgggacgagaatactagtgctggcagatacgtgcgggaaaactgtaaaccacttagacgatacctcacctccgaggccgaggagcaccaccagctcttcgatctgatagaaagcatgctcgaatacgaaccagccaagagactgaccctgggcgaggccttacagcatcccttctttgctcggctacgcgccgagccccccaacaagctgtgggattcttccagggacataagcagatag

SEQ ID NO: 111644 - DNA, 816 bp, Artificial Sequence
  derived and/or modified sequence
atgtttgactggtttgactaccacggccacatgtgcatcagctttgagctgctgggcctgagcacctttgacttcctgaaggacaacaactacctgccctaccccatccaccaggtgcgccacatggccttccagctgtgccaggccgtgaagttcctgcatgacaacaagctgacccacacagacctgaagccagagaacatcctgtttgtgaacagcgactatgagctgacctacaacctggagaagaagagagatgagaggtctgtgaagagcacagctgtgcgggtggtggactttggcagcgccacctttgaccacgagcaccacagcaccatcgtgtccaccaggcactaccgggcccctgaggtgatcctggagctgggctggagccagccctgtgatgtgtggagcatcggctgcatcatctttgagtactacgtgggcttcaccctcttccagacccatgacaaccgggagcacctggccatgatggagcgcatcctgggccccatccccagcaggatgatcaggaagaccaggaagcagaagtacttctaccggggccgcctggactgggatgagaacaccagcgctggccgctacgtgcgggagaactgcaagcccctgcggcgctacctgaccagcgaggccgaggagcaccaccagctgtttgacctgattgagagcatgctggagtatgagcccgccaagaggctgaccctgggggaggccctgcagcaccccttctttgcccggctgcgggcagagccccccaacaagctgtgggacagcagccgggacatcagcaggtag

SEQ ID NO: 111645 - DNA, 816 bp, Artificial Sequence
  derived and/or modified sequence
atgttcgactggttcgactaccacggccacatgtgcatcagcttcgaactactcgggttgagcactttcgatttcctgaaagacaacaactacctcccttatccaatacatcaggtgcggcatatggcatttcagttgtgccaggctgtgaagtttctgcatgataataaactgacacacaccgatcttaagccagaaaatattctgtttgtaaatagtgactacgagttgacttacaacctggagaagaaaagagacgagagaagcgttaaaagtactgcagtgcgcgtcgtggacttcggctccgcgaccttcgaccacgaacaccactccaccatcgtgtcaactaggcactatagggcgccggaggttatactggaactcggttggtcgcagccctgcgacgtttggagtatagggtgcataatttttgaatattacgtcggctttacactgtttcaaacacacgataatagagagcatctcgccatgatggaacggatactgggaccaataccaagtaggatgatacggaagacgagaaagcagaaatacttttacaggggcaggctggattgggatgagaatacgagcgctgggcggtacgtgcgggagaattgcaagcccttgaggagatacttaacctctgaagccgaagaacaccatcagctgttcgatctcatagaaagcatgctggagtatgagccagccaagcgcctgaccttaggagaggcacttcagcaccctttctttgctcggttaagagccgagcctcctaacaagctctgggacagtagccgggacatctcccggtag

SEQ ID NO: 111646 - DNA, 816 bp, Artificial Sequence
  derived and/or modified sequence
atgtttgactggttcgactaccatggacatatgtgtatatctttcgaattactcggcttgagtacattcgattttttgaaggataacaactatttaccttaccctatccatcaggttaggcacatggcttttcaactctgccaagccgtaaaattcctccatgataataaactcacacatacggatttgaaaccggaaaacatcttgtttgtcaactcagattatgagcttacttataatcttgagaagaaaagagatgagagaagcgtcaagagcactgcggtgcgggtagtcgattttggatcggcaacctttgaccatgagcatcattctaccatcgtgagcacacgccattatagggccccagaggtaatcctcgaactgggctggtcacaaccctgcgacgtgtggagtattggctgtataatattcgagtattacgttggtttcacactgttccagacacacgacaacagggagcatttggcaatgatggaaaggatcctcgggccaatcccatccaggatgatacgtaagactcggaaacaaaaatacttctatagaggacgtctggattgggacgagaacacttccgccggacgttacgtcagggagaactgtaagcctctccggagatacttgacctcagaggcggaagaacaccatcagctgttcgatctgattgagtctatgctcgaatatgaacctgccaaacggctgaccctcggagaagccttgcagcatccattctttgcccgacttagagcagagccacccaataagctgtgggactccagtcgggatatcagtcggtag

SEQ ID NO: 111647 - DNA, 816 bp, Artificial Sequence
  derived and/or modified sequence
atgttcgactggttcgactaccacggccacatgtgcatcagcttcgagctgctgggcctgagcaccttcgacttcctgaaggacaacaactacctgccctaccccatccaccaggtgagacacatggccttccagctgtgccaggccgtgaagttcctgcacgacaacaagctgacccacaccgacctgaagcccgagaacatcctgttcgtgaacagcgactacgagctgacctacaacctggagaagaagagagacgagagaagcgtgaagagcaccgccgtgagagtggtggacttcggcagcgccaccttcgaccacgagcaccacagcaccatcgtgagcaccagacactacagagcccccgaggtgatcctggagctgggctggagccagccctgcgacgtgtggagcatcggctgcatcatcttcgagtactacgtgggcttcaccctgttccagacccacgacaacagagagcacctggccatgatggagagaatcctgggccccatccccagcagaatgatcagaaagaccagaaagcagaagtacttctacagaggcagactggactgggacgagaacaccagcgccggcagatacgtgagagagaactgcaagcccctgagaagatacctgaccagcgaggccgaggagcaccaccagctgttcgacctgatcgagagcatgctggagtacgagcccgccaagagactgaccctgggcgaggccctgcagcaccccttcttcgccagactgagagccgagccccccaacaagctgtgggacagcagcagagacatcagcagatag

SEQ ID NO: 111648 - protein, 560 aa, Artificial Sequence
  derived and/or modified sequence
MAGPTEAETGLAEPRALCAQRGHRTYARRWVFLLAISLLNCSNATLWLSFAPVADVIAEDLVLSMEQINWLSLVYLVVSTPFGVAAIWILDSVGLRAATILGAWLNFAGSVLRMVPCMVVGTQNPFAFLMGGQSLCALAQSLVIFSPAKLAALWFPEHQRATANMLATMSNPLGVLVANVLSPVLVKKGEDIPLMLGVYTIPAGVVCLLSTICLWESVPPTPPSAGAASSTSEKFLDGLKLQLMWNKAYVILAVCLGGMIGISASFSALLEQILCASGHSSGFSGLCGALFITFGILGALALGPYVDRTKHFTEATKIGLCLFSLACVPFALVSQLQGQTLALAATCSLLGLFGFSVGPVAMELAVECSFPVGEGAATGMIFVLGQAEGILIMLAMTALTVRRSEPSLSTCQQGEDPLDWTVSLLLMAGLCTFFSCILAVFFHTPYRRLQAESGEPPSTRNAVGGADSGPGVDRGGAGRAGVLGPSTATPECTARGASLEDPRGPGSPHPACHRATPRAQGPAATDAPSRPGRLAGRVQASRFIDPAGSHSSFSSPWVIT

SEQ ID NO: 111649 - DNA, 1683 bp, Artificial Sequence
  derived and/or modified sequence
atggccggccccaccgaggccgagaccggcctggccgagcccagagccctgtgcgcccagagaggccacagaacctacgccagaagatgggtgttcctgctggccatcagcctgctgaactgcagcaacgccaccctgtggctgagcttcgcccccgtggccgacgtgatcgccgaggacctggtgctgagcatggagcagatcaactggctgagcctggtgtacctggtggtgagcacccccttcggcgtggccgccatctggatcctggacagcgtgggcctgagagccgccaccatcctgggcgcctggctgaacttcgccggcagcgtgctgagaatggtgccctgcatggtggtgggcacccagaaccccttcgccttcctgatgggcggccagagcctgtgcgccctggcccagagcctggtgatcttcagccccgccaagctggccgccctgtggttccccgagcaccagagagccaccgccaacatgctggccaccatgagcaaccccctgggcgtgctggtggccaacgtgctgagccccgtgctggtgaagaagggcgaggacatccccctgatgctgggcgtgtacaccatccccgccggcgtggtgtgcctgctgagcaccatctgcctgtgggagagcgtgccccccaccccccccagcgccggcgccgccagcagcaccagcgagaagttcctggacggcctgaagctgcagctgatgtggaacaaggcctacgtgatcctggccgtgtgcctgggcggcatgatcggcatcagcgccagcttcagcgccctgctggagcagatcctgtgcgccagcggccacagcagcggcttcagcggcctgtgcggcgccctgttcatcaccttcggcatcctgggcgccctggccctgggcccctacgtggacagaaccaagcacttcaccgaggccaccaagatcggcctgtgcctgttcagcctggcctgcgtgcccttcgccctggtgagccagctgcagggccagaccctggccctggccgccacctgcagcctgctgggcctgttcggcttcagcgtgggccccgtggccatggagctggccgtggagtgcagcttccccgtgggcgagggcgccgccaccggcatgatcttcgtgctgggccaggccgagggcatcctgatcatgctggccatgaccgccctgaccgtgagaagaagcgagcccagcctgagcacctgccagcagggcgaggaccccctggactggaccgtgagcctgctgctgatggccggcctgtgcaccttcttcagctgcatcctggccgtgttcttccacaccccctacagaagactgcaggccgagagcggcgagccccccagcaccagaaacgccgtgggcggcgccgacagcggccccggcgtggacagaggcggcgccggcagagccggcgtgctgggccccagcaccgccacccccgagtgcaccgccagaggcgccagcctggaggaccccagaggccccggcagcccccaccccgcctgccacagagccacccccagagcccagggccccgccgccaccgacgcccccagcagacccggcagactggccggcagagtgcaggccagcagattcatcgaccccgccggcagccacagcagcttcagcagcccctgggtgatcacctag

SEQ ID NO: 111650 - DNA, 1683 bp, Artificial Sequence
  derived and/or modified sequence
atggctggaccaaccgaggctgagactggcctggccgagccacgagccctctgtgcacagcgcggccatcggacatatgctcgtaggtgggtattcctgctcgccatcagcctcctgaattgcagtaatgctactctgtggctgtctttcgccccagtagcagatgttatcgccgaagacttggtccttagcatggaacaaattaattggctctctttagtctacctggtcgtttccacacctttcggcgtggccgccatctggattctggacagcgtggggctccgagctgcaacaatcctgggcgcctggttgaatttcgcaggatctgtgctgcgaatggttccctgtatggtggtgggaactcagaaccctttcgctttcctgatgggaggacagtccctgtgcgctcttgcccagtccctagttatattttccccagctaagttggcagcgttgtggtttccagagcaccagcgcgcgacagcaaatatgctggcaaccatgtcaaacccactgggcgtcctagtggctaacgttctcagcccggtgttagtgaagaaaggggaggacatacctctcatgctcggcgtttacactatccccgcaggtgtggtgtgtcttctctctacgatctgcctctgggaaagcgttccccctacacctccatccgcaggtgcagcatcctccaccagtgaaaaattcctagacggcctgaaattgcaactgatgtggaataaggcatatgtaattcttgcagtatgtctcggcggaatgattggcatatctgcaagcttcagcgccctcttagaacaaatactatgtgcctccggccatagttccgggttttccggtctgtgcggtgcattgtttattacattcggcatcttaggggctctcgcgttggggccttacgtggacagaactaaacacttcacagaagcgaccaaaatcggcctttgtctcttcagcctcgcctgcgtgcccttcgcactggtatcacaacttcagggccagaccttggctctggccgccacctgtagcttgctgggcctcttcggattcagtgtgggacctgtggcgatggagctggcagtggaatgttcctttcctgtcggggagggagctgcaaccgggatgatatttgtgcttgggcaggccgaaggcattctaataatgctcgctatgaccgctttgactgttcgaaggtcggagccgtcgctttcaacttgtcagcagggggaagacccactcgactggacagtatccttgcttctgatggccggcctctgcacctttttcagctgtattctggcggtcttcttccacacgccataccggagactccaggccgagtccggcgagccaccttctactcgcaacgcagtggggggtgccgatagcggcccaggtgtggacagaggtggcgcaggcagagcaggagtcctgggtccctcaacagcaacacctgagtgcactgcccgaggagcttccctggaggacccaagagggccaggcagcccgcaccccgcctgtcaccgagctactcctcgcgcccagggacctgccgctaccgacgcaccttctcggccaggtcggctcgccggacgtgttcaggccagcagatttatcgatcccgccgggtcccattcctccttttcttcaccttgggtgattacgtag

SEQ ID NO: 111651 - DNA, 1826 bp, Artificial Sequence
  derived and/or modified sequence
gtggaggccgccgacgatggcggggccgacggaggccgagacggggttggccgagccccgggccctgtgcgcgcagcggggccaccgcacctacgcgcgccgctgggtgttcctgctcgcgatcagcctgctcaactgctccaacgccacgctgtggctcagctttgcacctgtggctgacgtcattgctgaggacttggtcctgtccatggagcagatcaactggctgtcactggtctacctcgtggtatccaccccatttggcgtggcggccatctggatcctggactccgtcgggctccgtgcggcgaccatcctgggtgcgtggctgaactttgccgggagtgtgctacgcatggtgccctgcatggttgttgggacccaaaacccatttgccttcctcatgggtggccagagcctctgtgcccttgcccagagcctggtcatcttctctccagccaagctggctgccttgtggttcccagagcaccagcgagccacggccaacatgctcgccaccatgtcgaaccctctgggcgtccttgtggccaatgtgctgtcccctgtgctggtcaagaagggtgaggacattccgttaatgctcggtgtctataccatccctgctggcgtcgtctgcctgctgtccaccatctgcctgtgggagagtgtgccccccaccccgccctctgccggggctgccagctccacctcagagaagttcctggatgggctcaagctgcagctcatgtggaacaaggcctatgtcatcctggctgtgtgcttggggggaatgatcgggatctctgccagcttctcagccctcctggagcagatcctctgtgcaagcggccactccagtgggttttccggcctctgtggcgctctcttcatcacgtttgggatcctgggggcactggctctcggcccctatgtggaccggaccaagcacttcactgaggccaccaagattggcctgtgcctgttctctctggcctgcgtgccctttgccctggtgtcccagctgcagggacagacccttgccctggctgccacctgctcgctgctcgggctgtttggcttctcggtgggccccgtggccatggagttggcggtcgagtgttccttccccgtgggggagggggctgccacaggcatgatctttgtgctggggcaggccgagggaatactcatcatgctggcaatgacggcactgactgtgcgacgctcggagccgtccttgtccacctgccagcagggggaggatccacttgactggacagtgtctctgctgctgatggccggcctgtgcaccttcttcagctgcatcctggcggtcttcttccacaccccataccggcgcctgcaggccgagtctggggagcccccctccacccgtaacgccgtgggcggcgcagactcagggccgggtgtggaccgagggggagcaggaagggctggggtcctggggcccagcacggcgactccggagtgcacggcgaggggggcctcgctagaggaccccagagggcccgggagcccccacccagcctgccaccgagcgactccccgtgcgcaaggcccagcagccaccgacgcgccctcccgccccggcagactcgcaggcagggtccaagcgtccaggtttattgacccggctgggtctcactcctccttctcctccccgtgggtgatcacgtagctgagcgccttgtagtccaggttgcccgccacatcgatggaggcgaactggaacatctggtccacctgcgggcgggggcgaaagggctccttgcgggctccgggagcgaattacaagcgcgcacctg

SEQ ID NO: 111652 - DNA, 1683 bp, Artificial Sequence
  derived and/or modified sequence
atggccggccccacagaagctgagaccggcctggccgagccccgggccctgtgtgcccagaggggccacaggacctacgcccggcgctgggtgttcctgctggccatcagcctgctgaactgcagcaatgccaccctgtggctgagctttgcccctgtggctgatgtgattgctgaggacctggtgctgtccatggagcagatcaactggctgagcctggtgtacctggtggtgtccacccccttcggcgtggccgccatctggatcctggacagcgtgggcctgcgggccgccaccatcctgggcgcctggctgaactttgctggctctgtgctgaggatggtgccctgcatggtggtgggcacccagaacccctttgccttcctgatgggcggccagagcctgtgtgccctggcccagagcctggtgatcttctccccagccaagctggccgccctgtggttccctgagcaccagagggccacagccaacatgctggccaccatgagcaaccccctgggcgtgctggtggccaacgtgctgagccctgtgctggtgaagaagggggaggacatccccctgatgctgggcgtgtacaccatcccagctggggtggtgtgcctgctgagcaccatctgcctgtgggagagcgtgccccccaccccacccagcgctggagctgccagcagcaccagcgagaagttcctggatggcctgaagctgcagctgatgtggaacaaggcctacgtgatcctggccgtgtgcctgggcggcatgattggcatcagcgccagcttcagcgccctgctggagcagatcctgtgtgccagcggccacagcagcggcttcagcggcctgtgtggggccctcttcatcaccttcggcatcctgggcgccctggccctgggcccctacgtggacaggaccaagcacttcacagaggccaccaagattggcctgtgcctcttcagcctggcctgtgtgccctttgccctggtgtcccagctgcagggccagaccctggccctggccgccacctgcagcctgctgggcctgtttggcttctctgtgggccctgtggccatggagctggccgtggagtgcagcttccctgtgggggagggcgccgccaccggcatgatctttgtgctgggccaggccgagggcatcctgatcatgctggccatgacagccctgactgtgcggcgctctgagcccagcctgagcacctgccagcagggcgaggaccccctggactggacagtgtccctgctgctgatggccggcctgtgcaccttcttcagctgcatcctggccgtgttcttccacaccccctacagaaggctgcaggccgagagcggggagccccccagcaccagaaatgctgtgggcggcgctgacagcggccctggggtggacagaggaggagctggccgggccggcgtgctgggccccagcacagccaccccagaatgtacagcccggggggccagcctggaggacccccggggccctggcagcccccacccagcctgccaccgggccaccccccgggcccagggccctgctgccacagatgcccccagcaggcctggccgcctggccggccgggtgcaggccagccgcttcatcgaccctgctggcagccacagcagcttcagcagcccctgggtgatcacctag

SEQ ID NO: 111653 - DNA, 1683 bp, Artificial Sequence
  derived and/or modified sequence
atggccggccccaccgaggccgagaccggcctggccgagccccgggccctttgcgcccagaggggccaccgtacttacgcaaggaggtgggtattcttgctcgctatttccctgctgaactgttccaatgccaccctttggttgagttttgcacccgtcgcagacgtgatcgctgaggaccttgtcctttctatggagcagatcaactggctgtcactggtttacctggttgtgtccacacccttcggcgtggcagcaatttggatcttagattcagtcggtctccgcgccgctactatcttaggcgcctggctgaactttgcgggatctgtgttacgcatggttccctgtatggtcgtgggcacccagaatccttttgcattcctaatgggcggacaaagtctttgcgctctagcccagtccctggttatttttagtccagcaaagctagccgccctctggttcccagaacaccagagggccaccgctaatatgctggctaccatgtccaaccccctgggggtcctggtcgcaaatgtactatctcctgtcctggtgaaaaagggcgaagatatcccattgatgctcggagtgtacactatcccagccggtgtggtctgcctgctgtcgaccatatgtttgtgggagtcggtgcccccaacccccccttctgctggagccgcctcctccacatccgagaaattcttggatggtctgaagttgcagttaatgtggaataaggcctatgtaattctggcggtgtgtcttggcgggatgatcggcatctcagcttctttttccgccctgctggagcagatcctgtgcgcctctggtcactcctccggcttctcagggctgtgtggcgctttatttatcacctttggcatccttggcgccttagcgttgggtccgtacgtggatagaacaaaacactttactgaagctacgaaaataggcttatgtctttttagcctagcgtgcgtgcccttcgccctggtctcacaattgcagggccagactctggcactagcggccacatgctcccttctcgggctcttcggatttagcgtcggccccgttgccatggagctcgctgtcgagtgtagtttccctgttggtgagggagctgctacggggatgatatttgtgctggggcaagcggagggaatcctcattatgctcgctatgacagctctcaccgtgagaaggagcgagccatccctctcgacatgtcaacagggggaggatccacttgactggacagtatcacttcttcttatggccggtctttgtacttttttctcctgcatcctggccgtgttttttcatacaccttacaggagacttcaggccgagtcgggggaacctcccagcaccagaaatgccgttggaggcgcagactccggcccaggcgtcgaccggggaggtgctgggcgtgcaggcgtgctaggtccgtcaactgcaaccccggaatgtaccgcacgcggggcctccctcgaggacccccgaggtcctggttcgcctcaccccgcctgtcaccgagctactccacgtgctcaaggtcctgcagcaactgacgccccttctaggccggggcgattggcaggacgggtccaagcttctaggttcatcgacccagctggttcgcacagttctttctcctcaccttgggtgatcacctag

SEQ ID NO: 111654 - DNA, 1683 bp, Artificial Sequence
  derived and/or modified sequence
atggccggtcctacagaggccgagacaggattagcggaacctagagccctgtgtgcccaacgaggacacagaacgtacgccaggcgctgggtgtttctcttagccattagccttctgaattgttctaacgccactctgtggctgagctttgcacccgtggccgatgtgatcgcagaagacctggttctatctatggagcagatcaattggctgtctcttgtgtatctggtggtgagcaccccgtttggtgtggccgcaatatggatactggattctgtgggactgcgagctgccaccattctcggcgcatggctcaattttgctggaagcgtgttacggatggtgccgtgcatggtcgtgggtacgcaaaacccattcgcattcttaatggggggtcagagtttatgtgccctggcacagtcgctcgtgatcttttccccagcgaagctggccgctctgtggtttccggagcaccagcgtgccaccgccaatatgctagctactatgtcaaaccctctaggtgtgctggtagccaatgttctgtcacctgtcttggtgaaaaagggcgaggacatcccccttatgttgggagtatacaccatacccgctggggtggtatgcctgctctctactatatgtctgtgggagtcagtgccccctactcccccttccgctggagccgcaagttctacttccgagaagttcttggacggccttaagctgcagctcatgtggaataaagcctatgtgatcttagcagtctgtctcgggggaatgataggcatcagcgcctcgttttcagcgctgctggaacaaatattatgtgcatcggggcatagttcaggcttctctggcttgtgcggcgcactcttcataacctttggaatcctgggcgcattagccctcggtccgtacgtggaccggacaaaacacttcacggaggcaaccaagattggcctgtgcctcttctcactggcttgtgtgccgtttgctctcgtttcacagctgcagggacaaacgttggccctcgcggcaacgtgttccctgttaggactgtttggattttccgtggggcctgtggccatggagctggccgtagagtgcagtttccctgtcggcgagggagccgctaccgggatgatttttgttttaggacaggcagaaggtattctcataatgctggccatgacggcgctgactgtcagacggagcgagccatctctgtctacctgccaacagggcgaggacccccttgattggactgttagcctgctacttatggccggtctctgcacattcttttcatgtatccttgccgttttcttccataccccttacagacgtctgcaggccgaaagcggcgaaccaccatctacccgcaacgccgtaggcggtgccgacagtggacctggcgttgataggggaggcgcagggcgtgcaggcgtgctaggtccaagtaccgcaacacccgaatgtactgccagaggcgcatcactggaagatccccgaggtccagggagcccgcacccggcttgtcatcgagcaaccccacgggcacaaggtcccgctgctaccgacgccccaagtcgccctggcaggctggctggcagggttcaggcttccaggttcatagacccagccggaagccacagttcatttagctccccctgggtaatcacatag

SEQ ID NO: 111655 - protein, 441 aa, Artificial Sequence
  derived and/or modified sequence
MAGPTEAETGLAEPRALCAQRGHRTYARRWVFLLAISLLNCSNATINWLSLVYLVVSTPFGVAAIWILDSVGLRAALGVYTIPAGVVCLLSTICLWESVPPTPPSAGAASSTSEKFLDGLKLQLMWNKAYVILAVCLGGMIGISASFSALLEQILCASGHSSGFSGLCGALFITFGILGALALGPYVDRTKHFTEATKIGLCLFSLACVPFALVSQLQGQTLALAATCSLLGLFGFSVGPVAMELAVECSFPVGEGAATGMIFVLGQAEGILIMLAMTALTVRRSEPSLSTCQQGEDPLDWTVSLLLMAGLCTFFSCILAVFFHTPYRRLQAESGEPPSTRNAVGGADSGPGVDRGGAGRAGVLGPSTATPECTARGASLEDPRGPGSPHPACHRATPRAQGPAATDAPSRPGRLAGRVQASRFIDPAGSHSSFSSPWVIT

SEQ ID NO: 111656 - DNA, 1326 bp, Artificial Sequence
  derived and/or modified sequence
atggccggccccaccgaggccgagaccggcctggccgagcccagagccctgtgcgcccagagaggccacagaacctacgccagaagatgggtgttcctgctggccatcagcctgctgaactgcagcaacgccaccatcaactggctgagcctggtgtacctggtggtgagcacccccttcggcgtggccgccatctggatcctggacagcgtgggcctgagagccgccctgggcgtgtacaccatccccgccggcgtggtgtgcctgctgagcaccatctgcctgtgggagagcgtgccccccaccccccccagcgccggcgccgccagcagcaccagcgagaagttcctggacggcctgaagctgcagctgatgtggaacaaggcctacgtgatcctggccgtgtgcctgggcggcatgatcggcatcagcgccagcttcagcgccctgctggagcagatcctgtgcgccagcggccacagcagcggcttcagcggcctgtgcggcgccctgttcatcaccttcggcatcctgggcgccctggccctgggcccctacgtggacagaaccaagcacttcaccgaggccaccaagatcggcctgtgcctgttcagcctggcctgcgtgcccttcgccctggtgagccagctgcagggccagaccctggccctggccgccacctgcagcctgctgggcctgttcggcttcagcgtgggccccgtggccatggagctggccgtggagtgcagcttccccgtgggcgagggcgccgccaccggcatgatcttcgtgctgggccaggccgagggcatcctgatcatgctggccatgaccgccctgaccgtgagaagaagcgagcccagcctgagcacctgccagcagggcgaggaccccctggactggaccgtgagcctgctgctgatggccggcctgtgcaccttcttcagctgcatcctggccgtgttcttccacaccccctacagaagactgcaggccgagagcggcgagccccccagcaccagaaacgccgtgggcggcgccgacagcggccccggcgtggacagaggcggcgccggcagagccggcgtgctgggccccagcaccgccacccccgagtgcaccgccagaggcgccagcctggaggaccccagaggccccggcagcccccaccccgcctgccacagagccacccccagagcccagggccccgccgccaccgacgcccccagcagacccggcagactggccggcagagtgcaggccagcagattcatcgaccccgccggcagccacagcagcttcagcagcccctgggtgatcacctag

SEQ ID NO: 111657 - DNA, 1326 bp, Artificial Sequence
  derived and/or modified sequence
atggccggtcctaccgaagctgagactggcctggccgagccgcgcgctttgtgtgctcagcgcgggcacaggacctatgctcgccggtgggtttttctgctggcgatctctctgctaaactgctctaacgccaccatcaactggttgagcctcgtctatctagtggtttccacaccctttggagtggctgccatctggatcctagattccgtcggcctccgcgccgctctgggtgtgtacaccatccccgccggggtggtttgcctcctatccactatatgtctgtgggaatctgtgcctcctactcctccatccgccggcgcagcttcttccacatctgagaagttcctggacggcttgaagttgcaactcatgtggaacaaggcgtacgtcattctggctgtctgcctaggcggtatgattgggatttcggccagcttctcagctctgttggaacagattttgtgtgcatccggccactctagcggattttctggactctgtggcgctctttttatcacatttggaatcttaggcgcactggcgctggggccctacgtcgatcgcaccaaacacttcactgaggcaacgaagatcggcctgtgcctattcagcctggcatgcgttccatttgctttagtatctcagctgcagggtcagacactagctctcgctgccacttgtagtttgctcggactgtttggattttccgtggggccggtggctatggagctcgccgttgaatgcagttttcccgtgggggaaggtgccgctaccggcatgatcttcgtactggggcaggccgagggcatcctcatcatgctagcaatgaccgctttgactgtgagaagatctgagcctagcctcagtacatgccagcagggtgaggaccccctggattggactgtgtctctgctcctgatggccggtttgtgtaccttcttctcttgtatcctagccgtattcttccatactccctacagaagactacaggccgagagcggggagcctcctagtacccgaaatgctgtaggaggcgccgactcgggaccgggtgtggaccggggaggagcaggtcgtgcaggcgtgttggggccatcaaccgccacaccggagtgtaccgcccgcggagcatctctcgaagaccctagaggcccagggagtccacatccagcctgccaccgcgccactccaagagcacagggtccggccgccaccgacgctccgtccagacccggccgactcgccgggagggtgcaggcttcccgattcatcgacccggccggcagccactcttcattctctagcccctgggttatcacctag

SEQ ID NO: 111658 - DNA, 1599 bp, Artificial Sequence
  derived and/or modified sequence
gtagtccttggggcggaactggccccccgtggcccggcccggcccggccccacctccgcccgcaggcggtcccggcccacgcgggaaggtccttaagcccgggcggccggcgggaccggcggagacccgtggaggccgccgacgatggcggggccgacggaggccgagacggggttggccgagccccgggccctgtgcgcgcagcggggccaccgcacctacgcgcgccgctgggtgttcctgctcgcgatcagcctgctcaactgctccaacgccacgatcaactggctgtcactggtctacctcgtggtatccaccccatttggcgtggcggccatctggatcctggactccgtcgggctccgtgcggcgctcggtgtctataccatccctgctggcgtcgtctgcctgctgtccaccatctgcctgtgggagagtgtgccccccaccccgccctctgccggggctgccagctccacctcagagaagttcctggatgggctcaagctgcagctcatgtggaacaaggcctatgtcatcctggctgtgtgcttggggggaatgatcgggatctctgccagcttctcagccctcctggagcagatcctctgtgcaagcggccactccagtgggttttccggcctctgtggcgctctcttcatcacgtttgggatcctgggggcactggctctcggcccctatgtggaccggaccaagcacttcactgaggccaccaagattggcctgtgcctgttctctctggcctgcgtgccctttgccctggtgtcccagctgcagggacagacccttgccctggctgccacctgctcgctgctcgggctgtttggcttctcggtgggccccgtggccatggagttggcggtcgagtgttccttccccgtgggggagggggctgccacaggcatgatctttgtgctggggcaggccgagggaatactcatcatgctggcaatgacggcactgactgtgcgacgctcggagccgtccttgtccacctgccagcagggggaggatccacttgactggacagtgtctctgctgctgatggccggcctgtgcaccttcttcagctgcatcctggcggtcttcttccacaccccataccggcgcctgcaggccgagtctggggagcccccctccacccgtaacgccgtgggcggcgcagactcagggccgggtgtggaccgagggggagcaggaagggctggggtcctggggcccagcacggcgactccggagtgcacggcgaggggggcctcgctagaggaccccagagggcccgggagcccccacccagcctgccaccgagcgactccccgtgcgcaaggcccagcagccaccgacgcgccctcccgccccggcagactcgcaggcagggtccaagcgtccaggtttattgacccggctgggtctcactcctccttctcctccccgtgggtgatcacgtagctgagcgccttgtagtccaggttgcccgccacatcgatggaggcgaactggaacatctggtccacctgcgggcgggggcgaaagggctccttgcgggctccgggagcgaattacaagcgcgcacctgca

SEQ ID NO: 111659 - DNA, 1326 bp, Artificial Sequence
  derived and/or modified sequence
atggccggccccacagaagctgagaccggcctggccgagccccgggccctgtgtgcccagaggggccacaggacctacgcccggcgctgggtgttcctgctggccatcagcctgctgaactgcagcaatgccaccatcaactggctgagcctggtgtacctggtggtgtccacccccttcggcgtggccgccatctggatcctggacagcgtgggcctgcgggccgccctgggcgtgtacaccatcccagctggggtggtgtgcctgctgagcaccatctgcctgtgggagagcgtgccccccaccccaccttctgctggggccgccagcagcaccagcgagaagttcctggatggcctgaagctgcagctgatgtggaacaaggcctacgtgatcctggccgtgtgcctgggcggcatgattggcatcagcgccagcttcagcgccctgctggagcagatcctgtgtgccagcggccacagcagcggcttcagcggcctgtgtggggccctcttcatcaccttcggcatcctgggcgccctggccctgggcccctacgtggacaggaccaagcacttcacagaggccaccaagattggcctgtgcctcttcagcctggcctgtgtgccctttgccctggtgtcccagctgcagggccagaccctggccctggccgccacctgcagcctgctgggcctgtttggcttctctgtgggccctgtggccatggagctggccgtggagtgcagcttccctgtgggggagggcgccgccaccggcatgatctttgtgctgggccaggccgagggcatcctgatcatgctggccatgacagccctgactgtgagaagaagtgagcccagcctgagcacctgccagcagggcgaggaccccctggactggacagtgtccctgctgctgatggccggcctgtgcaccttcttcagctgcatcctggccgtgttcttccacaccccctaccgccgcctgcaggccgagagcggggagccccccagcaccagaaatgctgtgggcggcgctgacagcggccctggggtggaccggggcggggccggccgggccggcgtgctgggccccagcacagccaccccagagtgcacagcccggggggccagcctggaggacccccggggccctggcagcccccacccagcctgccaccgggccaccccccgggcccagggccctgctgccacagatgcccccagccggcccggccgcctggccggccgggtgcaggccagccgcttcattgatcctgctggcagccacagcagcttcagcagcccctgggtgatcacctag

SEQ ID NO: 111660 - DNA, 1326 bp, Artificial Sequence
  derived and/or modified sequence
atggccggccccaccgaggccgagaccggcctggccgagccccgggctctctgtgcccaaaggggtcatagaacatatgcaaggcgctgggtgtttctgctcgcgattagtcttctgaattgcagcaacgctactataaactggctcagtctggtgtacttagtggtaagcacgcccttcggggtggccgcaatttggattttagacagcgtgggtttacgcgcggcgttaggcgtgtataccattccagcaggcgtggtgtgtttgttaagcacaatctgtctctgggagagcgtaccccctacacccccctcggcaggcgctgcttcttccacatctgagaagttcctggatggcctaaagctgcaactgatgtggaataaagcttacgttattttagccgtttgcctgggaggcatgatcgggatttccgcttccttctccgctctcttggagcagattctctgcgccagcgggcatagctcagggttcagcggtctgtgcggggcccttttcattacatttggtattttgggcgccctcgctctcggaccttacgtcgacagaacaaaacattttaccgaggctactaaaattggcctgtgccttttttccctggcctgcgtcccattcgccctggttagccaattgcagggccagaccctggcactggcagcgacctgctcacttctcggcctgttcggcttttccgtgggaccagtggccatggaattggcggttgaatgtagtttcccagtgggtgagggtgccgcgactgggatgatcttcgtcttgggccaagccgagggcattcttattatgctcgctatgaccgccctgacagtccggcgttcagagcctagcttaagcacgtgccagcagggagaagatccgctggattggactgtctctttactgctgatggccggactgtgcacctttttcagttgtattttagctgtctttttccacaccccataccgccgtttacaggcagagagcggggagccacctagtactaggaatgctgtggggggggccgattccgggcccggcgtcgatagaggaggcgcagggcgcgctggtgtcctgggaccttccaccgccacccccgaatgtacagcacggggcgcctcactcgaagatccgcgagggcccggttcaccacaccctgcctgtcatcgggccacacctcgggcacagggccccgccgccaccgatgctccgtctcggccgggccgattagctggcagggtgcaggcgtctcgtttcatagatcccgcaggcagccattcatcgtttagctcgccatgggttataacatag

SEQ ID NO: 111661 - DNA, 1326 bp, Artificial Sequence
  derived and/or modified sequence
atggctggacccacagaggcagagaccggtttggcggagccccgtgcgctgtgcgcccagagaggccatcgcacatacgccagaagatgggtctttttgctcgccatctctctactgaactgttccaatgctacaatcaactggctaagcttagtgtatctagtggtcagcacacccttcggtgtggcagcaatctggattttggactctgtgggcctaagagccgcactgggagtgtataccattcccgcaggggtcgtgtgtctccttagcaccatctgtctatgggaatccgtgccacctacccccccttccgctggagccgcttctagtacctctgagaagtttttagacggcctgaagttgcagctcatgtggaacaaggcttatgtgatcctagctgtctgcctcggcggtatgataggtatatcagcctcatttagtgcactgttggaacagatactgtgcgccagtgggcattcctccggcttttctgggttgtgtggagctctctttattacgtttggcatcctcggggcacttgccctggggccatacgtcgatagaaccaagcacttcactgaggctacaaaaatcggcttatgcctgttctctctggcttgcgtgccctttgccttagtcagccagttacagggccagaccttggctttagccgctacctgcagtctgctggggctgtttggctttagcgtcgggcctgtggctatggaactcgccgttgagtgtagtttccctgttggcgagggggctgctaccggaatgatttttgtgctggggcaggctgaaggcatcttgataatgctggctatgacagcactcacagtcaggcgcagcgaaccaagccttagcacctgccaacaaggtgaggacccgctggattggactgtcagtttgctgctgatggctggactgtgtacgttcttctcatgtattcttgctgtgttctttcatacaccgtataggaggcttcaggccgagtccggagagcctccctcaacacggaacgctgtagggggagccgatagcggccctggggtggatcggggtggggcaggtcgcgcaggcgtccttggtcccagtactgccacccccgagtgcacggccagaggggcatcgctcgaggatcccaggggccctggctcaccgcaccctgcttgccaccgggctacacctagggctcagggcccagcagccactgacgctccgtcacgtcccggacgcttggctggaagggtgcaggccagccgctttatcgatccagctggatcccacagcagtttttcatccccatgggtaattacatag

SEQ ID NO: 111662 - protein, 693 aa, Artificial Sequence
  derived and/or modified sequence
MLGKGVVGGGGGTKAPKPSFVSYVRPEEIHTNEKEVTEKEVTLHLLPGEQLLCEASTVLKYVQEDSCQHGVYGRLVCTDFKIAFLGDDESALDNDETQFKNKVIGENDITLHCVDQIYGVFDEKKKTLFGQLKKYPEKLIIHCKDLRVFQFCLRYTKEEEVKRIVSGIIHHTQAPKLLKRLFLFSYATAAQNNTVTDPKNHTVMFDTLKDWCWELERTKGNMKYKAVSVNEGYKVCERLPAYFVVPTPLPEENVQRFQGHGIPIWCWSCHNGSALLKMSALPKEQDDGILQIQKSFLDGIYKTIHRPPYEIVKTEDLSSNFLSLQEIQTAYSKFKQLFLIDNSTEFWDTDIKWFSLLESSSWLDIIRRCLKKAIEITECMEAQNMNVLLLEENASDLCCLISSLVQLMMDPHCRTRIGFQSLIQKEWVMGGHCFLDRCNHLRQNDKEEVPVFLLFLDCVWQLVHQHPPAFEFTETYLTVLSDSLYIPIFSTFFFNSPHQKDTNMHQRQLSLPLTQSKSSPKRGFFREETDHLIKNLLGKRISKLINSSDELQDNFREFYDSWHSKSTDYHGLLLPHIEGPEIKVWAQRYLRWIPEAQILGGGQVATLSKLLEMMEEVQSLQEKIDERHHSQQAPQAEAPCLLRNSARLSSLFPFALLQRHSSKPVLPTSGWKALGDEDDLAKREDEFVDLGDV

SEQ ID NO: 111663 - DNA, 2082 bp, Artificial Sequence
  derived and/or modified sequence
atgctgggcaagggcgttgtcggaggaggtgggggaaccaaagctccaaagccgtctttcgtatcctatgtgaggcccgaagaaatccacaccaacgaaaaagaggtgacggagaaggaggtaaccctccacttgcttccgggggaacagctcctctgcgaggcctctaccgtgctgaaatatgttcaggaggatagttgccagcacggtgtctacggcaggctagtgtgcacagattttaagatagcattcctgggtgacgacgaatcagcactggacaacgatgagacacagtttaagaacaaggttatcggagagaacgacatcaccctccactgtgtggaccaaatttatggagtctttgacgagaagaaaaagaccttgttcggtcagctgaaaaaatacccagagaaacttattatccattgcaaggacctcagggtttttcagttctgcttgcgatatacaaaagaagaggaggttaagcgaatcgtgagcggtattatccatcacacgcaggcaccaaagttgctgaagcgcttgttcctgttctcctatgctaccgctgcccagaataacaccgtaacggatcctaagaatcacactgtcatgttcgacaccctgaaggattggtgctgggagctcgaaaggacaaaaggcaatatgaagtataaggcagtctccgtcaacgagggctacaaagtgtgcgaacggcttcctgcgtatttcgtggtgcccaccccccttccggaagaaaatgttcagcgcttccagggccacgggatcccaatctggtgctggtcatgtcacaacggatctgccctgctcaagatgtctgcattacccaaggagcaggacgacggcattcttcagattcagaaatctttcctggacgggatctacaaaaccattcatcgaccaccttacgagatagtgaaaaccgaagacctaagttcaaattttctgtccctccaggagattcagaccgcttattctaagttcaagcagttgttcttgattgacaactcaactgagttttgggacacggatattaagtggttttccttgttagagtcttcatcctggctggatatcattagacgatgcctgaagaaagctatcgagatcaccgaatgtatggaggcacagaatatgaacgtgctccttcttgaagagaatgcctcggacctgtgctgcctgatctcttcgctggtgcagctgatgatggaccctcactgtcggaccagaatcggattccaaagtctgattcagaaggaatgggtgatgggtggacattgtttccttgataggtgcaatcatctacggcaaaacgacaaggaagaagtgccagtattcttgctctttctggattgcgtgtggcagctagtccaccagcacccccctgccttcgagtttactgagacctacttaaccgtgctgagcgactcactgtacatccctatctttagtacctttttctttaactcccctcaccagaaagacacaaacatgcaccaacgtcagctgagccttccactgacacagagtaaaagcagtcccaagcgtgggtttttccgggaggagacagatcacctgataaaaaacctgttgggcaagcggatctccaagctgataaattccagtgacgagctgcaggacaactttcgggagttctatgacagctggcatagtaaatccacagactaccatggcctgctgttaccccacattgagggcccagagatcaaagtttgggctcaacgctaccttcggtggattccagaagcgcagatattgggcggtgggcaggtggccacactctctaagctgctggaaatgatggaggaagtgcagagcctgcaggagaagatcgacgagcggcatcacagtcaacaggccccacaggcggaggctccttgtctattgcggaacagtgcccgactgtcatctctgtttccctttgcgctccttcagcgccatagttcaaagcccgtgcttccaacatcaggatggaaagccctgggcgatgaggacgacctcgcaaaacgcgaagacgagttcgtggacctgggggacgtgtag

SEQ ID NO: 111664 - DNA, 2082 bp, Artificial Sequence
  derived and/or modified sequence
atgctgggcaagggcgtggtgggcggcggcggcggcaccaaggcccccaagcccagctttgtgtcctatgtgcggcctgaggagatccacaccaatgagaaggaggtgacagagaaggaggtgaccctgcacctgctgcctggagagcagctgctgtgtgaggccagcacagtgctgaagtatgtgcaggaggacagctgccagcacggcgtgtatggccgcctggtgtgcacagacttcaagatcgccttcctgggagatgatgagagcgccctggacaatgatgagacccagttcaagaacaaggtgattggagaaaatgacatcaccctgcactgtgtggaccagatctacggcgtgtttgatgagaagaagaagaccctgtttggccagctgaagaagtacccagagaagctgatcatccactgcaaggacctgcgggtcttccagttctgcctgcgctacaccaaggaggaggaggtgaagagaattgtgtctggcatcatccaccacacccaggcccccaagctgctgaagaggctcttcctgttctcctatgccacagctgcccagaacaacacagtgacagaccccaagaaccacacagtgatgtttgacaccctgaaggactggtgctgggagctggagaggaccaagggcaacatgaagtacaaggctgtgtctgtgaatgaaggctacaaggtgtgtgagcggctgcctgcctactttgtggtgcccacccccctgcctgaggagaatgtgcagcgcttccagggccacggcatccccatctggtgctggagctgccacaatggaagtgccctgctgaagatgtctgccctgcccaaggagcaggatgatggcatcctgcagatccagaagagcttcctggatggcatctacaagaccatccacaggcctccctatgaaattgtgaagacagaggacctgagcagcaacttcctgagcctgcaggagatccagacagcctacagcaagttcaagcagctgttcctgattgacaacagcacagagttctgggacacagacatcaagtggttcagcctgctggagagcagctcctggctggacatcatccgccgctgcctgaagaaggccatcgagatcacagagtgcatggaggcccagaacatgaatgtgctgctgctggaggagaatgccagtgacctgtgctgcctgatcagcagcctggtgcagctgatgatggacccccactgcaggaccagaattggcttccagagcctcatccagaaggagtgggtgatgggcggccactgcttcctggaccgctgcaaccacctgcggcagaatgacaaggaggaggtgcctgtgttcctgctcttcctggactgtgtgtggcagctggtgcaccagcaccccccagcctttgagttcacagagacctacctgactgtgctgagtgacagcctgtacatccccatcttcagcaccttcttcttcaacagcccccaccagaaggacaccaacatgcaccagaggcagctgagcctgcccctgacccagagcaagagcagccccaagaggggcttcttccgggaggagacagaccacctgatcaagaacctgctgggcaagaggatcagcaagctgatcaacagcagtgatgagctgcaggacaacttccgggagttctatgacagctggcacagcaagagcacagactaccacggcctgctgctgccccacatcgagggccctgagatcaaggtgtgggcccagcgctacctgcgctggatccctgaggcccagatcctgggcggcggccaggtggccaccctgagcaagctgctggagatgatggaggaggtgcagagcctgcaggagaagattgatgagcggcaccacagccagcaggccccccaggccgaggccccctgcctgctgagaaattctgcccggctgagcagcctcttcccctttgccctgctgcagaggcacagcagcaagcctgtgctgcccaccagcggctggaaggccctgggagatgaagatgacctggccaagcgggaggatgaatttgtggacctgggagatgtgtag

SEQ ID NO: 111665 - DNA, 4966 bp, Artificial Sequence
  derived and/or modified sequence
gagccccagccgctagtgctggtggccgccgctgctgccccagctggagcccgagccgccgcctctgcgtccgcgcgtcgctgcttcccagggcggcggtatgctggggaaaggagtagtcggcggtggcggcggcaccaaggcccccaagccctccttcgtgtcgtacgtacgccctgaggaaattcacacaaacgaaaaggaagtaacagagaaggaagtaactcttcacttgttgccaggtgaacagctgctttgtgaagccagcacagtactgaagtatgtccaggaagattcctgtcagcatggggtctatgggaggcttgtctgcacagacttcaagattgccttcttgggtgatgatgaatctgcattggataatgatgaaactcaatttaagaataaggttataggagaaaatgacattacactccactgtgttgatcagatttatggagtgtttgatgagaaaaagaaaactctctttggacaactgaagaaataccctgagaagctcatcatccactgcaaagaccttcgagtgttccagttttgtctgaggtacacaaaggaagaggaagtcaaaaggattgtcagtggcataattcatcatacccaggctcctaaactgcttaaacgattatttctgttttcctatgcgactgctgcacaaaacaatacagtcactgatcccaagaaccataccgtaatgtttgacacacttaaggactggtgttgggaactggaacggaccaaaggcaacatgaagtacaaagcagtgagtgtcaacgaaggctataaagtctgtgagagattgccagcatactttgttgtccccacccctcttcctgaagagaatgtgcagcgctttcagggtcatggcataccaatatggtgttggtcctgccacaatggaagtgcccttttgaaaatgtcagcactgcccaaagaacaggatgacggcattttacaaatccaaaagagcttcttagatggaatttacaagaccatccacaggccaccctatgaaattgttaaaacggaagacctgtcaagcaacttcctgtccctgcaggaaatccagactgcatactctaaatttaaacagctatttctgatagataacagtactgaattttgggacacagatataaaatggttttctctgttggaaagtagcagctggcttgacataatcagacgttgcctgaaaaaagcaatagagattacagaatgtatggaagcacaaaacatgaatgttcttcttttagaggagaatgcatccgacctctgctgtctcatttcctctctggtgcaactgatgatggacccccactgcagaaccagaattggtttccagagcctcatccaaaaggagtgggtcatgggtggccactgtttcttggatcgctgcaaccatctccgccagaacgacaaagaggaggttcctgtgttcctgcttttcctagattgtgtctggcagctggtgcaccagcatcccccggcatttgaattcacagagacttacctgactgttttgtcagatagcctgtatatacctatttttagcaccttcttcttcaattcacctcatcaaaaagatactaacatgcatcaacgacaactttctttgccacttacacaatctaagtcatctcccaaaagaggatttttcagggaagaaacagatcatttaattaaaaaccttctgggcaagagaattagcaaacttattaattcttctgatgagctccaagacaactttcgagagttctatgacagctggcatagcaagtccactgactaccatggtttgttgttaccgcatatcgaggggcccgaaatcaaagtctgggcccagcgctacctacgttggattccagaagcccaaatcctaggtggtggccaagtggccactctgagcaaactcttggaaatgatggaggaagtccagagtttacaagagaagatcgacgagagacaccacagccagcaggccccccaggctgaggccccctgcctgctgaggaactctgcccgcctctcgtctttgtttcctttcgctctgctccagcgacattcctctaagcccgtcttacccaccagtggctggaaagctttgggagatgaagacgatttggccaaacgagaagatgagttcgtggacctaggggatgtgtgacctgtttgttgagtgattgtgaaagaggaatgtgggagattgggacagctgatccctggatttgtgtcacgctacagctcatgctggctgggtccttagcccggcactccgttagaataaacctgggccttcgggaaaagaggtggctctcattatttttcatgattctaaaagactatgcaattaaaaccgcatctgtagtattactaattggaaggaattattacttgacccgtaatagggttgtggccgttttctgatgcctaagtattatacagagcccacaatggccagtttactaccagaaagggcttcagtaagatattcttggacttgatactttcttcagatcctctttgtgccaagataatttatccagtcattgggaatagtaagtttctgtgtaacccatctcaattatagaagcaagttcagctttatgtatttgtatggggagttgaagattcagatagaggtattaagatgtgtggcatttacttaaaccatcacatttttttctttctacgcccccttgcctgtaaaacacctgggaagttccactggtgtcatccatcctgatgcttcagaccaccctcccttcttcacagaccgtgtcactttgcctgtgggtgggggctagccagccaccaccctcttttctgtgctgccagccccaggtcttcctccgcctgctccacaccactcgccgctgtccctctgcactccctgccttggtgcgtgtagtcccagtgtctcactgccaaacctcttggttacgctgcggggatctgtttctttgcctgagatccttcctgaggagcgtccattcctctggagtctctccttgtttggaacaaatcgcttcgcctttttctacttgcctgctgaagctttggagcacttgtgattgcagttttctgccgcaacccctgagccgagttcctcacattcttttacctttatggactgatgggattgggtcacttttgaatgtggctttcataggaaagcagcttaaacataaatatcagaagtgatgattatcatatgatacctcagtgattttaaaagccatagaagaaacttgactatgcctggtcaccttcttggatctgctgtctaaatgatatatatatgatatatatgtgatatatatatatcatatatatgatatatatatatatatcacatatatatgatatatatatgatatatatatatcacatatatatgatatatatatcatatatatgatatatattttttttaatgcaggaaagtatactttgtaaggagcagatttttttgttctcagtggaaccctgtcaaatcgcataaaagaggaaaaaaacaaaactcattagaatgttttaaattgaatgttcgccttttacatatatttgctcttcagtatggatcccaatttgaatgttacatgttcggaaaaactttcagttgctcaagggcaataagaaaatttgaggccgggtgtggtggctcacgcctgtaatcccagcactttgggaggctcaggtgggcgaattgcttgagcccaggagttcgagaccagccggggcaacatggcaaaaccctgtctctactaaaaatacaaaaattagctgggtgtggtggtgcatgcctgtagtcccagctactcgggaggctgaggtgggaggatcccgtgagcctgggaggtggagtttgcagtgagctaagatcgtgccactgcactccggcctgggtgatggagcaagacctcgtctcagaaaattggaaactattgactaagagaagtttctaggtttgcactgaattgtcttttgtacatacagtgaattgttttgctgttctccccactccatattaatgcaggagccaggttggtctgttaggatgaacaaaggttgaggggagggcaggattcgtgcatctgggggccaaacacatgttccgtcttgattgccttaagagttactagcgaggtcagtgttaggcttgcaatagggattttaaaatacactaactagttccttagctaccttcacatacattctataggccttcttaaattagcactaacctccacttccttctctgccccattgcctcccaaatatgctatggagctatttttgttaccacgttataacgtgaatatttatacagtagcctcttcaggctttgtaattttcattccaaaaatgcccggtgtgatgctttacactctacaaagtatggtttaaaggcacaaggtcatggcctttgtcatagcagttgaatgtgcattgacatatttttctatgattttttaaaattacaatagaaaaataagctgttgtaacgtgtaaggtcatgacaatttttgtatttatatttgaaatcagatttctataactcgtatttgtgtacagaattctcaatggatttatatattgtgaaatttttatctgagattgggatgtggattatgcttaacagtgagagctgaaatgagaccatttactttgtttaaaatgctgtactgtgcaagtttggaaatgtaaattaatttactgtatataatatcttgagtttgtttatacctccaagtttttacactgaagataaactagctttaattcaaaactttttttttctttataagggaataagctgttgagctaaacctgtatacttgtgctttttattttctggatgcacaatgaaagtttatacttgtatctcactgcatcatatctgattgcagaaattaaagcacaatttacaagcaatactgtacttggt

SEQ ID NO: 111666 - DNA, 2082 bp, Artificial Sequence
  derived and/or modified sequence
atgctgggcaagggcgtggtgggcggcggcggcggcaccaaggcccccaaaccatcatttgtatcctatgtgcggcccgaggaaatacacacaaacgaaaaggaagtgaccgaaaaagaagttacactgcaccttctgcctggggaacaactgctgtgcgaggcttccactgtgctgaaatatgtgcaggaagactcgtgtcagcacggagtatacggccgcttggtgtgcacagatttcaaaatcgctttcctcggtgacgatgaatctgccctagataacgatgagacccaattcaagaataaagtgatcggtgagaacgacataactctgcactgtgtcgaccaaatttatggtgtgtttgacgagaaaaagaagactttgtttggccagcttaaaaagtaccccgagaagctaattattcattgtaaggacctaagagtatttcagttttgtctccgatatacaaaggaggaggaagtcaagcgcatcgtgagtggaattatacatcacacacaagcccctaaactcctgaagagattgtttctattttcctatgccacagcagcacaaaacaacaccgtgacagatcctaaaaaccatacagtgatgtttgacacgctcaaggactggtgttgggagctcgagcgcaccaaggggaatatgaaatacaaagccgtgtcagtgaatgagggctataaggtatgtgagcgtctgccggcttactttgtggtgccaacaccattgcctgaggagaatgtccagagattccagggccacggaatcccaatttggtgctggtcttgccacaatggaagcgctctgctcaaaatgtccgccctgccgaaggaacaggacgacggcatattgcaaatacaaaagtcttttctcgacgggatttataaaaccatccaccgaccaccgtacgaaattgtgaagactgaagacctgtctagtaattttctgagcctccaggaaatccagactgcttactctaagttcaaacaactcttcctcatcgacaactcaaccgagttctgggatactgatatcaagtggttttcattactggaaagttctagctggcttgacatcatccggcggtgtctgaagaaagcaatcgaaatcacagagtgcatggaagcacaaaatatgaacgtgcttctgcttgaggagaacgcctcagacctgtgttgccttattagcagtctcgtgcagctcatgatggatccccattgtcgcacccggataggattccaatctctgattcagaaggaatgggttatgggaggccattgcttcctggatcgctgcaatcacctgcgccagaatgacaaagaagaggtccctgtctttctcctctttttagactgcgtctggcagcttgtccatcagcaccctcctgcctttgaatttacagaaacctatttgactgttctatctgacagcctctacatcccaatctttagcacctttttcttcaactcacctcaccagaaggataccaacatgcaccagaggcagttaagcttaccgttgacgcaatcaaagtcgagccccaaacgcggctttttccgcgaggagaccgatcatttaataaagaatctcctgggtaagcgtatcagcaagctgatcaactcatcggatgagctacaggacaacttccgagaattctatgatagctggcattccaaaagcacagactaccatgggctgttactaccacacatcgaggggccagagatcaaggtttgggcccagagataccttagatggatccccgaggcccaaattctcggtggcggtcaagtggcgaccctttctaagttgttggagatgatggaggaagtacaatcactgcaggagaagattgacgaacgacaccactcccagcaggctccccaggcagaagccccttgcctgcttaggaattctgctcggctgtccagtctctttcccttcgctctcctccagcggcatagctcaaagccagtgcttcccactagtgggtggaaggcactgggagacgaggatgatctggctaagagagaagatgagttcgtcgatctgggcgacgtgtag

SEQ ID NO: 111667 - DNA, 2082 bp, Artificial Sequence
  derived and/or modified sequence
atgctcggtaagggggtggtggggggaggaggaggcacaaaagcaccaaagccgagtttcgtaagctacgtccgacccgaagaaattcatactaacgaaaaagaggtgaccgaaaaggaagtgacgctgcacctgctcccaggtgaacagcttctatgcgaagcttccaccgttctcaaatatgttcaggaggacagctgtcagcacggggtatacggtcgattagtgtgtactgactttaagatcgccttcctgggcgatgacgagtcagccctggacaatgatgagacccagttcaagaacaaggttatcggcgaaaatgacatcacgctgcactgtgttgaccagatctatggagtcttcgatgaaaagaagaaaactctgtttggccagctcaagaagtatcctgagaaactcataatccactgcaaggacctgcgagttttccagttttgtctgcgctacacaaaggaagaggaggtgaagagaatagtgtccggcatcatccatcatacacaggcccctaaactcctcaagaggctgttcttgttctcttacgctacagcagcgcagaacaacactgtgactgatcccaaaaatcataccgtcatgtttgacacgctgaaggattggtgctgggaactcgaaaggaccaaggggaacatgaagtacaaggctgttagtgtgaatgaaggttacaaagtgtgtgagaggctcccggcttattttgtcgtccctacgccacttccagaggaaaatgtacaacgattccagggtcacggcataccaatatggtgctggtcatgtcacaacggctctgcgctcctgaagatgtcagccctgccaaaggagcaagatgacggcatcctgcaaatccagaagtcattcctggacggtatctataaaacaatccaccgccctccttatgagatcgtgaagacagaggacctcagtagcaatttccttagcctgcaggaaatccaaacagcatattccaaatttaagcagttgtttttgatcgacaactccacagaattttgggatactgacatcaaatggttttctctcctcgagagctcaagttggcttgacatcatcagacggtgcttgaagaaggccatcgagataaccgagtgcatggaggcccagaacatgaacgtccttctgctcgaggagaatgcctccgatttgtgttgtcttattagtagccttgtgcagctcatgatggacccacattgcaggacgaggatcggatttcagagcctgatccaaaaggagtgggtgatgggcggtcactgctttttggaccggtgtaatcatctgaggcagaatgacaaagaagaggtacccgtgtttttgctgtttctagactgtgtgtggcaactggtccaccagcatccgccagcattcgaattcaccgagacatacctgaccgttctctctgactccctgtatattcctatcttttccacctttttttttaactccccgcaccaaaaggacacaaacatgcatcaacgacaacttagtcttcccttgacacagagcaagtccagcccaaagagagggttttttcgtgaagaaacagaccacctgatcaagaaccttctgggaaaacgaatctctaagctgattaatagtagcgatgagttgcaggacaattttcgagaattctacgactcatggcatagtaagagcactgactaccacgggctactgctacctcacatcgagggacccgagataaaagtatgggctcaacgctaccttaggtggatccctgaggcccaaattttgggcggagggcaggtggccactctaagcaagctgctggagatgatggaagaggtgcagtcgcttcaggagaagatagacgagagacatcattcgcagcaggcgcctcaggctgaggccccttgcttactccgtaatagcgccaggctatcttcccttttcccttttgccttgctgcagagacacagctccaagcctgtgctgcctaccagcggctggaaggccctcggagacgaagacgacttggctaagcgggaggacgaatttgtggatctcggcgatgtttag

SEQ ID NO: 111668 - DNA, 2082 bp, Artificial Sequence
  derived and/or modified sequence
atgctgggcaagggcgtggtgggcggcggcggcggcaccaaggcccccaagcccagcttcgtgagctacgtgagacccgaggagatccacaccaacgagaaggaggtgaccgagaaggaggtgaccctgcacctgctgcccggcgagcagctgctgtgcgaggccagcaccgtgctgaagtacgtgcaggaggacagctgccagcacggcgtgtacggcagactggtgtgcaccgacttcaagatcgccttcctgggcgacgacgagagcgccctggacaacgacgagacccagttcaagaacaaggtgatcggcgagaacgacatcaccctgcactgcgtggaccagatctacggcgtgttcgacgagaagaagaagaccctgttcggccagctgaagaagtaccccgagaagctgatcatccactgcaaggacctgagagtgttccagttctgcctgagatacaccaaggaggaggaggtgaagagaatcgtgagcggcatcatccaccacacccaggcccccaagctgctgaagagactgttcctgttcagctacgccaccgccgcccagaacaacaccgtgaccgaccccaagaaccacaccgtgatgttcgacaccctgaaggactggtgctgggagctggagagaaccaagggcaacatgaagtacaaggccgtgagcgtgaacgagggctacaaggtgtgcgagagactgcccgcctacttcgtggtgcccacccccctgcccgaggagaacgtgcagagattccagggccacggcatccccatctggtgctggagctgccacaacggcagcgccctgctgaagatgagcgccctgcccaaggagcaggacgacggcatcctgcagatccagaagagcttcctggacggcatctacaagaccatccacagacccccctacgagatcgtgaagaccgaggacctgagcagcaacttcctgagcctgcaggagatccagaccgcctacagcaagttcaagcagctgttcctgatcgacaacagcaccgagttctgggacaccgacatcaagtggttcagcctgctggagagcagcagctggctggacatcatcagaagatgcctgaagaaggccatcgagatcaccgagtgcatggaggcccagaacatgaacgtgctgctgctggaggagaacgccagcgacctgtgctgcctgatcagcagcctggtgcagctgatgatggacccccactgcagaaccagaatcggcttccagagcctgatccagaaggagtgggtgatgggcggccactgcttcctggacagatgcaaccacctgagacagaacgacaaggaggaggtgcccgtgttcctgctgttcctggactgcgtgtggcagctggtgcaccagcacccccccgccttcgagttcaccgagacctacctgaccgtgctgagcgacagcctgtacatccccatcttcagcaccttcttcttcaacagcccccaccagaaggacaccaacatgcaccagagacagctgagcctgcccctgacccagagcaagagcagccccaagagaggcttcttcagagaggagaccgaccacctgatcaagaacctgctgggcaagagaatcagcaagctgatcaacagcagcgacgagctgcaggacaacttcagagagttctacgacagctggcacagcaagagcaccgactaccacggcctgctgctgccccacatcgagggccccgagatcaaggtgtgggcccagagatacctgagatggatccccgaggcccagatcctgggcggcggccaggtggccaccctgagcaagctgctggagatgatggaggaggtgcagagcctgcaggagaagatcgacgagagacaccacagccagcaggccccccaggccgaggccccctgcctgctgagaaacagcgccagactgagcagcctgttccccttcgccctgctgcagagacacagcagcaagcccgtgctgcccaccagcggctggaaggccctgggcgacgaggacgacctggccaagagagaggacgagttcgtggacctgggcgacgtgtag

SEQ ID NO: 111669 - protein, 637 aa, Artificial Sequence
  derived and/or modified sequence
MLGKGVVGGGGGTKAPKPSFVSYVRPEEIHTNEKEVTEKEVTLHLLPGEQLLCEASTVLKYVQEDSCQHGVYGRLVCTDFKIAFLGDDESALDNDETQFKNKVIGENDITLHCVDQIYGVFDEKKKTLFGQLKKYPEKLIIHCKDLRVFQFCLRYTKEEEVKRIVSGIIHHTQAPKLLKRLFLFSYATAAQNNTVTDPKNHTVMFDTLKDWCWELERTKGNMKYKAVSVNEGYKVCERLPAYFVVPTPLPEENVQRFQGHGIPIWCWSCHNGSALLKMSALPKEQDDGILQIQKSFLDGIYKTIHRPPYEIVKTEDLSSNFLSLQEIQTAYSKFKQLFLIDNSTEFWDTDIKWFSLLESSSWLDIIRRCLKKAIEITECMEAQNMNVLLLEENASDLCCLISSLVQLMMDPHCRTRIGFQSLIQKEWVMGGHCFLDRCNHLRQNDKEEHQRQLSLPLTQSKSSPKRGFFREETDHLIKNLLGKRISKLINSSDELQDNFREFYDSWHSKSTDYHGLLLPHIEGPEIKVWAQRYLRWIPEAQILGGGQVATLSKLLEMMEEVQSLQEKIDERHHSQQAPQAEAPCLLRNSARLSSLFPFALLQRHSSKPVLPTSGWKALGDEDDLAKREDEFVDLGDV

SEQ ID NO: 111670 - DNA, 1914 bp, Artificial Sequence
  derived and/or modified sequence
atgttaggaaaaggggtggtgggtggtggtggtggcacaaaggccccaaaaccatctttcgtctcttacgtacggcctgaagaaatacatacaaatgaaaaggaggtgacggagaaggaggtgactctgcatctgttaccaggagagcagctgctgtgcgaggcctccactgtcctgaaatacgtgcaggaggactcttgtcagcacggggtgtacggccgtctggtctgcacagattttaagatcgcctttctaggcgatgacgaatcagccctggataacgatgagacccagtttaaaaacaaagtaatcggcgagaatgacatcactctacattgcgttgaccaaatatatggtgtctttgatgaaaagaagaaaacactttttgggcagctgaagaaatacccggaaaagcttattattcactgcaaggatctgagagtgttccagttttgtctgagatatacaaaagaggaggaggttaagaggatcgtgtcaggaattattcaccacacacaagctccaaagctcctcaagaggctgtttttgttttcgtatgccaccgctgcccaaaataataccgtaactgatccgaagaatcacaccgtgatgtttgacactctaaaagattggtgctgggagctggagcgtacaaaggggaacatgaagtataaagccgtgagcgtcaatgagggatacaaagtgtgtgaacggttgccggcttatttcgtcgtgccgacacccctgcctgaggagaatgtccaacggttccaggggcatggcattcccatttggtgctggtcttgccacaacgggagtgcccttctaaaaatgagcgcactcccaaaagaacaagacgacgggatccttcagatacaaaaaagctttctggatggtatatataagaccatccatcgtccaccctacgagattgtcaagaccgaagacttatcctccaatttcctgagccttcaggagattcagactgcatactccaagtttaagcagctctttctcatcgacaacagcacagaattctgggatacggatataaagtggttttccctgttggagagctctagctggttggatattatccgccggtgcctgaaaaaggccatcgagattaccgaatgcatggaagctcagaacatgaacgtgctgttgttggaagaaaatgccagcgacctctgctgcctgatttcctctctcgtgcagctgatgatggacccacattgtagaacccgaattggctttcagagcctcatccagaaagaatgggtgatgggtggacactgctttctggatagatgtaaccacctcagacagaatgacaaggaagagcatcagagacaacttagcttgccactgacccagagtaagagctcccccaaaaggggatttttcagggaggaaactgaccatctcatcaaaaacctgctcgggaagaggatatcgaagctcatcaattcttccgacgaacttcaggacaacttccgcgagttctacgattcctggcattccaaatcaacagactaccacgggcttctgctgcctcacatcgagggtcctgaaataaaggtctgggctcagaggtatcttcggtggatccctgaagcacaaattctggggggagggcaggtggcaaccttgtctaaactactggagatgatggaggaagtacagagcttgcaggagaaaatagatgaacggcatcacagtcaacaggctccccaggccgaagctccttgcctgctgagaaattctgcgcgcctgtcttcgctgttccccttcgcactcctacagcggcacagctcgaaacccgtgctccctacctccggctggaaggctctcggagatgaggatgatctggcgaagcgcgaggacgagttcgtcgacctgggggacgtgtag

SEQ ID NO: 111671 - DNA, 1914 bp, Artificial Sequence
  derived and/or modified sequence
atgctgggcaagggcgtggtgggcggcggcggcggcaccaaggcccccaagcccagctttgtgtcctatgtgcggcctgaggagatccacaccaatgagaaggaggtgacagagaaggaggtgaccctgcacctgctgcctggagagcagctgctgtgtgaggccagcacagtgctgaagtatgtgcaggaggacagctgccagcacggcgtgtatggccgcctggtgtgcacagacttcaagatcgccttcctgggagatgatgagagcgccctggacaatgatgagacccagttcaagaacaaggtgattggagaaaatgacatcaccctgcactgtgtggaccagatctacggcgtgtttgatgagaagaagaagaccctgtttggccagctgaagaagtacccagagaagctgatcatccactgcaaggacctgcgggtcttccagttctgcctgcgctacaccaaggaggaggaggtgaagagaattgtgtctggcatcatccaccacacccaggcccccaagctgctgaagaggctcttcctgttctcctatgccacagctgcccagaacaacacagtgacagaccccaagaaccacacagtgatgtttgacaccctgaaggactggtgctgggagctggagaggaccaagggcaacatgaagtacaaggctgtgtctgtgaatgaaggctacaaggtgtgtgagcggctgcctgcctactttgtggtgcccacccccctgcctgaggagaatgtgcagcgcttccagggccacggcatccccatctggtgctggagctgccacaatggaagtgccctgctgaagatgtctgccctgcccaaggagcaggatgatggcatcctgcagatccagaagagcttcctggatggcatctacaagaccatccacaggcctccctatgaaattgtgaagacagaggacctgagcagcaacttcctgagcctgcaggagatccagacagcctacagcaagttcaagcagctgttcctgattgacaacagcacagagttctgggacacagacatcaagtggttcagcctgctggagagcagctcctggctggacatcatccgccgctgcctgaagaaggccatcgagatcacagagtgcatggaggcccagaacatgaatgtgctgctgctggaggagaatgccagtgacctgtgctgcctgatcagcagcctggtgcagctgatgatggacccccactgcaggaccagaattggcttccagagcctcatccagaaggagtgggtgatgggcggccactgcttcctggaccgctgcaaccacctgcggcagaatgacaaggaggagcaccagaggcagctgagcctgcccctgacccagagcaagagcagccccaagaggggcttcttccgggaggagacagaccacctgatcaagaacctgctgggcaagaggatcagcaagctgatcaacagcagtgatgagctgcaggacaacttccgggagttctatgacagctggcacagcaagagcacagactaccacggcctgctgctgccccacatcgagggccctgagatcaaggtgtgggcccagcgctacctgcgctggatccctgaggcccagatcctgggcggcggccaggtggccaccctgagcaagctgctggagatgatggaggaggtgcagagcctgcaggagaagattgatgagcggcaccacagccagcaggccccccaggccgaggccccctgcctgctgagaaattctgcccggctgagcagcctcttcccctttgccctgctgcagaggcacagcagcaagcctgtgctgcccaccagcggctggaaggccctgggagatgaagatgacctggccaagcgggaggatgaatttgtggacctgggagatgtgtag

SEQ ID NO: 111672 - DNA, 2215 bp, Artificial Sequence
  derived and/or modified sequence
atcgcggcggtcgcggccttggggatgggcggagccccagccgctagtgctggtggccgccgctgctgccccagctggagcccgagccgccgcctctgcgtccgcgcgtcgctgcttcccagggcggcggtatgctggggaaaggagtagtcggcggtggcggcggcaccaaggcccccaagccctccttcgtgtcgtacgtacgccctgaggaaattcacacaaacgaaaaggaagtaacagagaaggaagtaactcttcacttgttgccaggtgaacagctgctttgtgaagccagcacagtactgaagtatgtccaggaagattcctgtcagcatggggtctatgggaggcttgtctgcacagacttcaagattgccttcttgggtgatgatgaatctgcattggataatgatgaaactcaatttaagaataaggttataggagaaaatgacattacactccactgtgttgatcagatttatggagtgtttgatgagaaaaagaaaactctctttggacaactgaagaaataccctgagaagctcatcatccactgcaaagaccttcgagtgttccagttttgtctgaggtacacaaaggaagaggaagtcaaaaggattgtcagtggcataattcatcatacccaggctcctaaactgcttaaacgattatttctgttttcctatgcgactgctgcacaaaacaatacagtcactgatcccaagaaccataccgtaatgtttgacacacttaaggactggtgttgggaactggaacggaccaaaggcaacatgaagtacaaagcagtgagtgtcaacgaaggctataaagtctgtgagagattgccagcatactttgttgtccccacccctcttcctgaagagaatgtgcagcgctttcagggtcatggcataccaatatggtgttggtcctgccacaatggaagtgcccttttgaaaatgtcagcactgcccaaagaacaggatgacggcattttacaaatccaaaagagcttcttagatggaatttacaagaccatccacaggccaccctatgaaattgttaaaacggaagacctgtcaagcaacttcctgtccctgcaggaaatccagactgcatactctaaatttaaacagctatttctgatagataacagtactgaattttgggacacagatataaaatggttttctctgttggaaagtagcagctggcttgacataatcagacgttgcctgaaaaaagcaatagagattacagaatgtatggaagcacaaaacatgaatgttcttcttttagaggagaatgcatccgacctctgctgtctcatttcctctctggtgcaactgatgatggacccccactgcagaaccagaattggtttccagagcctcatccaaaaggagtgggtcatgggtggccactgtttcttggatcgctgcaaccatctccgccagaacgacaaagaggagcatcaacgacaactttctttgccacttacacaatctaagtcatctcccaaaagaggatttttcagggaagaaacagatcatttaattaaaaaccttctgggcaagagaattagcaaacttattaattcttctgatgagctccaagacaactttcgagagttctatgacagctggcatagcaagtccactgactaccatggtttgttgttaccgcatatcgaggggcccgaaatcaaagtctgggcccagcgctacctacgttggattccagaagcccaaatcctaggtggtggccaagtggccactctgagcaaactcttggaaatgatggaggaagtccagagtttacaagagaagatcgacgagagacaccacagccagcaggccccccaggctgaggccccctgcctgctgaggaactctgcccgcctctcgtctttgtttcctttcgctctgctccagcgacattcctctaagcccgtcttacccaccagtggctggaaagctttgggagatgaagacgatttggccaaacgagaagatgagttcgtggacctaggggatgtgtgacctgtttgttgagtgattgtgaaagaggaatgtgggagattgggacagctgatccctggatttgtgtcacgctacagctcatgctggctgggtccttagcccggcactccgttagaataaacctgggccttcgggaaaagaggtggctctcattatttttcatgattcta

SEQ ID NO: 111673 - DNA, 1914 bp, Artificial Sequence
  derived and/or modified sequence
atgctgggcaagggcgtggtgggcggcggcggcggcaccaaggcccctaagccaagtttcgttagttacgtgcgccccgaggaaattcacactaatgagaaggaagtgacagagaaagaggtgactctccatttgttaccaggcgaacaactgctgtgcgaagcttctaccgtgctaaagtatgtgcaagaggattcttgccagcatggtgtttacgggcggctcgtatgtacagactttaaaattgcgttcctgggagatgacgagtctgctcttgacaatgatgaaacgcagttcaagaacaaagttatcggtgagaatgatatcacacttcattgcgtcgaccagatctacggagtgttcgatgagaaaaaaaagaccctttttggccaactgaaaaaataccctgagaaactcattatccactgcaaggacttgcgagtattccagttttgccttcggtatacaaaagaggaggaggtgaagcgtatcgtgtcaggaattattcaccatacacaggctccaaagttgttgaagcgactgtttctgttctcttacgcaacagctgcacagaataacacagttacagatcctaagaaccacaccgtaatgttcgacacgctgaaggactggtgctgggagctggaaagaacaaaagggaatatgaagtacaaagcagtttcagtcaacgagggttacaaagtttgcgaaagactgcccgcatacttcgtagtacctactcctctgcccgaagaaaacgttcaacgcttccagggtcatgggatccccatctggtgctggtcttgccataacggtagcgccctcctaaaaatgtcagctctgcctaaagaacaggacgacgggattctccagatccagaagtcatttttggacggaatctacaagaccattcataggccgccttacgagattgtgaagactgaagatttgagctccaatttcctctcccttcaggagatccagaccgcttacagtaaattcaaacagctgttcctaattgataacagcacagagttttgggataccgatatcaagtggttttcactgctggaatcatcttcatggctggacatcattaggcgctgtctgaagaaagccatcgaaattaccgaatgcatggaggcccagaacatgaatgtgctgctgctggaggaaaacgcttcagatctgtgctgcctgatttcaagtctggtccagctcatgatggacccccattgcagaacacggatcggtttccagtcactgatccagaaggagtgggtcatgggaggccactgttttttggaccgctgcaaccatcttcgccaaaacgacaaggaagaacaccagcgccagctgagcttgccattaacacagtccaaaagcagcccaaagcgcggcttctttcgggaggagaccgaccatctgatcaagaacctattgggaaagaggatttccaagctgatcaactccagcgacgagcttcaagacaactttcgggaattttacgattcgtggcactctaaaagcactgactatcacggactcctgctaccgcatatcgaaggacccgaaatcaaggtctgggcccagcgctatctgcggtggattcccgaggcacagatattgggaggaggtcaggtggctacacttagcaagttactagagatgatggaagaggttcagagccttcaagagaaaatcgacgagcggcatcacagtcagcaggcaccccaggccgaggcaccctgtctgctcagaaatagtgcacggttatctagtctcttccccttcgcgttactccagcgacatagtagcaagccggtgttgcccacctccggctggaaggcgctgggtgacgaggacgacctggcgaagagagaggatgagttcgtggacctcggagacgtttag

SEQ ID NO: 111674 - DNA, 1914 bp, Artificial Sequence
  derived and/or modified sequence
atgctgggcaaaggcgtggtcgggggagggggaggtactaaggcgccaaagccctcattcgtgtcttacgtgaggcctgaagagattcacacgaatgagaaggaagtaaccgagaaggaggtgacgctccacctgctgccaggagagcagctactctgtgaggcctcaacagtccttaagtatgtccaagaagactcttgccagcacggcgtgtacggtcggctggtgtgcacagactttaagatcgcctttcttggggacgatgagagtgctctggataacgatgagacccagttcaaaaataaggtgattggggagaacgatatcaccttacattgcgtggatcagatttacggcgtctttgatgagaagaaaaaaaccctttttgggcagctaaagaagtaccctgagaagcttatcattcattgcaaggacctccgagtatttcaattctgcctgcgctacaccaaggaagaagaagttaagagaattgtgagtgggataatccaccatacccaggcaccgaagcttctgaagcgcctttttcttttctcttacgctaccgcagcgcagaataacacggtgaccgaccctaagaaccatactgtgatgttcgatacgctgaaggattggtgctgggaactggagcggacgaagggtaatatgaagtacaaggcagtgtctgtcaacgagggatataaagtctgtgagaggcttcccgcatatttcgtagtgcccacacccctcccagaagagaacgttcagcgcttccaaggccatgggattccgatatggtgttggtcttgccacaacgggtctgctctcctcaaaatgtctgcactgccaaaggagcaagatgatgggatactgcagatccagaaatcgttcctagatgggatttacaagaccattcaccgtcctccctacgagattgtgaagacagaagacctttcatcaaacttcctctctctgcaggaaatacagaccgcttacagtaaattcaaacagctatttctgatcgacaacagcacagaattttgggataccgatatcaaatggttttcactgctggaatcaagcagctggctagatattatacggcgatgcctgaaaaaagctatagaaatcactgaatgcatggaggcgcaaaatatgaacgttctcctactcgaggaaaatgccagtgacctttgctgcctgatctcatcgctggtgcagctgatgatggacccccactgcaggactaggattgggtttcaaagtctgattcagaaagaatgggtgatggggggtcattgctttctggacaggtgtaatcatctcagacagaacgataaggaagagcaccagcggcaattgtcccttccattgacacagtccaagagctcgcccaagcgcggattttttcgcgaggaaacagaccatctaatcaagaacctgctggggaaaaggatttctaagctgatcaactcatctgatgaactgcaggataattttagggaattttacgattcatggcacagcaagtcgaccgattaccatggattgctgctgcctcacatcgaaggcccagagatcaaagtgtgggcacaacgttacctgcgatggatccccgaggcacaaatacttggcggagggcaggtggctactctgtcaaaattgctggagatgatggaagaagtgcaatccctgcaagagaaaattgatgaacgacaccactcacagcaggccccacaggctgaggctccatgcctgcttagaaattctgcgagactctctagtctctttccctttgccctgctgcagagacatagttctaagccggtactgcctacctctggctggaaagccttgggggacgaagatgatctggcaaagagggaggacgagttcgtggatctgggcgacgtgtag

SEQ ID NO: 111675 - DNA, 1914 bp, Artificial Sequence
  derived and/or modified sequence
atgctgggcaagggcgtggtgggcggcggcggcggcaccaaggcccccaagcccagcttcgtgagctacgtgagacccgaggagatccacaccaacgagaaggaggtgaccgagaaggaggtgaccctgcacctgctgcccggcgagcagctgctgtgcgaggccagcaccgtgctgaagtacgtgcaggaggacagctgccagcacggcgtgtacggcagactggtgtgcaccgacttcaagatcgccttcctgggcgacgacgagagcgccctggacaacgacgagacccagttcaagaacaaggtgatcggcgagaacgacatcaccctgcactgcgtggaccagatctacggcgtgttcgacgagaagaagaagaccctgttcggccagctgaagaagtaccccgagaagctgatcatccactgcaaggacctgagagtgttccagttctgcctgagatacaccaaggaggaggaggtgaagagaatcgtgagcggcatcatccaccacacccaggcccccaagctgctgaagagactgttcctgttcagctacgccaccgccgcccagaacaacaccgtgaccgaccccaagaaccacaccgtgatgttcgacaccctgaaggactggtgctgggagctggagagaaccaagggcaacatgaagtacaaggccgtgagcgtgaacgagggctacaaggtgtgcgagagactgcccgcctacttcgtggtgcccacccccctgcccgaggagaacgtgcagagattccagggccacggcatccccatctggtgctggagctgccacaacggcagcgccctgctgaagatgagcgccctgcccaaggagcaggacgacggcatcctgcagatccagaagagcttcctggacggcatctacaagaccatccacagacccccctacgagatcgtgaagaccgaggacctgagcagcaacttcctgagcctgcaggagatccagaccgcctacagcaagttcaagcagctgttcctgatcgacaacagcaccgagttctgggacaccgacatcaagtggttcagcctgctggagagcagcagctggctggacatcatcagaagatgcctgaagaaggccatcgagatcaccgagtgcatggaggcccagaacatgaacgtgctgctgctggaggagaacgccagcgacctgtgctgcctgatcagcagcctggtgcagctgatgatggacccccactgcagaaccagaatcggcttccagagcctgatccagaaggagtgggtgatgggcggccactgcttcctggacagatgcaaccacctgagacagaacgacaaggaggagcaccagagacagctgagcctgcccctgacccagagcaagagcagccccaagagaggcttcttcagagaggagaccgaccacctgatcaagaacctgctgggcaagagaatcagcaagctgatcaacagcagcgacgagctgcaggacaacttcagagagttctacgacagctggcacagcaagagcaccgactaccacggcctgctgctgccccacatcgagggccccgagatcaaggtgtgggcccagagatacctgagatggatccccgaggcccagatcctgggcggcggccaggtggccaccctgagcaagctgctggagatgatggaggaggtgcagagcctgcaggagaagatcgacgagagacaccacagccagcaggccccccaggccgaggccccctgcctgctgagaaacagcgccagactgagcagcctgttccccttcgccctgctgcagagacacagcagcaagcccgtgctgcccaccagcggctggaaggccctgggcgacgaggacgacctggccaagagagaggacgagttcgtggacctgggcgacgtgtag

SEQ ID NO: 111676 - DNA, 945 bp, Artificial Sequence
  derived and/or modified sequence
gttgcaaagcagccgctcggtggccgtacaacgcttcatctctccgagcctcggtttcctcatctccagccctaaaatgacgacacgccccacaggtcttgggaggattaagtgaggggacatgagcctggaagctccgaccccaggagccagcccatcaacctgaaccattacgccaccaagaagagcgtggcggagagcatgctggacgtggccctgttcatgtccaacgccatgcggctgaaggcggtgctggagcagggaccatcctctcactactacaccaccctggtcaccctcatcagcctctctctgctcctgcaggtggtcatcggtgtcctgctcgtggtcattggtgaggagcccagcctgcagtcagaccttctgcctcggcacccgtggctggcagaaaggccccacgtgtcccctgggccaccctgcattggcacaggcagctttgcaaccacacgctgacctgcagtgagccctccgctaacagaggcccaaagaccaacttccaccccgcgagggcaggcgccctgtcctgtctcctggtatcccatggagcagaccctccgcagtacctgctgaatgactgcgccagcacctcgctaactgctaactcactcactcgctcaccgcttctccatgagcactcgtccccacgcttacaggacccagcttaagttcccaaatcctggtgggatgaagcacactagggtgccccattgtactggttggcgagggcagaggcatctcagcccgatgacgaccacctcccttgatttctgccacatgggtttctgaagggcccctctctccaaactctggtgggtgttgtgggggcagctccgtgctgtggccccgtctctgaccctttccccccactccacttccctgcagcacggctgaacctgaatgaggtagaaaagcagtggcgactca

SEQ ID NO: 111677 - protein, 90 aa, Artificial Sequence
  derived and/or modified sequence
MLDVALFMSNAMRLKAVLEQGPSSHYYTTLVTLISLSLLLQVVIGVLLVVIGEEPSLQSDLLPRHPWLAERPHVSPGPPCIGTGSFATTR

SEQ ID NO: 111678 - DNA, 273 bp, Artificial Sequence
  derived and/or modified sequence
atgctcgacgtcgcactgttcatgtctaatgctatgcggttaaaagccgtattggagcaggggccttcgagccactattataccaccctggtgacactgatcagcttgtccttactgttgcaggtcgtgatcggggtactcctggtggtaataggtgaggagccttcacttcagagcgacctgttgcccaggcatccatggttggcagagcgccctcatgtgtcacctggacctccttgtatcggcaccggcagcttcgcaactactcgatag

SEQ ID NO: 111679 - DNA, 273 bp, Artificial Sequence
  derived and/or modified sequence
atgctggatgtggccctcttcatgagcaatgccatgaggctgaaggctgtgctggagcagggccccagcagccactactacaccaccctggtgaccctcatcagcctgagcctgctgctgcaggtggtgattggagtgctgctggtggtgattggagaggagcccagcctgcagagcgacctgctgcccaggcacccctggctggccgagcggccccacgtgtccccaggccccccctgcattggaacaggcagctttgccaccaccaggtag

SEQ ID NO: 111680 - DNA, 273 bp, Artificial Sequence
  derived and/or modified sequence
atgctggacgtggccctgttcatgagcaacgccatgcggctgaaggccgttctcgagcagggacccagcagccactattatactacccttgtgacactgatttccctgagcctcctgttgcaggtcgtgattggggttctgctagtcgtaattggtgaagaaccgtcattacagtccgacttactgcctaggcatccatggcttgctgaacgcccccatgtctcaccgggccctccatgcattgggacaggatcatttgccacaacccgctag

SEQ ID NO: 111681 - DNA, 273 bp, Artificial Sequence
  derived and/or modified sequence
atgcttgacgtcgcgttgttcatgtctaacgctatgcgtttaaaagctgtgcttgagcagggaccaagtagccattactataccactctcgtgacactcattagtttatctttgctgctccaggtcgtcatcggggttctcctcgtggtgattggagaggaaccaagtcttcagagtgacttgctccctcgccatccctggctggcagaacgccctcacgtgagcccgggacctccatgcatcggaaccggatcctttgcaaccacccggtag

SEQ ID NO: 111682 - DNA, 273 bp, Artificial Sequence
  derived and/or modified sequence
atgctggacgtggccctgttcatgagcaacgccatgagactgaaggccgtgctggagcagggccccagcagccactactacaccaccctggtgaccctgatcagcctgagcctgctgctgcaggtggtgatcggcgtgctgctggtggtgatcggcgaggagcccagcctgcagagcgacctgctgcccagacacccctggctggccgagagaccccacgtgagccccggccccccctgcatcggcaccggcagcttcgccaccaccagatag

SEQ ID NO: 111683 - protein, 427 aa, Artificial Sequence
  derived and/or modified sequence
MLGTLTPLSSLLLLLLVLVLGCGPRASSGGGAGGAAGYAPVKYIQPMQKGPVGPPFREGKGQYLEMPLPLLPMDLKGEPGPPGKPGPRGPPGPPGFPGKPGMGKPGLHGQPGPAGPPGFSRMGKAGPPGLPGKVGPPGQPGLRGEPGIRGDQGLRGPPGPPGLPGPSGITIPGKPGAQGVPGPPGFQGEPGPQGEPGPPGDRGLKGDNGVGQPGLPGAPGQGGAPGPPGLPGPAGLGKPGLDGLPGAPGDKGESGPPGAFDETGIAGLHLPNGGVEGAVLGKGGKPQFGLGELSAHATPAFTAVLTSPFPASGMPVKFDRTLYNGHSGYNPATGIFTCPVGGVYYFAYHVHVKGTNVWVALYKNNVPATYTYDEYKKGYLDQASGGAVLQLRPNDQVWVQMPSDQANGLYSTEYIHSSFSGFLLCPT

SEQ ID NO: 111684 - DNA, 2112 bp, Artificial Sequence
  derived and/or modified sequence
atgctgggcaccctgacccccctgagcagcctgctgctgctgctgctggtgctggtgctgggctgcggccccagagccagcagcggcggcggcgccggcggcgccgccggctacgcccccgtgaagtacatccagcccatgcagaagggccccgtgggcccccccttcagagagggcaagggccagtacctggagatgcccctgcccctgctgcccatggacctgaagggcgagcccggcccccccggcaagcccggccccagaggcccccccggcccccccggcttccccggcaagcccggcatgggcaagcccggcctgcacggccagcccggccccgccggcccccccggcttcagcagaatgggcaaggccggcccccccggcctgcccggcaaggtgggcccccccggccagcccggcctgagaggcgagcccggcatcagaggcgaccagggcctgagaggcccccccggcccccccggcctgcccggccccagcggcatcaccatccccggcaagcccggcgcccagggcgtgcccggcccccccggcttccagggcgagcccggcccccagggcgagcccggcccccccggcgacagaggcctgaagggcgacaacggcgtgggccagcccggcctgcccggcgcccccggccagggcggcgcccccggcccccccggcctgcccggccccgccggcctgggcaagcccggcctggacggcctgcccggcgcccccggcgacaagggcgagagcggcccccccggcgtgcccggccccagaggcgagcccggcgccgtgggccccaagggcccccccggcgtggacggcgtgggcgtgcccggcgccgccggcctgcccggcccccagggccccagcggcgccaagggcgagcccggcaccagaggcccccccggcctgatcggccccaccggctacggcatgcccggcctgcccggccccaagggcgacagaggccccgccggcgtgcccggcctgctgggcgacagaggcgagcccggcgaggacggcgagcccggcgagcagggcccccagggcctgggcggcccccccggcctgcccggcagcgccggcctgcccggcagaagaggcccccccggccccaagggcgaggccggccccggcggcccccccggcgtgcccggcatcagaggcgaccagggccccagcggcctggccggcaagcccggcgtgcccggcgagagaggcctgcccggcgcccacggcccccccggccccaccggccccaagggcgagcccggcttcaccggcagacccggcggccccggcgtggccggcgccctgggccagaagggcgacctgggcctgcccggccagcccggcctgagaggccccagcggcatccccggcctgcagggccccgccggccccatcggcccccagggcctgcccggcctgaagggcgagcccggcctgcccggcccccccggcgagggcagagccggcgagcccggcaccgccggccccaccggcccccccggcgtgcccggcagccccggcatcaccggcccccccggcccccccggcccccccggcccccccggcgcccccggcgccttcgacgagaccggcatcgccggcctgcacctgcccaacggcggcgtggagggcgccgtgctgggcaagggcggcaagccccagttcggcctgggcgagctgagcgcccacgccacccccgccttcaccgccgtgctgaccagccccttccccgccagcggcatgcccgtgaagttcgacagaaccctgtacaacggccacagcggctacaaccccgccaccggcatcttcacctgccccgtgggcggcgtgtactacttcgcctaccacgtgcacgtgaagggcaccaacgtgtgggtggccctgtacaagaacaacgtgcccgccacctacacctacgacgagtacaagaagggctacctggaccaggccagcggcggcgccgtgctgcagctgagacccaacgaccaggtgtgggtgcagatgcccagcgaccaggccaacggcctgtacagcaccgagtacatccacagcagcttcagcggcttcctgctgtgccccacctag

SEQ ID NO: 111685 - DNA, 1284 bp, Artificial Sequence
  derived and/or modified sequence
atgctgggcaccctgacccccctgagcagcctgctgctgctgctgctggtgctggtgctgggctgcggccccagagccagcagcggcggcggcgccggcggcgccgccggctacgcccccgtgaagtacatccagcccatgcagaagggccccgtgggcccccccttcagagagggcaagggccagtacctggagatgcccctgcccctgctgcccatggacctgaagggcgagcccggcccccccggcaagcccggccccagaggcccccccggcccccccggcttccccggcaagcccggcatgggcaagcccggcctgcacggccagcccggccccgccggcccccccggcttcagcagaatgggcaaggccggcccccccggcctgcccggcaaggtgggcccccccggccagcccggcctgagaggcgagcccggcatcagaggcgaccagggcctgagaggcccccccggcccccccggcctgcccggccccagcggcatcaccatccccggcaagcccggcgcccagggcgtgcccggcccccccggcttccagggcgagcccggcccccagggcgagcccggcccccccggcgacagaggcctgaagggcgacaacggcgtgggccagcccggcctgcccggcgcccccggccagggcggcgcccccggcccccccggcctgcccggccccgccggcctgggcaagcccggcctggacggcctgcccggcgcccccggcgacaagggcgagagcggcccccccggcgccttcgacgagaccggcatcgccggcctgcacctgcccaacggcggcgtggagggcgccgtgctgggcaagggcggcaagccccagttcggcctgggcgagctgagcgcccacgccacccccgccttcaccgccgtgctgaccagccccttccccgccagcggcatgcccgtgaagttcgacagaaccctgtacaacggccacagcggctacaaccccgccaccggcatcttcacctgccccgtgggcggcgtgtactacttcgcctaccacgtgcacgtgaagggcaccaacgtgtgggtggccctgtacaagaacaacgtgcccgccacctacacctacgacgagtacaagaagggctacctggaccaggccagcggcggcgccgtgctgcagctgagacccaacgaccaggtgtgggtgcagatgcccagcgaccaggccaacggcctgtacagcaccgagtacatccacagcagcttcagcggcttcctgctgtgccccacctag

SEQ ID NO: 111686 - DNA, 1917 bp, Artificial Sequence
  derived and/or modified sequence
atgcccctgcccctgctgcccatggacctgaagggcgagcccggcccccccggcaagcccggccccagaggcccccccggcccccccggcttccccggcaagcccggcatgggcaagcccggcctgcacggccagcccggccccgccggcccccccggcttcagcagaatgggcaaggccggcccccccggcctgcccggcaaggtgggcccccccggccagcccggcctgagaggcgagcccggcatcagaggcgaccagggcctgagaggcccccccggcccccccggcctgcccggccccagcggcatcaccatccccggcaagcccggcgcccagggcgtgcccggcccccccggcttccagggcgagcccggcccccagggcgagcccggcccccccggcgacagaggcctgaagggcgacaacggcgtgggccagcccggcctgcccggcgcccccggccagggcggcgcccccggcccccccggcctgcccggccccgccggcctgggcaagcccggcctggacggcctgcccggcgcccccggcgacaagggcgagagcggcccccccggcgtgcccggccccagaggcgagcccggcgccgtgggccccaagggcccccccggcgtggacggcgtgggcgtgcccggcgccgccggcctgcccggcccccagggccccagcggcgccaagggcgagcccggcaccagaggcccccccggcctgatcggccccaccggctacggcatgcccggcctgcccggccccaagggcgacagaggccccgccggcgtgcccggcctgctgggcgacagaggcgagcccggcgaggacggcgagcccggcgagcagggcccccagggcctgggcggcccccccggcctgcccggcagcgccggcctgcccggcagaagaggcccccccggccccaagggcgaggccggccccggcggcccccccggcgtgcccggcatcagaggcgaccagggccccagcggcctggccggcaagcccggcgtgcccggcgagagaggcctgcccggcgcccacggcccccccggccccaccggccccaagggcgagcccggcttcaccggcagacccggcggccccggcgtggccggcgccctgggccagaagggcgacctgggcctgcccggccagcccggcctgagaggccccagcggcatccccggcctgcagggccccgccggccccatcggcccccagggcctgcccggcctgaagggcgagcccggcctgcccggcccccccggcgagggcagagccggcgagcccggcaccgccggccccaccggcccccccggcgtgcccggcagccccggcatcaccggcccccccggcccccccggcccccccggcccccccggcgcccccggcgccttcgacgagaccggcatcgccggcctgcacctgcccaacggcggcgtggagggcgccgtgctgggcaagggcggcaagccccagttcggcctgggcgagctgagcgcccacgccacccccgccttcaccgccgtgctgaccagccccttccccgccagcggcatgcccgtgaagttcgacagaaccctgtacaacggccacagcggctacaaccccgccaccggcatcttcacctgccccgtgggcggcgtgtactacttcgcctaccacgtgcacgtgaagggcaccaacgtgtgggtggccctgtacaagaacaacgtgcccgccacctacacctacgacgagtacaagaagggctacctggaccaggccagcggcggcgccgtgctgcagctgagacccaacgaccaggtgtgggtgcagatgcccagcgaccaggccaacggcctgtacagcaccgagtacatccacagcagcttcagcggcttcctgctgtgccccacctag

SEQ ID NO: 111687 - DNA, 2112 bp, Artificial Sequence
  derived and/or modified sequence
atgctagggacgctcacccctctctcgtctctgctcttgttactcctggtgctggtgctgggatgtggccctcgggcatcaagcgggggcggagccggaggggctgcaggatacgcccccgtgaaatatattcagccgatgcagaaggggcccgttggtcccccgttccgagaaggtaaaggccagtacctcgagatgccgctgcccttactcccgatggatctgaagggtgagccggggcctccaggtaaacctggcccccgagggcctcccgggcctccaggattccctggaaaacccggaatgggcaaacccgggctacacggacagcccgggccagctggtccccccggcttctcacggatgggaaaggccggccccccgggtctcccgggaaaggttggccccccaggacagcctggcctccgcggggagcctgggatcaggggggaccaggggctgagaggacccccaggtcccccagggctcccaggaccctctgggatcaccattccagggaagcccggcgcccagggcgtacctggccctcctggctttcaaggcgagccggggccccagggggaacccggacccccaggcgaccgggggctcaaaggggataacggggtgggtcagcctggcctgcccggagcacccggacaggggggagcccccggccctcctggattgcctggccccgctgggctgggcaaaccaggcctggatggactgcccggagcacccggggataagggggagtcagggcctccgggggtgcccggccccagaggtgagccgggggctgttggtcccaagggtcctcctggcgtcgatggggtgggggtcccaggggctgcgggcttgccagggccccagggcccaagtggtgccaagggcgaaccgggaacaaggggtccccccggtttgattgggcccaccggatacggaatgccaggactccctggcccgaagggagatcgaggccccgcaggtgtaccaggattgctcggtgataggggggagcctggtgaggatggggagcctggagagcagggccctcagggcctgggtggcccaccgggactgccggggagcgctgggttaccagggcggcgaggaccacctggcccaaaaggtgaagcagggccaggggggcctcctggagtgccgggtattcggggagaccagggacccagcgggttagccggaaagcccggggtgccaggcgagcgggggctgccgggggcccacgggccccctggacccacagggcctaagggagagcccggctttaccggtagacctgggggccctggggtcgccggcgcccttggccaaaagggtgaccttggactgcctggccagccaggcctgcgaggtccctctggaataccaggactgcagggccctgcaggaccaatcgggccccagggcctgcctgggctgaaaggggagcccgggctgccgggccctccaggagaaggccgtgcaggcgagcccggtactgccggacccacaggaccccctggggtcccaggctctcctggaatcactggcccgcccggccccccaggacctcccgggccccctggcgcgcctggagcctttgacgaaacaggaattgcagggctccaccttcctaacgggggggtcgaaggagcagtgttggggaaaggcggcaagcctcagttcggcctcggcgagctaagcgcgcacgcgacacccgcttttacggctgtcctgacgtccccctttcccgcatcaggcatgccagtgaagttcgaccggactttgtacaacggccacagcggatacaatcctgctaccggcatatttacctgtcccgtgggtggtgtgtattatttcgcttatcatgtccacgtcaaggggacaaacgtgtgggttgcactatataaaaataatgtacccgccacttatacctatgacgagtataagaaaggctatttggaccaagcctcgggaggggcagtcctgcagcttagacccaacgaccaggtctgggttcagatgccttctgatcaggccaatggtttgtattctactgaatatatccacagcagcttcagtggttttctgctctgccctacctag

SEQ ID NO: 111688 - DNA, 1284 bp, Artificial Sequence
  derived and/or modified sequence
atgcttgggacactaacccccttatcatctctgcttttgctgcttttagtcttagtgttaggttgcgggccccgcgcaagttcaggcgggggagctggaggtgccgcaggctatgcgcctgtcaaatacatccagcccatgcaaaagggcccagtaggacccccatttcgggagggtaagggccagtacctggaaatgccactccctctcctccctatggatctgaagggcgaaccgggaccccctgggaagccgggacctcgggggcccccgggcccccctggattccccgggaaaccaggtatgggcaaacctggactgcatggccagccgggacctgccggtcctcccgggttctcccgcatgggtaaggccggtccccccggcctacctggaaaagtgggtccccctggccaacctggtctgcggggggagcctgggattcgtggcgatcagggattaaggggcccaccggggccaccaggactgccaggaccttctggtattacgatcccaggcaagccgggcgcacagggtgtccccggtccgccaggcttccaaggcgaaccagggccacaaggcgagcccgggcctcctggggatcgaggactgaaaggcgacaatggcgtcggtcagcccggtctccctggtgctccaggtcagggtggcgcccccgggccacctggattgcccggcccagccggccttgggaagcccggattagacggtctgcctggcgcccctggcgataaaggagaatccgggcctcctggcgcctttgacgaaactggcatcgcaggcttgcacctccccaacggtggggtcgaaggggctgttttggggaagggcggcaaaccccagttcggtctgggcgaactctccgcacacgctacgcccgcatttacagcagtgcttacttccccattccctgcttctggaatgcccgtcaagtttgatcgtacattatataacggacatagcggctacaacccagccaccggtattttcacctgtcccgtgggaggagtttactactttgcataccacgtccatgtcaagggcaccaacgtttgggtagctctgtataagaacaacgtgcccgccacttatacttacgacgagtacaagaaaggctacctggaccaggcaagcgggggagccgtgctgcagctccgtccaaacgaccaggtctgggtacaaatgccttccgaccaggcaaacggactgtactctacggagtacattcactcttccttctccgggtttctgctgtgtcctacctag

SEQ ID NO: 111689 - DNA, 2112 bp, Artificial Sequence
  derived and/or modified sequence
atgttgggaactcttacgcctctctcgagtctactcctgctactgctcgtgctcgttttgggctgcggtcctagagcaagtagtgggggtggggctggtggcgctgctggttacgctcctgtcaagtatatccagcccatgcagaagggaccagtgggaccacccttccgtgagggtaaggggcaatacctggagatgccactgcctctcctgcctatggacctgaagggcgaaccgggccccccgggcaaacctgggccaagggggcctccaggcccccctgggttcccggggaaacctggaatgggcaaaccaggccttcacggccagcctggaccagccggacctccaggattctcacgtatgggaaaagccggtccccctggcctgcccggaaaggtggggccccctgggcaaccggggcttaggggggaaccggggatcagaggagatcaggggctcaggggccctcccggcccccccgggttacccgggccttcaggcatcactattccaggaaaaccaggcgcgcagggggttccaggcccccccgggtttcagggggagccggggcctcagggagagcccggaccgcctggagaccgcggtctgaaaggtgacaatggagtgggccagcctgggctgcccggtgcacctggacaggggggcgcacctggtccccctggcctgcccggcccagccggtctgggaaagcccggcctggacggcttgcctggtgcccctggtgacaagggggaatcaggcccgccaggagttccaggccctcgtggagagccaggagctgttggccccaaaggccctcctggggtggatggcgttggggtgcctggtgccgcgggcctccccggacctcaaggaccctctggggctaagggggaaccaggtacccgcggtccgcccggccttatcgggccaacggggtatgggatgccaggactgccagggcccaaaggagaccgcggcccagctggagtccccggcttactgggggatcgcggagaaccaggcgaggacggggaacctggcgaacagggtccccagggtttaggaggaccaccaggccttcctgggtcagccggacttcctggccggcgcggccctccaggaccaaagggggaagctggacctggcggacctcccggcgtcccaggtattagaggcgaccagggcccttccggactagctggcaaaccaggtgtgcccggagagaggggtctccctggggctcatggaccccccggaccaacaggaccaaagggcgaaccgggcttcactgggagacccggaggtccaggcgtggctggtgctttagggcagaagggagatctcggcttgcctggccagccggggctgagaggccccagcggcatcccaggactgcagggtccggccggtccgatcggcccacagggcctccctggattaaagggggaaccaggtttgccaggccctcctggagagggccgcgctggtgaacctggcaccgccggcccgacgggcccgcctggagtacctggttcaccaggtatcaccggtcccccaggaccgccagggcccccaggccctccgggcgcgcctggcgccttcgacgagactggtattgcggggctccatctccccaacggcggcgtggagggcgcagtcctggggaaaggcggtaagccccagtttggtttaggcgagctctccgcacacgcaactcctgcgtttaccgccgttctgacgagcccctttcctgcatccggcatgcccgtgaaattcgacaggaccctgtacaacggccatagtggatacaaccctgcgaccggcatcttcacgtgccccgtcgggggggtctactacttcgcatatcatgttcacgtgaaaggaaccaatgtgtgggtggctctttacaaaaacaatgtgcccgcgacttacacttacgacgagtataagaagggttatctcgaccaggccagtgggggagccgtcctgcagctgcggccaaacgaccaggtctgggtgcagatgccgagcgatcaggccaatgggttgtattccacagagtacattcattctagctttagcggctttttactgtgccccacctag

SEQ ID NO: 111690 - DNA, 1917 bp, Artificial Sequence
  derived and/or modified sequence
atgcctcttccccttctgcctatggacctgaagggagagccgggccctccgggaaaaccgggcccccgtgggcccccggggccgccgggtttcccaggcaagcctggcatgggcaagccagggttacacgggcagcctgggcccgccgggccccctggcttttccaggatgggcaaggcaggtcctccaggattgcctggcaaagtgggaccccctggccaacctggacttaggggggaacctgggattcgaggcgaccaggggttacgcggcccccctgggccccctggtctgccagggccgagcgggatcaccattcctggtaagcctggagctcagggcgtccccggaccgccgggcttccagggagagccaggcccccagggggagcctgggccccctggggatcgcggcttaaagggggacaacggggttggacaaccagggttaccaggagcccccggccaaggaggagctcccggaccacccggcctacctggacctgccggtctcggcaaacccgggttagacggacttccaggggctcccggggacaaaggggagtctggacccccgggggtccctgggcccagaggcgaacccggggctgttggacccaaaggaccgcctggggtggacggagtcggagtgcccggagctgcagggctccccggtcctcagggccctagtggagccaaaggggagcctgggacacgcggcccaccaggactcattggacctaccggctatggcatgccaggactgcctggacccaagggcgatagaggcccagcaggcgtcccaggcttgctgggtgatcgaggggagccaggtgaggacggcgaaccgggggagcagggccctcagggcctaggcggtcctccagggttgccggggtcagctgggctgccgggtcggcggggcccgcctggccccaaaggtgaagctggtcccgggggacctcctggagtgcctggcatcaggggggaccaggggccctctggcttagctggaaaacccggggtgcccggagaacgtggcctccctggcgctcatgggccaccaggccctactggacctaagggcgagcccgggtttaccggccgaccaggcgggcctggagtagccggagctcttgggcagaaaggcgatctcgggctacctggtcagcctggcctccgtggtccttccggcataccgggtctccaaggccccgcgggcccaatcggaccacagggactgcccggcctgaagggcgagccgggcctcccgggaccaccaggggaaggtagggcaggagagcccggcacagctggccctacagggccgcctggagtaccaggctctccaggaatcacaggcccacccgggcctccagggccccccggcccacccggagctccgggcgcgtttgacgaaacaggaatcgcgggactccacttgcccaatggaggcgtggaaggcgccgtgctgggcaaggggggcaagccacaattcggcttgggagagttgagcgcgcacgccacccctgcctttaccgcagttctcacttccccctttcccgcgtcgggaatgccagtcaaattcgatcgtaccctctataacggacactcagggtataatcccgcgacaggcatttttacttgtcctgtcggaggtgtttattattttgcctaccacgtgcacgtcaaggggacgaacgtatgggtagcgctttataagaataatgtgcccgccacatatacatatgatgaatataaaaagggatacctggatcaggctagtggcggcgctgtgctgcagctgcgtccaaatgaccaggtgtgggtgcagatgccatctgaccaagcaaacgggctgtactccaccgaatacattcattcctccttttcaggatttctgctgtgccccacttag

SEQ ID NO: 111691 - DNA, 1284 bp, Artificial Sequence
  derived and/or modified sequence
atgctgggcaccctgacccccctgagcagcctgctgctgctgctgctggtgctggtgctgggctgcggcccccgggccagcagcggcggcggggccggcggggccgccggctacgcccctgtgaagtacatccagcccatgcagaagggccctgtgggcccccccttccgggagggcaagggccagtacctggagatgcccctgcccctgctgcccatggacctgaagggggagcccggccccccaggcaagccaggcccccggggccccccaggccccccaggcttccctgggaagccaggcatgggcaagccaggcctgcacggccagcccggccctgctggccccccaggcttcagcaggatgggcaaggccggccccccaggcctgcccgggaaggtgggccccccaggccagcccggcctgcggggggagcccggcatccggggggaccagggcctgcggggccccccaggccccccaggcctgcccggccccagcggcatcaccatccctgggaagccaggggcccagggcgtgcccggccccccaggcttccagggcgagcccggcccccagggcgagcccggccccccaggggaccggggcctgaagggggacaacggggtgggccagcccggcctgcccggggcccctggccagggcggggcccctggccccccaggcctgcccggccctgctggcctgggcaagccaggcctggatggcctgcccggggcccctggggacaagggggagagcggccccccaggggcctttgatgaaacaggaattgctggcctgcacctgcccaacggcggcgtggagggcgctgtgctgggcaagggcggcaagccccagtttggcctgggggagctgagcgcccacgccaccccagccttcaccgctgtgctgaccagccccttccctgccagcggcatgcctgtgaagtttgacaggaccctgtacaacggccacagcggctacaacccagccaccggcatcttcacctgccctgtgggcggcgtgtactactttgcctaccacgtgcacgtgaagggcaccaacgtgtgggtggccctgtacaagaacaacgtgcctgccacctacacctatgatgagtacaagaagggctacctggaccaggccagcggcggcgctgtgctgcagctgcggcccaatgaccaggtgtgggtgcagatgcccagcgaccaggccaacggcctgtacagcacagagtacatccacagcagcttcagcggcttcctgctgtgccccacctag

SEQ ID NO: 111692 - DNA, 1917 bp, Artificial Sequence
  derived and/or modified sequence
atgcccctgcccctgctgcccatggacctgaagggggagcccggccccccaggcaagccaggcccccggggccccccaggccccccaggcttccctgggaagccaggcatgggcaagccaggcctgcacggccagcccggccctgctggccccccaggcttcagcaggatgggcaaggccggccccccaggcctgcccgggaaggtgggccccccaggccagcccggcctgcggggggagcccggcatccggggggaccagggcctgcggggccccccaggccccccaggcctgcccggccccagcggcatcaccatccctgggaagccaggggcccagggcgtgcccggccccccaggcttccagggcgagcccggcccccagggcgagcccggccccccaggggaccggggcctgaagggggacaatggagtgggccagcccggcctgcccggggcccctggccagggcggggcccctggccccccaggcctgcccggccctgctggcctgggcaagccaggcctggatggcctgcccggggcccctggggacaagggggagagcggccccccaggagtgcccggccccagaggagagcctggagctgtgggccccaagggccccccaggagtggatggagtgggcgtgcctggagctgctggcctgcccggcccccagggccccagcggggccaagggggagcccggcacccggggccccccaggcctgattggccccaccggctacggcatgcctggcctgcccggccccaagggggaccggggccctgctggggtgcccggcctgctgggggacagaggagagcctggagaagatggagagcctggagagcagggcccccagggcctgggcggccccccaggcctgcccggcagcgctggcctgcccggccggcggggccccccaggccccaagggggaggccggccctgggggccccccaggagtgcccggcatccggggggaccagggccccagcggcctggccggcaagccaggagtgcctggagagcggggcctgcccggggcccacggccccccaggccccaccggccccaagggggagcccggcttcaccggccggcctgggggccctggggtggccggggccctgggccagaagggggacctgggcctgcccggccagcccggcctgcggggccccagcggcatccctggcctgcagggccctgctggccccatcggcccccagggcctgcccggcctgaagggggagcccggcctgcccggccccccaggagagggccgggccggggagcctggaacagctggccccactggacctcctggggtgcccggcagccctggcatcactggacctcctggccccccaggccccccaggccccccaggggcccctggggcctttgatgagaccggcattgctggcctgcacctgcccaatggaggagtggagggcgctgtgctgggcaaaggaggcaagccccagtttggcctgggggagctgagcgcccacgccaccccagccttcaccgctgtgctgaccagccccttccctgccagcggcatgcctgtgaagtttgacaggaccctgtacaacggccacagcggctacaacccagccaccggcatcttcacctgccctgtgggcggcgtgtactactttgcctaccacgtgcacgtgaagggcaccaacgtgtgggtggccctgtacaagaacaacgtgcctgccacctacacctatgatgagtacaagaagggctacctggaccaggccagcggcggcgctgtgctgcagctgcggcccaatgaccaggtgtgggtgcagatgcccagcgaccaggccaacggcctgtacagcacagagtacatccacagcagcttcagcggcttcctgctgtgccccacctag

SEQ ID NO: 111693 - DNA, 4452 bp, Artificial Sequence
  derived and/or modified sequence
ggacgccatgctggggactctgacacccctgtcttcgctgctgctgctgctactggtgctggtgctggggtgtgggccgcgggcgtcctctggtggcggggccggtggggcggcgggctatgccccagtgaagtacatccagcccatgcagaaaggacctgtgggaccgcccttccgtgagggcaaaggccagtacctggaaatgcctctaccgctgctgccgatggacctgaagggagagcccggcccccctgggaagcccgggcctcggggtccccctggcccccctggcttcccaggaaaaccaggcatgggaaagccaggactccatgggcagcctggccctgctgggccccctggcttctcccggatgggcaaggctggtcccccagggctccctggcaaggtcgggccaccagggcagccggggcttcggggggagccaggaatacgaggggaccagggcctccggggacccccaggaccccctggcctcccgggcccctcaggcattactatccctggaaaaccaggtgcccaaggggtgccagggcccccaggattccagggggaaccagggccccagggggagcctgggcccccaggtgatcgaggcctcaagggggataatggagtgggccagcccgggctgcctggggccccagggcaggggggtgcccccggcccccccggcctccctggtccagctggcttaggcaaacctggtttggatgggcttcctggggccccaggagacaagggtgagtctgggcctcctggagttccaggccccaggggggagccaggagctgtgggcccaaaaggacctcctggagtagacggtgtgggagtcccaggggcagcagggttgccaggaccacagggcccatcaggggccaaaggggagccagggacccggggcccccctgggctgataggccccactggctatgggatgccaggactgccaggccccaagggggacaggggcccagctggggtcccaggactcttgggggacaggggtgagccaggggaggatggggagccaggggagcagggcccacagggtcttgggggtccccctggacttcctgggtctgcagggcttcctggcagacgtgggccccctgggcctaagggtgaggcagggcctggaggacccccaggagtgcctggcattcgaggtgaccaggggcctagtggcctggctgggaaaccaggggtcccaggtgagaggggacttcctggggcccatggaccccctggaccaactgggcccaagggtgagccgggtttcacgggtcgccctggaggaccaggggtggcaggagccctggggcagaaaggtgacttggggctccctgggcagcctggcctgaggggtccctcaggaatcccaggactccagggtccagctggccctattgggccccaaggcctgccgggcctgaagggggaaccaggcctgccagggccccctggagaggggagagcaggggaacctggcacggctgggcccacggggcccccaggggtccctggctcccctggaatcacgggccctccggggcctcccgggcccccgggaccccctggtgcccctggggccttcgatgagactggcatcgcaggcttgcacctgcccaacggcggtgtggagggtgccgtgctgggcaaggggggcaagccacagtttgggctgggcgagctgtctgcccatgccacaccggccttcactgcggtgctcacctcgcccttccccgcctcgggcatgcccgtgaaatttgaccggactctctacaatggccacagcggctacaacccagccactggcatcttcacctgccctgtgggcggcgtctactactttgcttaccatgtgcacgtcaagggcaccaacgtgtgggtggccctgtacaagaacaacgtgccggccacctatacctacgatgagtacaagaagggctacctggaccaggcatctggtggggccgtgctccagctgcggcccaacgaccaggtctgggtgcagatgccgtcggaccaggccaacggcctctactccacggagtacatccactcctccttttcaggattcttgctctgccccacataacccgcggggggggtcctgctgccctggcctcctcccctttagtggtagagcgaccttttcaattacaaagaacctcctggaaaaaaaaacaaaagctgaacagaggcggccgtggccttggcccgaggagactaacttgctttctccctgcatgcaggctgagattgtttctggaaggggctggcctgagtttctttcccccaaatgtctgtgcagtgtcagggctgcaccccataggccctgaggcacacagcccagccccttgtgagtcctggcctctgctgggccctgaaggagctgagagggagctcaactccccaccccgccacgtggggagacagcccttcccactggctccctgatggcacctgctggaggaaaggggcacggcctccctcacagcccttggctggggctcctccagctccccctgggacctccagcatatgacagtggactaaggactgtggggttttcctccaaggggaagggagaagaggggaccatcgaggtggcgagtgtggacaccctgccaggactgcagcccccatggtgatgctgtggcatcagacatgtccgtggtgggcacagtgcctgttgccctgggaaagggcaacctccctttcactgctccagtggcagccatggggaaggcagtttgtgagggcttggggcacagacctggggcaggaggcagctcttcacgttcatccctgtctctcccgggctgcccccgccagctctggctgtttagcttgagggcagcacagaggcccctgggacacctacaggccagaaagatcaacctctgtgaagtgtctagaagtatctagtgcagatggtggcggaggcagaatcgaccatcagcaaacatgagcactcttccctttctccccttccacctgctgcgggctgggctggttttctcaatacaaaattgtaagaggatccttgtcaccccagccaggtatccccaaggcagagcacctctcgtttggccctctgaacaaggtgcacgcgagctgggggatgaagacggctcccacttccttttccttaataagaaccatatggtgggtgtatgtgtgtacaagaggggttcatctgtgggggcttcctctccttccaccctctggttccaatttcctgttctaagcaggactagggcccaggaggctaaggctgggagagaaagggtgccaacaggtcccttgggaatgagttggctctggacgtttctgccctgttccccgatcagagctcctctgcaggaaacaggcaggatgcccctcccaacccctcagtccctacgtcaagcggagtggataaggctgagatgagtgctgggagtggtggacattcctgctcgtgcaaagatggccactttccccgcagctgcagggcctcgcgctcggccctcgccaggccagccccactccttgtaccaagtgtgaactggggtcattcggtctgtgatctcgttgcactgctccaagtctggctgtgtccaggcggtccatgttgaaaatggaggatggctgctgacttctgactggctgagcagtgggttccttcaggttccttgccaaccctcctcccctgcccacaacttctccaaacaaagcaggctgtttgctcacttcttcaaaaggaggaatgataacccaaatctgcccaagtgacacttgagaaggttttggctggggttcctggtggatttcttactacctaacgcccaagaaaaccaactaaggactctcaaaccatacctggtgggggttcttcgctcaacctcttcttccctaggtcaaagccactatcatctgatgtgttagggatgggttctgattggcagaaattaatcagctcccaatgggagcccacggaactaagtagggtcccaagaaaaaaaacgggagctatttcacagagctgagcttctgccaaatttcattcctcaaacctttcaggaggggtggttggcgtttctaaaatgtttatgggatttgagttgcaggtgtccacttaactgactagctttgataaacaatgtcagattttaactatgaaaacgacattaccttgtgcatttttatattgattcctattttttttttaagattaaagtttaaatgttttccactagtcatttcacttctaacttggtataggaagcttagctctctacatacctatcatgtgccctgtatcacagaagattcaggaaaaatgcacttgggaatcaaagaaaatggaacttctttttgaaaagacaagcaaccatgttaactgtattgacacatcctcaataaaacctgttgtataaaacagca

SEQ ID NO: 111694 - DNA, 1353 bp, Artificial Sequence
  derived and/or modified sequence
ggacgccatgctggggactctgacacccctgtcttcgctgctgctgctgctactggtgctggtgctggggtgtgggccgcgggcgtcctctggtggcggggccggtggggcggcgggctatgccccagtgaagtacatccagcccatgcagaaaggacctgtgggaccgcccttccgtgagggcaaaggccagtacctggaaatgcctctaccgctgctgccgatggacctgaagggagagcccggcccccctgggaagcccgggcctcggggtccccctggcccccctggcttcccaggaaaaccaggcatgggaaagccaggactccatgggcagcctggccctgctgggccccctggcttctcccggatgggcaaggctggtcccccagggctccctggcaaggtcgggccaccagggcagccggggcttcggggggagccaggaatacgaggggaccagggcctccggggacccccaggaccccctggcctcccgggcccctcaggcattactatccctggaaaaccaggtgcccaaggggtgccagggcccccaggattccagggggaaccagggccccagggggagcctgggcccccaggtgatcgaggcctcaagggggataatggagtgggccagcccgggctgcctggggccccagggcaggggggtgcccccggcccccccggcctccctggtccagctggcttaggcaaacctggtttggatgggcttcctggggccccaggagacaagggtgagtctgggcctcctggggccttcgatgagactggcatcgcaggcttgcacctgcccaacggcggtgtggagggtgccgtgctgggcaaggggggcaagccacagtttgggctgggcgagctgtctgcccatgccacaccggccttcactgcggtgctcacctcgcccttccccgcctcgggcatgcccgtgaaatttgaccggactctctacaatggccacagcggctacaacccagccactggcatcttcacctgccctgtgggcggcgtctactactttgcttaccatgtgcacgtcaagggcaccaacgtgtgggtggccctgtacaagaacaacgtgccggccacctatacctacgatgagtacaagaagggctacctggaccaggcatctggtggggccgtgctccagctgcggcccaacgaccaggtctgggtgcagatgccgtcggaccaggccaacggcctctactccacggagtacatccactcctccttttcaggattcttgctctgccccacataacccgcggggggggtcctgctgccctggcctcctcccctttagtggtagagcgaccttttcaa

SEQ ID NO: 111695 - DNA, 4670 bp, Artificial Sequence
  derived and/or modified sequence
tccggcagccgcgaggggcggccggcagagcgacgcggaaccccgccggcgcggaccccggaccccaacgccgcccgcccagccgcggacgcccctgcccggagccctcgccgcccgggccgccctcgagggccgggagcggcgcccggcggccgcgcccgcaggccctgcctctgctggaaccttcccaggcccctccgacctgaaagcacgtccacggacgccatgctggggactctgacacccctgtcttcgctgctgctgctgctactggtgctggtgctggggtgtgggccgcgggcgtcctctggtggcggggccggtggggcggcgggctatgccccagtgaagtacatccagcccatgcagaaaggacctgtgggaccgcccttccgtgagggcaaaggccagtacctggaaatgcctctaccgctgctgccgatggacctgaagggagagcccggcccccctgggaagcccgggcctcggggtccccctggcccccctggcttcccaggaaaaccaggcatgggaaagccaggactccatgggcagcctggccctgctgggccccctggcttctcccggatgggcaaggctggtcccccagggctccctggcaaggtcgggccaccagggcagccggggcttcggggggagccaggaatacgaggggaccagggcctccggggacccccaggaccccctggcctcccgggcccctcaggcattactatccctggaaaaccaggtgcccaaggggtgccagggcccccaggattccagggggaaccagggccccagggggagcctgggcccccaggtgatcgaggcctcaagggggataatggagtgggccagcccgggctgcctggggccccagggcaggggggtgcccccggcccccccggcctccctggtccagctggcttaggcaaacctggtttggatgggcttcctggggccccaggagacaagggtgagtctgggcctcctggagttccaggccccaggggggagccaggagctgtgggcccaaaaggacctcctggagtagacggtgtgggagtcccaggggcagcagggttgccaggaccacagggcccatcaggggccaaaggggagccagggacccggggcccccctgggctgataggccccactggctatgggatgccaggactgccaggccccaagggggacaggggcccagctggggtcccaggactcttgggggacaggggtgagccaggggaggatggggagccaggggagcagggcccacagggtcttgggggtccccctggacttcctgggtctgcagggcttcctggcagacgtgggccccctgggcctaagggtgaggcagggcctggaggacccccaggagtgcctggcattcgaggtgaccaggggcctagtggcctggctgggaaaccaggggtcccaggtgagaggggacttcctggggcccatggaccccctggaccaactgggcccaagggtgagccgggtttcacgggtcgccctggaggaccaggggtggcaggagccctggggcagaaaggtgacttggggctccctgggcagcctggcctgaggggtccctcaggaatcccaggactccagggtccagctggccctattgggccccaaggcctgccgggcctgaagggggaaccaggcctgccagggccccctggagaggggagagcaggggaacctggcacggctgggcccacggggcccccaggggtccctggctcccctggaatcacgggccctccggggcctcccgggcccccgggaccccctggtgcccctggggccttcgatgagactggcatcgcaggcttgcacctgcccaacggcggtgtggagggtgccgtgctgggcaaggggggcaagccacagtttgggctgggcgagctgtctgcccatgccacaccggccttcactgcggtgctcacctcgcccttccccgcctcgggcatgcccgtgaaatttgaccggactctctacaatggccacagcggctacaacccagccactggcatcttcacctgccctgtgggcggcgtctactactttgcttaccatgtgcacgtcaagggcaccaacgtgtgggtggccctgtacaagaacaacgtgccggccacctatacctacgatgagtacaagaagggctacctggaccaggcatctggtggggccgtgctccagctgcggcccaacgaccaggtctgggtgcagatgccgtcggaccaggccaacggcctctactccacggagtacatccactcctccttttcaggattcttgctctgccccacataacccgcggggggggtcctgctgccctggcctcctcccctttagtggtagagcgaccttttcaattacaaagaacctcctggaaaaaaaaacaaaagctgaacagaggcggccgtggccttggcccgaggagactaacttgctttctccctgcatgcaggctgagattgtttctggaaggggctggcctgagtttctttcccccaaatgtctgtgcagtgtcagggctgcaccccataggccctgaggcacacagcccagccccttgtgagtcctggcctctgctgggccctgaaggagctgagagggagctcaactccccaccccgccacgtggggagacagcccttcccactggctccctgatggcacctgctggaggaaaggggcacggcctccctcacagcccttggctggggctcctccagctccccctgggacctccagcatatgacagtggactaaggactgtggggttttcctccaaggggaagggagaagaggggaccatcgaggtggcgagtgtggacaccctgccaggactgcagcccccatggtgatgctgtggcatcagacatgtccgtggtgggcacagtgcctgttgccctgggaaagggcaacctccctttcactgctccagtggcagccatggggaaggcagtttgtgagggcttggggcacagacctggggcaggaggcagctcttcacgttcatccctgtctctcccgggctgcccccgccagctctggctgtttagcttgagggcagcacagaggcccctgggacacctacaggccagaaagatcaacctctgtgaagtgtctagaagtatctagtgcagatggtggcggaggcagaatcgaccatcagcaaacatgagcactcttccctttctccccttccacctgctgcgggctgggctggttttctcaatacaaaattgtaagaggatccttgtcaccccagccaggtatccccaaggcagagcacctctcgtttggccctctgaacaaggtgcacgcgagctgggggatgaagacggctcccacttccttttccttaataagaaccatatggtgggtgtatgtgtgtacaagaggggttcatctgtgggggcttcctctccttccaccctctggttccaatttcctgttctaagcaggactagggcccaggaggctaaggctgggagagaaagggtgccaacaggtcccttgggaatgagttggctctggacgtttctgccctgttccccgatcagagctcctctgcaggaaacaggcaggatgcccctcccaacccctcagtccctacgtcaagcggagtggataaggctgagatgagtgctgggagtggtggacattcctgctcgtgcaaagatggccactttccccgcagctgcagggcctcgcgctcggccctcgccaggccagccccactccttgtaccaagtgtgaactggggtcattcggtctgtgatctcgttgcactgctccaagtctggctgtgtccaggcggtccatgttgaaaatggaggatggctgctgacttctgactggctgagcagtgggttccttcaggttccttgccaaccctcctcccctgcccacaacttctccaaacaaagcaggctgtttgctcacttcttcaaaaggaggaatgataacccaaatctgcccaagtgacacttgagaaggttttggctggggttcctggtggatttcttactacctaacgcccaagaaaaccaactaaggactctcaaaccatacctggtgggggttcttcgctcaacctcttcttccctaggtcaaagccactatcatctgatgtgttagggatgggttctgattggcagaaattaatcagctcccaatgggagcccacggaactaagtagggtcccaagaaaaaaaacgggagctatttcacagagctgagcttctgccaaatttcattcctcaaacctttcaggaggggtggttggcgtttctaaaatgtttatgggatttgagttgcaggtgtccacttaactgactagctttgataaacaatgtcagattttaactatgaaaacgacattaccttgtgcatttttatattgattcctattttttttttaagattaaagtttaaatgttttccactagtcatttcacttctaacttggtataggaagcttagctctctacatacctatcatgtgccctgtatcacagaagattcaggaaaaatgcacttgggaatcaaagaaaatggaacttctttttgaaaagacaagcaaccatgttaactgtattgacacatcctcaataaaacctgttgtataaaacagca

SEQ ID NO: 111696 - DNA, 2036 bp, Artificial Sequence
  derived and/or modified sequence
ggacgccatgctggggactctgacacccctgtcttcgctgctgctgctgctactgaaatgcctctaccgctgctgccgatggacctgaagggagagcccggcccccctgggaagcccgggcctcggggtccccctggcccccctggcttcccaggaaaaccaggcatgggaaagccaggactccatgggcagcctggccctgctgggccccctggcttctcccggatgggcaaggctggtcccccagggctccctggcaaggtcgggccaccagggcagccggggcttcggggggagccaggaatacgaggggaccagggcctccggggacccccaggaccccctggcctcccgggcccctcaggcattactatccctggaaaaccaggtgcccaaggggtgccagggcccccaggattccagggggaaccagggccccagggggagcctgggcccccaggtgatcgaggcctcaagggggataatggagtgggccagcccgggctgcctggggccccagggcaggggggtgcccccggcccccccggcctccctggtccagctggcttaggcaaacctggtttggatgggcttcctggggccccaggagacaagggtgagtctgggcctcctggagttccaggccccaggggggagccaggagctgtgggcccaaaaggacctcctggagtagacggtgtgggagtcccaggggcagcagggttgccaggaccacagggcccatcaggggccaaaggggagccagggacccggggcccccctgggctgataggccccactggctatgggatgccaggactgccaggccccaagggggacaggggcccagctggggtcccaggactcttgggggacaggggtgagccaggggaggatggggagccaggggagcagggcccacagggtcttgggggtccccctggacttcctgggtctgcagggcttcctggcagacgtgggccccctgggcctaagggtgaggcagggcctggaggacccccaggagtgcctggcattcgaggtgaccaggggcctagtggcctggctgggaaaccaggggtcccaggtgagaggggacttcctggggcccatggaccccctggaccaactgggcccaagggtgagccgggtttcacgggtcgccctggaggaccaggggtggcaggagccctggggcagaaaggtgacttggggctccctgggcagcctggcctgaggggtccctcaggaatcccaggactccagggtccagctggccctattgggccccaaggcctgccgggcctgaagggggaaccaggcctgccagggccccctggagaggggagagcaggggaacctggcacggctgggcccacggggcccccaggggtccctggctcccctggaatcacgggccctccggggcctcccgggcccccgggaccccctggtgcccctggggccttcgatgagactggcatcgcaggcttgcacctgcccaacggcggtgtggagggtgccgtgctgggcaaggggggcaagccacagtttgggctgggcgagctgtctgcccatgccacaccggccttcactgcggtgctcacctcgcccttccccgcctcgggcatgcccgtgaaatttgaccggactctctacaatggccacagcggctacaacccagccactggcatcttcacctgccctgtgggcggcgtctactactttgcttaccatgtgcacgtcaagggcaccaacgtgtgggtggccctgtacaagaacaacgtgccggccacctatacctacgatgagtacaagaagggctacctggaccaggcatctggtggggccgtgctccagctgcggcccaacgaccaggtctgggtgcagatgccgtcggaccaggccaacggcctctactccacggagtacatccactcctccttttcaggattcttgctctgccccacataacccgcggggggggtcctgctgccctggcctcctcccctttagtggtagagcgaccttttcaa

SEQ ID NO: 111697 - DNA, 2112 bp, Artificial Sequence
  derived and/or modified sequence
atgctgggcaccctgacccccctgagcagcctgctgctgctgctgctggtcctggtcctcggttgtggcccgcgtgcctccagtgggggaggcgccggtggagccgctggttacgctcctgtgaaatatattcagccaatgcagaaggggccagttggcccccccttccgggaaggcaaaggtcagtatctggagatgccgcttccactactgccaatggatctgaagggcgaacccggcccacccggcaagcctggacctagaggacctccggggccccccggatttcccggcaagccgggcatgggaaaacccggcctccacggtcagcctggccccgccgggccacctggtttttccagaatggggaaggctggcccacccggcttacccggaaaggtgggcccaccagggcaacccggcctaaggggcgaacccggcatcaggggagaccagggcttgcggggacccccaggcccccctggccttccggggccaagtggcatcaccattcccggtaagccaggggcccagggcgtcccgggccctccgggctttcagggagaacctggcccccaaggtgaacccgggccacctggagatcggggtctcaagggcgacaatggcgtgggccagccgggcttacctggggctcccgggcaggggggagcccctggacctccaggtcttcctggcccggccggtctgggaaaacccgggcttgacgggcttcccggagcaccaggcgataaaggagaatcaggtcccccaggtgtgccggggccccgcggtgagccaggcgcagtaggaccaaaggggcctcctggcgtcgacggtgtgggtgtgccgggtgccgcggggcttccaggaccacagggcccctcaggcgcaaagggagaaccgggcacccgggggccgccaggccttatcggacccactggttatggtatgcccggactgcccggtccgaaaggcgaccggggcccagccggcgtgccgggcctactgggcgatagaggcgagcctggggaagacggcgaaccaggcgagcagggcccgcagggcttaggcgggcctcccggcctgcctggatcagccggcctgccaggtcgtaggggaccacccggccccaagggcgaagcaggtccaggtggccctcccggggtgcccggcatccgcggtgaccagggcccaagtggactcgctgggaagcctggcgtgccaggcgagcgcggcctccctggcgcccacggacccccaggccctactggcccaaagggtgaacctggattcacaggtcgccctggcggtcccggcgtggcaggagcacttggtcaaaagggcgacctcggtctgcctgggcagccagggcttcggggaccgtcaggaattcccggcctccagggcccggcaggcccaatcggcccccaggggctgcctggcctgaagggggagcctggcctgcccggcccacctggggaggggcgcgccggcgagccgggcacagcgggcccaactgggccgcctggagttccaggctctcccgggatcactggaccgccggggcctccaggaccacctggacccccgggcgctcccggggccttcgacgagaccgggatcgccggactgcatctgcctaatggtggagtggagggggccgtcctgggaaagggagggaaaccccagtttggcctgggagagctgagcgctcatgccactccggccttcaccgcagtgctgacctccccgtttcccgccagcgggatgccggttaaattcgacagaacactatataatggacatagtggctacaacccggctacggggatcttcacgtgtcccgtcggaggcgtttattacttcgcctatcacgtccatgttaaaggaactaatgtgtgggtggccttgtacaagaataatgtcccggctacttacacttacgacgaatacaaaaaggggtacctggatcaagcttccgggggagcggtgttacaattaaggccaaatgaccaagtatgggtgcagatgccatcggatcaggccaacgggttatattccactgaatacatacacagctccttctctggtttcttgttgtgcccaacatag

SEQ ID NO: 111698 - DNA, 1284 bp, Artificial Sequence
  derived and/or modified sequence
atgctgggcaccctgacccccctgagcagcctgctgctgctgctgctcgttttagttctcggctgcgggccccgggcttcgagcggggggggcgctgggggcgccgccgggtatgcccctgtcaagtacatccagcctatgcaaaaaggccctgtgggcccgccttttagagaaggcaaaggccagtacctcgagatgcctctgccacttctccccatggaccttaaaggcgaacctggcccacccggcaagcccggccctagaggccccccaggaccgcctggatttcccggaaagcctgggatggggaagcctggactccacgggcagcctgggcccgctgggcctcctggattttccaggatgggaaaagccgggccccccggcctccccgggaaggtgggaccccccggccaacccgggctgagaggtgagcccggcattcggggagatcagggcttaaggggccctcccgggcccccgggtttacccggccctagcggaatcacgatccctggaaagcctggagcccagggggtgcccgggcctccgggattccaaggcgagcccgggccacagggcgaacctggaccacctggggatagggggcttaagggcgataacggcgttgggcaacccggcctccctggtgctcctggccaggggggcgcccccgggcctcctggtctgcctggacccgctggtctcggcaaacctgggctcgacgggctccccggcgcccctggtgataagggggaatccggcccccccggcgcattcgacgaaacaggaatcgcaggactacatttgcctaacggcggtgtggaaggcgcagtgttggggaaggggggaaagcctcaatttgggctaggagaactaagcgctcatgccacacccgcattcactgctgtgctgacttctcctttccccgctagtggcatgcccgtcaagttcgatcgaaccctgtacaatggccattctggctataatccggccacaggcatcttcacatgtccagtaggcggggtgtactacttcgcctatcatgtgcatgtaaaggggacaaacgtatgggttgctttgtataaaaataacgtccccgctacatacacctacgatgagtacaagaaagggtatctcgaccaggcctcaggaggcgctgtcctgcagttaaggcctaacgatcaggtttgggtgcagatgccctcagatcaggcaaacggcctgtatagcaccgagtacatccattcaagctttagcggttttttactttgtccaacatag

SEQ ID NO: 111699 - DNA, 2112 bp, Artificial Sequence
  derived and/or modified sequence
atgctgggcaccctgacccccctgagcagcctgctgctgctgctgctcgtgttggtactgggctgtggcccaagagcctcaagtgggggaggcgcgggaggcgcggctggatacgcgcccgtgaaatatattcagccaatgcagaagggcccagttgggccgccattcagggaaggcaaggggcaatacttagaaatgccgttgcccctgttaccaatggacctcaaaggagagcccgggcctccaggcaaacctggcccaagggggccgcccggaccgcccgggttccctgggaagcccggaatgggcaagcctggtctgcacgggcagccaggccctgccggccctccgggcttcagtcggatgggcaaagccggcccccccggcctgcccggaaaggtcggaccacccggtcagcctggtctccgaggggaaccggggattagaggggatcagggcctgcggggacctcctggaccccctggcctaccaggcccttcggggatcacaattccggggaagcccggagctcagggtgtccctggaccaccagggtttcagggggagcctgggccccaaggcgagcctgggccccctggggacagaggccttaaaggggataacggagtcggtcaaccaggtcttcctggggcccctggacagggcggagcacctgggcctccgggcctgcccggtcccgctggtcttggaaagccaggcctggatggactgcccggggccccaggagacaagggggagagtggacctccaggtgtgcccggccctaggggtgagccaggcgccgtaggaccgaagggtcctccaggggtggatggggtgggtgtgccgggggccgctgggctacccggaccgcaagggccttccggggcgaagggagaacccgggacccgcggaccacccggcttaattggtcctactggctacggtatgccggggctccccggcccgaaaggtgatagaggaccagccggcgtgcccggcttgttgggtgaccggggcgaacccggtgaggatggtgaacctggagagcagggtccccaaggactaggggggcctcctggtttaccaggcagtgccggcctgcccgggcgccgtggaccaccaggaccaaaaggagaggcaggccctggtggtccaccgggggtgcctggaattaggggagaccaaggcccctccggacttgcagggaaacctggggtgcctggcgagcggggtcttcccggcgcacatggcccacccggacctactgggccaaagggcgagcctggcttcacaggccgcccaggaggacccggggtcgcgggcgctctcggacaaaaaggggacctgggcttgccaggccagccagggctgcgaggcccatccgggatccccggactccagggaccagcaggaccaattgggccgcaaggtctcccgggtcttaaaggtgaaccgggactgccggggccccccggagaaggtcgggccggggaacctggaacagccggccccacaggtccccccggggtgcctggatctcccgggatcacaggaccaccgggacctccaggtcctcctggtcccccaggagcccccggcgcattcgatgaaacaggcatcgcaggactgcatctccctaatggaggcgttgagggagctgttctaggcaagggtggcaaacctcagttcggtctcggggagctgtccgcccacgcaacgccggccttcaccgctgtgctcacttcgcccttccctgcaagtggaatgccggtaaagtttgatcgtactttatataacggccactccgggtataatccggcgaccgggatcttcacgtgtcctgtcggcggcgtatactatttcgcctatcacgttcatgtgaaaggcaccaacgtgtgggtcgccctgtacaagaataacgtgccagcaacatatacatacgatgagtataagaaagggtacttggatcaggcctccggaggagccgtcttacagctccggcctaacgaccaggtgtgggtgcagatgcccagcgaccaggcaaatgggctttacagcaccgaatatattcactcctctttttctggctttttactctgtcccacttag

SEQ ID NO: 111700 - DNA, 1917 bp, Artificial Sequence
  derived and/or modified sequence
atgcccctgcccctgctgcccatggacctgaagggcgagcccggcccaccgggcaaaccaggtccgcgtgggccaccaggacccccgggcttccccggaaaacccggaatggggaagcctggtctgcatggacagccaggcccagctgggccccccggtttcagtagaatgggaaaagctggtccgcccggcctgccaggtaaagtgggcccccccggacaaccaggtctgagaggggaaccgggcattcgcggggatcagggcctgcgagggcctcctggaccgccaggactccccggaccctccggtatcaccatcccaggcaagcccggtgcacagggcgtccctggacctccagggttccaaggagaaccaggaccgcaaggggagccaggacctcccggcgaccgcggcctgaagggggacaacggcgtcgggcagcctggtctgccaggggctcccggacagggcggagccccagggcccccagggctcccggggccggccggcctgggcaaacctgggttagatggcctgccaggtgctcccggcgacaagggggaatctggaccacccggggtccctgggccccgaggtgagcctggagccgtgggacccaagggaccacctggggtagatggcgtgggggtcccaggtgcagctggactgccaggaccacagggtccatctggggccaagggggagccggggaccaggggaccccccgggctgatcggccctaccggatacggcatgcctgggctccccggtcctaagggggatcggggacctgccggagttcccggactgcttggggatcggggcgaacccggagaggacggcgagccaggagaacagggccctcagggactggggggtccccctgggctcccaggtagtgccggtttgccagggcgacgtggcccacccggaccgaagggtgaagccggacctggtgggcccccaggagtgcccggcatccgtggcgaccaggggcccagcggactagcgggaaaacccggagtcccaggagaacggggcctcccaggagcccacggccctcccggccccacaggtcccaaaggagagcccggcttcaccggtcggccaggtggtcctggcgttgccggagccctggggcagaagggagatctggggttgccgggtcaacccggcctgagaggacctagcggcattccaggcctacaaggtccagccggccccattgggccccaggggctccccggcctgaagggtgaaccaggactgccagggccgcccggagaaggcagagctggcgagccgggcactgcgggaccaaccgggcccccaggcgttcccggctcccctggaatcaccggcccacctggaccacctgggccgccagggccccccggggctccgggcgccttcgacgagactggtatcgcaggcttacatctgccaaacggtggcgtagaaggagccgttctgggcaagggcggcaagccccagtttggtctcggtgagctctctgcccatgctacacctgcttttaccgctgtgctaacgagtccgttccccgcgtccgggatgcctgttaaattcgatcgcacactctacaatggtcacagcggctacaatcctgctaccggcatttttacgtgccccgtagggggagtttattactttgcgtatcacgtccacgttaaaggcacgaatgtatgggtcgcgctgtacaagaacaacgtgccggccacatatacttacgacgagtacaagaaaggatatctcgaccaggctagcgggggcgcggtcctgcagcttaggcccaatgatcaggtgtgggtacagatgccctccgaccaggcaaatggcttgtattcgaccgagtacatacacagttcgttttccggctttcttctctgccctacctag

SEQ ID NO: 111701 - DNA, 2112 bp, Artificial Sequence
  derived and/or modified sequence
atgttgggaaccttgactccactgagttccttactgttgcttcttttagtccttgttctggggtgtggaccaagagcctcatccgggggaggtgccggtggagctgccggttatgcccctgtgaagtacattcagccgatgcaaaagggcccagtgggaccaccattcagagaaggaaagggacagtatctggagatgcctctgccactactccccatggacttgaagggagagcctggcccacccggtaagcctggacctcgcggtccaccaggccctcccggatttccaggcaagccgggtatggggaaacctggccttcatggtcagcctgggcctgccggaccccctgggttctccagaatggggaaggccggaccaccgggactgcctggcaaggtcggccctccaggtcagcccggactccgtggagaacctgggattagaggtgatcaaggactgcgcggaccaccgggtcctcccggactgcccggaccaagcgggatcactataccgggtaagccaggcgctcagggcgttcccggtccacctggattccagggagagcccggaccacagggtgaacccggacccccaggcgatcgcggacttaaaggtgacaatggtgtagggcagccgggtctccccggtgctcctggacagggtggagcccctggacctcccggattaccgggtccggctggcctcggtaagcccggactggacggattgcctggggcacctggcgataagggggaatccggaccgccaggtgtgcctggaccaagaggcgaaccaggagcagttggccctaagggcccacctggggtagacggtgtgggagtgccaggtgccgcaggcctcccgggaccccagggtccgagcggggctaagggggagcctggcacgagggggcctcctggactcattgggccaacaggttacgggatgcctgggctccccggtccaaaaggagaccgtggtcccgctggagttcctgggcttctcggcgatcgaggcgagcctggcgaggacggcgagccaggcgagcagggaccccagggcctgggtggtccgccaggcctgcctggttcagccggtttaccgggacgaagaggccctcctggaccaaagggcgaggctggccctggagggccaccgggagtgcccggtatacgcggagatcagggaccgtctgggctggccggtaagccaggtgttcccggtgagagaggactcccgggagcacacggacctcccggtccaactggacctaagggagagcccggatttaccggcaggcctggcggtccaggagttgcgggagccctcggccaaaagggcgacctgggcttacccggacagcctgggctcaggggcccatctggcataccaggactgcagggtcccgctgggcctattggccctcagggcttgccaggcctgaaaggcgaacctggattgccgggaccgcctggggagggccgagccggagagcccggtacagcagggccaactggccctcctggggtccccggtagcccagggattactggccctcccggacctccagggcctcccggacccccaggggctccaggcgcatttgacgaaaccggtatcgccggattacatctccccaatggtggtgtggagggtgctgtcctaggaaagggcggtaaaccacagttcggcttgggagagcttagcgcacatgctaccccggctttcactgcagtccttacgtccccctttccagcctctggtatgccagtgaagttcgataggaccctctacaacgggcattctggatacaacccagctactgggatctttacctgcccagtgggcggagtttattatttcgcttatcatgttcatgtcaagggcaccaacgtgtgggtggcactatacaagaacaacgttcccgcaacttatacttacgacgagtacaagaaaggttacctggaccaggcttctggaggggctgttcttcagctgagacccaatgaccaggtttgggtccagatgcccagcgaccaggccaatggactgtattctactgagtatattcacagctcgtttagcggctttctactgtgcccaacgtag

SEQ ID NO: 111702 - DNA, 1284 bp, Artificial Sequence
  derived and/or modified sequence
atgctcggcaccctgacacccctgtcttccctcttgctactgctcctggtcttggtactgggctgtggaccccgagccagttcaggcggaggagcagggggagctgccggttacgctcccgtgaagtatattcagcctatgcagaaaggccctgtgggtccccctttccgcgagggtaagggccagtatctggagatgcccctgccactgctccccatggacctcaaaggggaaccaggaccaccagggaaaccgggtcctagaggtcccccagggcctccagggtttcctgggaagcctggtatgggaaagcctggacttcatgggcaacctggccctgcaggaccgcctggattctctcggatgggcaaggctgggccacccggactgcccggaaaggtggggccacccggacagcccggtctgcggggagaacctggcatccgcggagaccagggattacgcggacctcccggaccaccgggactgcctggacctagtggaatcaccatccctggaaaacctggtgcccaaggcgttccaggacccccaggttttcagggagaaccaggtcctcagggcgagcccggacctccaggggatagaggcttgaaaggcgataatggcgtgggacagcctggactgcccggagctcccggtcagggcggagctccaggaccacctggtctccccggaccagctggcctcggcaagcccggtttagatgggctgccgggagccccaggagataagggcgaaagcgggccacctggggctttcgatgagactggaatcgcgggattgcacctgcctaacggcggagtggaaggggctgtgctgggtaagggaggaaaaccccagttcggtctcggcgagcttagcgcccacgcaaccccagccttcacagccgtccttacttctccttttcctgccagtggtatgcccgtcaagtttgaccggacactgtataacgggcattctggctacaaccccgcaactggcatctttacgtgccccgtcggcggtgtctattacttcgcttatcatgtgcatgtaaaggggactaacgtctgggttgctctgtataaaaacaacgtgcctgccacatacacctatgacgagtataaaaaaggatacctagatcaagcgagtggaggggcagttcttcagctgaggcctaacgaccaagtctgggtgcagatgccatctgaccaggctaacgggctctactcgaccgagtatatacactcctcctttagtggatttctcctgtgtcctacttag

SEQ ID NO: 111703 - DNA, 2112 bp, Artificial Sequence
  derived and/or modified sequence
atgctgggcacgttaactcctctttcttcactcttactgctgctgctcgtactcgtgctgggctgcggcccacgcgcaagctctggcggaggggcagggggtgccgcaggctatgctccagttaagtacatccagccaatgcaaaagggacctgtgggccctccttttcgggagggcaaagggcagtacctggaaatgcccctgccccttctgcccatggacctgaaaggcgagcccggacctccagggaaaccaggcccaagaggcccaccgggaccaccaggatttcctgggaagccgggaatgggaaagcccggtttgcacggtcagcccggtcctgctggaccccctggcttctctcgtatggggaaggcaggccctcccggactgcctggtaaagttggcccacctggacagcccggactgcggggagagcctggtatcagaggcgaccagggattacgaggacccccaggccctccgggattgcctggcccaagcggcattaccatccctggcaaacctggcgctcagggagttcccggtcccccaggcttccaaggggaaccgggacctcagggagagcctggcccaccgggagacagaggcttgaaaggggacaatggcgtcgggcagcccggtttgcccggtgccccagggcaaggcggtgccccaggacctccgggacttccaggccctgctggcttgggaaagcccggtctcgacggcttacccggagcaccaggcgataagggcgaatctggcccacccggagtcccaggccctaggggtgaacctggcgcagtcggtcctaaggggcctccaggggtggacggagttggagtgccgggtgccgctggactgcctggcccacaaggcccttcaggggctaaaggcgaacccggaactcgcggacccccaggcctcattggtccaaccggatacggcatgcccggtctccctggacccaagggtgaccgtggcccagctggcgttccagggctgctcggagataggggagagccaggggaagacggggagccaggcgagcaagggcctcagggcctgggcggtccccctgggctgccaggctcggcgggtctgcctggtcgtcgaggccctccagggccaaagggagaagcgggacccggagggcctccaggcgtaccaggaattaggggcgatcaaggtccttctggactggcagggaagcccggagttccaggggaaaggggcctgcccggagctcacggcccaccgggaccaacggggccaaaaggggaacccggtttcacaggacgacccggaggcccaggcgtggcaggagcgttgggacagaagggagacctgggtctgcccggacagcccggactaaggggaccttcaggcatccctggattacaaggccctgcgggtccaatcgggcctcagggactgcctgggctcaaaggcgagcccggtttgccagggcctcccggagagggacgcgctggtgagcccggaaccgcaggaccaaccggacctccaggggtgcccggaagtcctggaataacaggtccgccagggcctccgggtccccctggccctccgggagctccaggagcttttgatgagactggtattgccggtctgcatctcccaaatggtggcgtggagggcgcagtgcttgggaagggaggaaaaccccagtttggactgggggagcttagcgcccatgccacccctgcctttacagccgtgctcacaagccccttcccagccagcggaatgcctgtgaaattcgatcgaaccttatataacgggcatagcggctataatcctgctaccggcatatttacatgtcctgtgggcggtgtttactactttgcataccatgtacatgtaaaaggcacgaatgtttgggtcgcactgtacaagaataacgtaccagcgacgtatacttacgatgagtacaagaaggggtatctcgatcaagcttccggcggtgccgtgctgcagctgcgaccaaatgatcaagtctgggtccagatgcccagcgaccaggcgaatgggttatacagcaccgagtacattcactcttccttttccggcttcctgctttgcccaacttag

SEQ ID NO: 111704 - DNA, 1917 bp, Artificial Sequence
  derived and/or modified sequence
atgccactgcctttactcccaatggacctgaagggcgagccaggtccacccggaaagcccggaccacgtgggccacccggaccgccaggctttccgggaaagcccggaatgggcaaaccgggtttacacggtcagccaggtccggctgggcctccgggattcagccggatggggaaggccggaccaccagggctgcctggaaaagttggtccacccggtcagccgggtttaaggggggagcctggaattcggggtgaccagggactgaggggtcctccgggaccacctggcttaccgggaccatccggaattaccatccctggaaagcctggagcccaaggagtgccaggtcccccagggtttcaaggcgagccagggccacagggagagcctggacctccaggggaccggggtttgaagggcgataacggcgtaggtcagcccggactgcctggtgcccctggccaggggggagcaccaggacccccaggactgccaggcccagccggtctgggcaagcctggcctcgatgggttgccaggggctcccggtgacaaaggggagtccgggccacccggagtcccaggtcccaggggggagcccggagcggtcggacccaagggtcctcccggagtagatggcgtgggtgtcccaggcgctgctggtttgcccggacctcagggacctagcggcgcaaagggagagcctggcacgcgagggcctccaggcttaatcggtcctaccgggtatgggatgccaggactcccgggaccaaaaggcgatcggggtcccgcaggagtgccaggccttctgggtgacagaggagaaccaggggaggatggagaaccaggtgaacagggccctcaaggcctcgggggaccgcctggcttgcctggtagcgccggactccccggaagacgagggcctccaggccctaagggcgaagctggccctggaggccctcctggtgttcctgggattcgaggcgatcagggtcccagtggtttggctggtaagcccggagtcccaggggagaggggactcccaggggctcatggaccaccgggaccgaccggacctaaaggcgaacccggattcacaggcagacctggtggtcctggggtggccggagccctaggacagaagggagacttggggctccccggacagccaggcctccggggaccctcaggaatcccaggtttgcagggccctgccggaccgattggccctcagggattgcctggtcttaaaggcgaaccaggcctccccggacccccaggtgagggacgggcaggtgagccaggaacagccggacctaccgggcctcctggagttcccggtagtcctggcattaccggcccaccgggaccccctggtccgccaggcccacctggggctccaggagcttttgatgagactggcatcgccggactgcacctccccaatgggggtgttgaaggggcagtgttgggaaagggtgggaaacctcagtttggtctgggggagttgtctgcgcacgcaacgcccgcattcacggccgtgcttacgtctccatttccagcttctggaatgcctgttaaatttgaccgcaccttgtataacgggcacagcggctacaatcccgcaactggtatctttacatgtcctgtggggggagtttactactttgcttatcatgtccatgtgaagggcacgaacgtgtgggtggccctgtataagaacaatgtacctgctacgtatacttacgacgagtacaagaaaggatacctggaccaggcgtctggcggagccgtgctgcagttgcggccaaacgatcaggtgtgggtgcaaatgcctagcgaccaggccaatgggctctattcaactgaatacattcactcatctttctctgggtttttgctctgccctacctag

SEQ ID NO: 111705 - DNA, 471 bp, Artificial Sequence
  derived and/or modified sequence
atggccaccccccccgcccccggcgccggcaccgccgcccccagcgcccccagaccccccccccccagacccagctggctgagactggaccccgccgccagaggcgccagactgcccttccccggcagccccggcaccaccagaagagcccccagagagagcgcccccctggcccccgccctgagaagcgaccccggccagcccctggccgcctgcaacggcccccccggcgagcccagagccgaccccggcgtgagcaccagatgcgccgccaccatgatcccccagggcaagctgaccggcggcagaagctgcggcagcagacccagaatgggcagaggcgagagagccgagctgagcttccccgccgccgcccccagactgaagagaggcctgggcttctggttcttcttctgcggcaacagcagcgtggagatcctgctggcctgccacaccacccaccccttctag

SEQ ID NO: 111706 - DNA, 471 bp, Artificial Sequence
  derived and/or modified sequence
atggcaactccccctgcccctggcgcgggaacagccgcaccaagcgcacctaggccccctccaccgcgacccagttggctgcgcctggaccctgctgctagaggcgccaggctgcccttccccggatctccaggcacgacccggagggcccctcgtgagtccgcaccgctcgcccccgccctgcggtcagaccctgggcagccactggccgcttgcaatggcccgcctggcgagccaagggcggacccaggagtttccacccgttgcgctgctaccatgatcccccagggcaagcttactggtggaagaagctgcggctcgagacctcgtatgggcaggggggagcgtgccgaactttcgttcccggccgcggcacctcgattgaaaagggggcttggcttttggtttttcttttgcgggaatagctctgtagaaatccttcttgcttgtcatacaactcatcccttctag

SEQ ID NO: 111707 - DNA, 165 bp, Artificial Sequence
  derived and/or modified sequence
atgatgaagccccaggccgagaccggggaggccgcccgggaccccagcctgcggcctgccaggacagtgctggtgggcagcctgtcctggctgaggaagcagctgcagcccacccactgcaagtatgagggccccaggaaggcccggcggctgtggtttgcctag

SEQ ID NO: 111708 - DNA, 471 bp, Artificial Sequence
  derived and/or modified sequence
atggccaccccaccagcccctggagctggaacagctgcccccagcgcccccaggcctcctccaccccggcccagctggctgcggctggaccctgctgcccggggggcccggctgcccttccctggcagccctggcaccacccggcgggccccccgggagagcgcccccctggccccagccctgcggagtgaccccggccagcccctggccgcctgcaatggacctcctggagagcccagggctgaccccggggtgtccacccgctgtgccgccaccatgatcccccagggcaagctgaccggcggccgcagctgtggcagccggcccaggatgggccgcggggagagagctgagctgtccttccctgctgctgccccccggctgaagaggggcctgggcttctggttcttcttctgtggcaacagctctgtggagatcctgctggcctgccacaccacccaccccttctag

SEQ ID NO: 111709 - DNA, 471 bp, Artificial Sequence
  derived and/or modified sequence
atggccaccccccccgcccccggcgccggcaccgccgcccccagcgcccctcgtccacctcctccaaggcccagctggctacgccttgatcctgctgctcggggagcacgtcttcctttcccaggctctccagggacaactcgaagggcccctagggagtctgcacctcttgcccccgctctccggtccgatcccggccagcctctagcagcctgtaatggtccccccggcgaaccccgtgctgatccgggagtgtcgacgaggtgtgcagccaccatgatccctcagggcaagctgacaggaggtcgttcctgtgggagtagaccccgcatggggagaggtgagcgcgccgagctgtctttccctgccgcagcaccacgcttgaagaggggcctcggcttctggtttttcttctgtggtaattcgtccgtcgaaatactgttagcttgtcataccacgcaccccttctag

SEQ ID NO: 111710 - DNA, 471 bp, Artificial Sequence
  derived and/or modified sequence
atggcaacgccccctgcacccggagctggaaccgctgccccatccgcccctcggccacccccaccaaggcccagctggctgcgcctggatcctgcggctagaggtgctaggctccccttccccggttctccagggactacgaggcgggctcctcgcgagtctgcccctcttgcacctgccctgcggagcgatccgggtcagcccctggccgcttgtaacggacccccaggtgagcctagggcagatcccggagttagtacaaggtgcgctgcgacaatgatcccgcagggaaagctgacgggcggtcgaagctgcggatcgagaccaaggatgggacgcggagaacgcgctgaattgtccttcccagctgctgcgcctcgcttaaaaagaggcttgggcttttggtttttcttttgtggtaactcttcagtcgagattcttcttgcctgccatacaactcatcccttttag

SEQ ID NO: 111711 - DNA, 236 bp, Artificial Sequence
  derived and/or modified sequence
gagaaagttacctgtggccgcccaagtccgccactttctgctctgtgtctgcccattgccacgatccaggaggactccgcgccgcccggccgcctccgagctcgggccccatgtgaggggcccccccttatcccacctttccggctagacttgaaagtccagtttcaccagaggctgaggctccaggaaaagcggagcaagttcattggatcaaacatgtcacaagagtcggacaa

SEQ ID NO: 111712 - protein, 371 aa, Artificial Sequence
  derived and/or modified sequence
MEWNGLKMIISTMEPQVSNGPTSNTSNGPSSNNRNCPSPMQTGATTDDSKTNLIVNYLPQNMTQEEFRSLFGSIGEIESCKLVRDKITGQSLGYGFVNYIDPKDAEKAINTLNGLRLQTKTIKVSYARPSSASIRDANLYVSGLPKTMTQKELEQLFSQYGRIITSRILVDQVTGVSRGVGFIRFDKRIEAEEAIKGLNGQKPSGATEPITVKFANNPSQKSSQALLSQLYQSPNRRYPGPLHHQAQRFRLDNLLNMAYGVKRFSPITIDGMTSLVGMNIPGHTGTGWCIFVYNLSPDSDESVLWQLFGPFGAVNNVKVIRDFNTNKCKGFGFVTMTNYDEAAMAIASLNGYRLGDRVLQVSFKTNKAHKS

SEQ ID NO: 111713 - DNA, 1116 bp, Artificial Sequence
  derived and/or modified sequence
atggaatggaacggcttgaagatgattattagcactatggagccccaggtgtccaatgggcccacctcaaatacaagtaatggcccctcctcgaacaaccgtaattgcccaagtccaatgcagacgggcgcaaccaccgatgactccaaaacgaacttgattgtgaactacttacctcaaaacatgacacaggaagaatttaggtcgttatttggatccataggggaaattgaaagttgtaaacttgttagggataaaatcactggtcagagtctgggttacggcttcgtgaattacattgatcccaaagatgcagaaaaggccatcaatacattaaatgggctccggcttcagaccaaaactattaaggtctcttatgcccggccctcttccgcctctatcagagatgcgaacttgtacgtgtcagggctgcctaaaaccatgactcagaaggagctggaacagttattctcgcagtatggcagaatcatcactagtagaatcctggtcgatcaagtaacgggcgttagtcgaggcgtcggatttattaggttcgacaaaaggatcgaggcagaagaagccatcaaaggactcaacggccaaaagccctcaggagcaacagagcctatcaccgtgaagtttgccaacaatcctagtcaaaagtcctcacaggctctgcttagccagctctatcagtcccccaatagaagatatcctgggccattgcatcatcaagcccagaggttccggttggataatcttcttaatatggcttacggtgtgaagcggttctcacccataacaatcgacggaatgacttcccttgttggtatgaacatccccggccacacaggtacaggatggtgtattttcgtgtataacctgtcacctgacagtgatgagtctgtactctggcagctttttggacccttcggagccgtgaataacgtcaaagtcattagggatttcaacacaaataagtgtaaggggttcggatttgtgactatgaccaattatgatgaggccgctatggccatcgcatctcttaatggctatcgtctgggagaccgcgttctgcaggtctctttcaaaaccaataaggcccacaagtcctag

SEQ ID NO: 111714 - DNA, 1116 bp, Artificial Sequence
  derived and/or modified sequence
atggagtggaatggcctgaagatgatcatcagcaccatggagccccaggtgtccaatggccccaccagcaacaccagcaatggccccagcagcaacaacagaaactgccccagccccatgcagacaggagccaccacagatgacagcaagaccaacctgattgtgaactacctgccccagaacatgacccaggaggagttccgcagcctgtttggcagcatcggggagattgagagctgcaagctggtgcgggacaagatcaccggccagagcctgggctacggctttgtgaactacatcgaccccaaggatgctgagaaggccatcaacaccctgaatggcctgcggctgcagaccaagaccatcaaggtgtcctatgcccggcccagcagcgccagcatcagagatgccaacctgtatgtgtctggcctgcccaagaccatgacccagaaggagctggagcagctgttcagccagtatggccgcatcatcaccagccgcatcctggtggaccaggtgactggagtgtccagaggagtgggcttcatccgctttgacaagagaattgaagctgaggaggccatcaagggcctgaatggccagaagcccagcggggccacagagcccatcaccgtgaagtttgccaacaaccccagccagaagagcagccaggccctgctgagccagctgtaccagagccccaacagacgctacccaggccccctgcaccaccaggcccagcgcttccggctggacaacctgctgaacatggcctatggagtgaagcgcttcagccccatcaccattgatggcatgaccagcctggtgggcatgaacatccctggccacacaggcaccggctggtgcatctttgtgtacaacctgagcccagacagtgatgagagcgtgctgtggcagctgtttggcccctttggagctgtgaacaacgtgaaggtgatccgggacttcaacaccaacaagtgcaagggctttggatttgtgaccatgaccaactatgatgaggccgccatggccatcgccagcctgaatggctaccgcctgggggacagagtgctgcaggtgtccttcaagaccaacaaggcccacaagagctag

SEQ ID NO: 111715 - DNA, 1116 bp, Artificial Sequence
  derived and/or modified sequence
atggagtggaacggcctgaagatgatcatcagcaccatggagccccaggtgtccaatggacctacatctaatacaagcaatggccctagcagcaacaatagaaattgtccaagccctatgcagacgggtgcaacaacagacgattcaaagactaatctgatcgtcaattaccttccccagaacatgacccaggaggagtttcgctctcttttcgggtcaattggagaaattgagagctgtaagctggtgcgcgacaagatcactggtcagtctctcggctatgggttcgttaattacatcgatcccaaagatgcggaaaaagcgattaatactctcaacggcctgcgcttgcagactaagacaatcaaggtgtcatacgcaagacctagctctgcctcaatcagggacgcaaatctctatgtgtccggattgccaaaaacgatgacccagaaggagctcgaacaactcttctcccagtacgggaggattatcactagccgcattctggtcgatcaggtcaccggtgtgtcccgcggcgtgggatttattcggttcgataagagaatagaggccgaagaggccatcaagggactgaatgggcaaaagccatccggcgcaaccgagcctatcacggttaagttcgccaacaatccgtcgcagaagagctcccaggctctgctgagccaattgtaccagtctcctaatcgtcgctaccccggcccgctccaccatcaggctcagagattccgccttgacaacttgctgaacatggcctacggcgtcaaaagattttctcccattaccatcgacggcatgacatcactggtaggtatgaacatcccaggacacaccggaaccgggtggtgcatcttcgtgtacaatctgtctccagactcagacgagtcagtgctttggcaactcttcgggccctttggagcggttaacaacgtgaaggtgattcgggatttcaatactaataagtgcaagggatttggattcgtgacaatgactaattacgacgaggcggccatggccatagcatctctcaatggatatcggctgggggatagagttctccaagtgtccttcaaaacaaataaggcacataaatcatag

SEQ ID NO: 111716 - DNA, 1116 bp, Artificial Sequence
  derived and/or modified sequence
atggagtggaacggcctgaaaatgatcatctcaacaatggagccacaagtgtccaatggacccacatctaatacctctaatggaccatcttcaaataatcggaattgcccgtcccctatgcaaacgggtgctacaactgacgattcgaagaccaaccttatcgtgaactacctgccccagaacatgacacaagaagagtttcgctccctgttcggatccattggagaaatcgagtcttgtaagctggtacgcgacaagatcaccggtcaatctctggggtatggctttgttaattatatcgaccccaaggatgccgagaaagcaatcaacacgctaaatggactgagactccagacgaagactattaaggtgtcctacgccaggccgagttcggcaagcatacgggatgccaacctgtatgtctccgggctcccaaaaaccatgacacaaaaggagcttgagcagcttttctcacagtatggcagaattattacatcacggattctggtcgaccaggtgactggtgtaagcagaggcgttgggtttatacggttcgataagcggattgaggctgaggaagctattaagggcctcaacggacaaaaaccttccggcgcaaccgagccaattacagtcaagttcgcaaacaatcccagtcaaaagtctagccaagcattgctctcccagttgtaccagtcgcctaatagaaggtacccaggcccactccatcatcaagcccagcgcttccggctagacaacttgctgaacatggcatacggtgtgaagcggttcagccccatcaccattgacggcatgacatcgctagtgggcatgaacatccctggacacactggaacagggtggtgcattttcgtctacaatctgagtcccgacagtgacgagagtgttttatggcaattgttcggtcctttcggcgctgttaacaatgtcaaagtcatccgcgactttaacacaaataagtgtaaggggttcgggtttgtaacaatgaccaattacgacgaagccgcaatggcaatagcctcactaaatgggtacaggctaggagacagggtgctccaggtgagtttcaaaacgaacaaggcccataaaagttag

SEQ ID NO: 111717 - DNA, 1116 bp, Artificial Sequence
  derived and/or modified sequence
atggagtggaacggcctgaagatgatcatcagcaccatggagccccaggtgagcaacggccccaccagcaacaccagcaacggccccagcagcaacaacagaaactgccccagccccatgcagaccggcgccaccaccgacgacagcaagaccaacctgatcgtgaactacctgccccagaacatgacccaggaggagttcagaagcctgttcggcagcatcggcgagatcgagagctgcaagctggtgagagacaagatcaccggccagagcctgggctacggcttcgtgaactacatcgaccccaaggacgccgagaaggccatcaacaccctgaacggcctgagactgcagaccaagaccatcaaggtgagctacgccagacccagcagcgccagcatcagagacgccaacctgtacgtgagcggcctgcccaagaccatgacccagaaggagctggagcagctgttcagccagtacggcagaatcatcaccagcagaatcctggtggaccaggtgaccggcgtgagcagaggcgtgggcttcatcagattcgacaagagaatcgaggccgaggaggccatcaagggcctgaacggccagaagcccagcggcgccaccgagcccatcaccgtgaagttcgccaacaaccccagccagaagagcagccaggccctgctgagccagctgtaccagagccccaacagaagataccccggccccctgcaccaccaggcccagagattcagactggacaacctgctgaacatggcctacggcgtgaagagattcagccccatcaccatcgacggcatgaccagcctggtgggcatgaacatccccggccacaccggcaccggctggtgcatcttcgtgtacaacctgagccccgacagcgacgagagcgtgctgtggcagctgttcggccccttcggcgccgtgaacaacgtgaaggtgatcagagacttcaacaccaacaagtgcaagggcttcggcttcgtgaccatgaccaactacgacgaggccgccatggccatcgccagcctgaacggctacagactgggcgacagagtgctgcaggtgagcttcaagaccaacaaggcccacaagagctag

SEQ ID NO: 111718 - DNA, 2467 bp, Artificial Sequence
  derived and/or modified sequence
aaagagagtgatttatttgggcttcagtaaatgctgcatcttgtatttcaaagagtttcctgtcatgacctcataaaaaagaggaggcggcttgtatgtgtagcagtgcctggcgtgttgagttgttgcttccttctctgggcagcagctctgtaagaaggaatgtcagcttttacataacgttcctttccgcttttgacacactgtgtgagggtccatcttcttctgatcacagatggagtggaatggcttgaagatgataattagcaccatggagcctcaggtgtcaaatggtccgacatccaatacaagcaatggaccctccagcaacaacagaaactgtccttctcccatgcaaacaggggcaaccacagatgacagcaaaaccaacctcatcgtcaactatttaccccagaatatgacccaagaagaattcaggagtctcttcgggagcattggtgaaatagaatcctgcaaacttgtgagagacaaaattacaggacagagtttagggtatggatttgttaactatattgatccaaaggatgcagagaaagccatcaacactttaaatggactcagactccagaccaaaaccataaaggtctcatatgcccgtccgagctctgcctcaatcagggatgctaacctctatgttagcggccttcccaaaaccatgacccagaaggaactggagcaacttttctcgcaatacggccgtatcatcacctcacgaatcctggttgatcaagtcacaggagtgtccagaggggtgggattcatccgctttgataagaggattgaggcagaagaagccatcaaagggctgaatggccagaagcccagcggtgctacggaaccgattactgtgaagtttgccaacaaccccagccagaagtccagccaggccctgctctcccagctctaccagtcccccaaccggcgctacccaggtccacttcaccaccaggctcagaggttcaggctggacaatttgcttaatatggcctatggcgtaaagaggttctccccaattaccattgatggaatgacaagccttgtgggaatgaacatccctggtcacacaggaactgggtggtgcatctttgtctacaacctgtcccccgattccgatgagagtgtcctctggcagctctttggcccctttggagcagtgaacaacgtaaaggtgattcgtgacttcaacaccaacaagtgcaagggattcggctttgtcaccatgaccaactatgatgaggcggccatggccatcgccagcctcaacgggtaccgcctgggagacagagtgttgcaagtttcctttaaaaccaacaaagcccacaagtcctgaatttcccattcttacttactaaaatatatatagaaatatatacgaacaaaacacacgcgcgcacacacacacatacacgaaagagagagaaacaaacttttcaaggcttatattcaaccatggactttataagccagtgttgcctaagtattaaaacattggattatcctgaggtgtaccaggaaaggattttataatgcttagaaaaaaagaaaaaaaaaaaacaaaaaatacctttgatgcattgaatgttctttcatagctgtcgttgttgaatataatatacatagatagcgatgtgcagggatttttacccagccagctaactttactaccttccttgaaggtggatctttttaagatgaccattcgctcatttgaagaagaaaaacaaaaaacaaaaaaaataataaaaataaaacaatttttacaaagtaatgggattcaaagaaaggaaaaaaagatttttcttttttgtcaaaatatcgatccaatcagattggtaaaaacccccacacaaattaaagaggaataataaaaattgcaaaaataaaaaaaaacttttgcaaatttttttatttttccttctttcttttatatcatgtgaactaaaacagtcttctgttaggggatgggggcaagggggatacctgatgacattaacaatttaataacattaacattgttgccaaagaggtggtctctttgctgaaaatgggtttcaagaaaaatctatttttataaaatataaagaatttttacaagagaatctggatttgagaaaaaaatattttgactggctaatttaggggaaattgacaactttgtcgcgttcatactgcactggtaactttttagagatcaagatgtgtgttttaaactggattcgtagactgttttttgaaggatgggctataaacagatgatcttcatatcttttcatagcatgtaataataattaaaaaacaattattaattactaggggaaaggagtgttcgttctacccagggtaccacagttccccacagtcaaaacccaaaagcaaggagatgagttgaaagacagtttttctttaagtcatcagtatgggatgtcagcagaacaaaaattaaaaa

SEQ ID NO: 111719 - protein, 373 aa, Artificial Sequence
  derived and/or modified sequence
MSSTPHDPFYSSPFGPFYRRHTPYMVQPEYRIYEMNKRLQSRTEDSDNLWWDAFATEFFEDDATLTLSFCLEDGPKRYTIGRTLIPRYFSTVFEGGVTDLYYILKHSKESYHNSSITVDCDQCTMVTQHGKPMFTKVCTEGRLILEFTFDDLMRIKTWHFTIRQYRELVPRSILAMHAQDPQVLDQLSKNITRMGLTNFTLNYLRLCVILEPMQELMSRHKTYNLSPRDCLKTCLFQKWQRMVAPPAEPTRQPTTKRRKRKNSTSSTSNSSAGNNANSTGSKKKTTAANLSLSSQVPDVMVVGEPTLMGGEFGDEDERLITRLENTQYDAANGMDDEEDFNNSPALGNNSPWNSKPPATQETKSENPPPQASQ

SEQ ID NO: 111720 - protein, 243 aa, Artificial Sequence
  derived and/or modified sequence
MGSNSGQAGRHIYKSLADDGPFDSVEPPKRPTSRLIMHSMAMFGREFCYAVEAAYVTPVLLSVGLPSSLYSIVWFLSPILGFLLQPVVGSASDHCRSRWGRRRPYILTLGVMMLVGMALYLNGATVVAALIANPRRKLVWAISVTMIGVVLFDFAADFIDGPIKAYLFDVCSHQDKEKGLHYHALFTDSQGNDIKVTAESTGEHASSLPLPLHQPPHWMDSLPVQHAVLHRFHGPDCVPRGSL

SEQ ID NO: 111721 - DNA, 897 bp, Artificial Sequence
  derived and/or modified sequence
atgggcagcaacagcggccaggccggcagacacatctacaagagcctggccgacgacggccccttcgacagcgtggagccccccaagagacccaccagcagactgatcatgcacagcatggccatgttcggcagagagttctgctacgccgtggaggccgcctacgtgacccccgtgctgctgagcgtgggcctgcccagcagcctgtacagcatcgtgtggttcctgagccccatcctgggcttcctgctgcagcccgtggtgggcagcgccagcgaccactgcagaagcagatggggcagaagaagaccctacatcctgaccctgggcgtgatgatgctggtgggcatggccctgtacctgaacggcgccaccgtggtggccgccctgatcgccaaccccagaagaaagctggtgtgggccatcagcgtgaccatgatcggcgtggtgctgttcgacttcgccgccgacttcatcgacggccccatcaaggcctacctgttcgacgtgtgcagccaccaggacaaggagaagggcctgcactaccacgccctgttcaccggcaccagaagagccatgaccctgaagagcctgctgagagccctggtgaacatgcccccccactacagatacctgtgcatcagccacctgatcggctggaccgccttcctgagcaacatgctgttcttcaccgacttcatgggccagatcgtgtacagaggcgacccctacagcgcccacaacagcaccgagttcctgatctacgagagaggcgtggaggtgggctgctggggcctgtgcatcaacagcgtgttcagcagcctgtacagctgcaagagcttcagcctgctgagaatgagcagcaagagcttctggagcagcaccacctggatctag

SEQ ID NO: 111722 - DNA, 732 bp, Artificial Sequence
  derived and/or modified sequence
atgggcagcaacagcggccaggccggcagacacatctacaagagcctggccgacgacggccccttcgacagcgtggagccccccaagagacccaccagcagactgatcatgcacagcatggccatgttcggcagagagttctgctacgccgtggaggccgcctacgtgacccccgtgctgctgagcgtgggcctgcccagcagcctgtacagcatcgtgtggttcctgagccccatcctgggcttcctgctgcagcccgtggtgggcagcgccagcgaccactgcagaagcagatggggcagaagaagaccctacatcctgaccctgggcgtgatgatgctggtgggcatggccctgtacctgaacggcgccaccgtggtggccgccctgatcgccaaccccagaagaaagctggtgtgggccatcagcgtgaccatgatcggcgtggtgctgttcgacttcgccgccgacttcatcgacggccccatcaaggcctacctgttcgacgtgtgcagccaccaggacaaggagaagggcctgcactaccacgccctgttcaccgacagccagggcaacgacatcaaggtgaccgccgagagcaccggcgagcacgccagcagcctgcccctgcccctgcaccagcccccccactggatggacagcctgcccgtgcagcacgccgtgctgcacagattccacggccccgactgcgtgcccagaggcagcctgtag

SEQ ID NO: 111723 - DNA, 897 bp, Artificial Sequence
  derived and/or modified sequence
atgggatccaactccggtcaggccggcaggcacatctacaaaagcctggccgatgacgggccgttcgacagcgtggaaccacctaaacggccaacttcgcgcctgatcatgcacagcatggccatgtttggaagggaattttgttacgcagtggaggccgcttatgtgaccccggtgttattaagtgtgggcttgccttctagtctgtatagcatagtttggttcttgtcccctatcctgggatttttactacagccggttgtaggctcagcatctgaccattgtcgctccaggtggggacgacgaaggccttacattctgactctaggcgtcatgatgctcgtggggatggcactatacctgaatggagccaccgttgtcgcagcgttaattgcgaacccgaggcggaaacttgtttgggcaatatcagtgaccatgattggcgtggtgttgtttgattttgccgccgactttattgacggcccaatcaaagcatacctgttcgacgtttgctcacatcaggataaagagaaaggcctgcactaccatgcactttttacgggcacccggagggcgatgacattaaagtctctgcttcgggcactggtcaatatgcctccccattatagatacctgtgcatttcacaccttattgggtggaccgcctttctttctaacatgttattcttcaccgacttcatgggccagatcgtgtatcgcggggatccttactcagcgcataatagcacagagttcctgatttacgaacggggagtggaagttgggtgctggggcttgtgcataaattcagttttcagtagtctgtacagttgcaagagctttagtctgttgcggatgtcaagcaaatctttctggtcttcaaccacatggatttag

SEQ ID NO: 111724 - DNA, 732 bp, Artificial Sequence
  derived and/or modified sequence
atgggctccaacagcggccaagcgggacgacatatttacaagtccctggcagacgacgggccttttgattccgtggaaccgccaaagcgacctactagcagactgattatgcattcaatggctatgtttggacgcgagttttgttacgctgttgaggcggcgtacgtcaccccagttttgctctctgtcggcctccctagctccctctattccatcgtttggttcctcagcccaattctggggttcctactgcagccagtggtaggctcagctagcgatcactgccggagcaggtggggcagacgtcgcccctacatcttaacccttggcgtgatgatgctagttgggatggcactgtatctgaacggcgcgacagtcgtggccgcactcatagccaatcctaggaggaagctcgtgtgggcaatatccgtgactatgattggcgtcgtgctattcgatttcgccgctgactttatcgacggaccaatcaaggcctatctgttcgacgtttgttcacatcaggataaggagaagggcctccactaccatgctctgttcactgatagtcagggtaatgatattaaagtcacagcggagtcaacaggagaacacgcttcgtctctgcctctgccacttcaccagccgccacactggatggattccctccctgtccaacatgccgttcttcacagattccatggccctgattgcgtaccacgaggctctctttag

SEQ ID NO: 111725 - DNA, 897 bp, Artificial Sequence
  derived and/or modified sequence
atgggcagcaacagcggccaggccggccgccacatctacaagagcctggctgatgatggcccctttgacagcgtggagccccccaagaggcccaccagccgcctcatcatgcacagcatggccatgtttggccgggagttctgctatgctgtggaggccgcctacgtgacccctgtgctgctgtctgtgggcctgcccagcagcctgtacagcatcgtgtggttcctgagccccatcctgggcttcctgctgcagcctgtggtgggcagcgccagtgaccactgccgcagccgctggggcagaagaagaccctacatcctgaccctgggcgtgatgatgctggtgggcatggccctgtacctgaatggagccaccgtggtggccgccctgattgccaaccccaggaggaagctggtgtgggccatctctgtgaccatgattggagtggtgctgtttgattttgctgctgacttcattgatggccccatcaaggcctacctgtttgatgtgtgcagccaccaggacaaggagaagggcctgcactaccacgccctcttcaccggcacccggcgggccatgaccctgaagagcctgctgcgggccctggtgaacatgccaccccactaccgctacctgtgcatcagccacctgattggctggacagccttcctgagcaacatgctgttcttcacagacttcatgggccagatcgtgtacagaggagacccctacagcgcccacaacagcacagagttcctgatctatgagcggggcgtggaggtgggctgctggggcctgtgcatcaacagcgtcttcagcagcctgtacagctgcaagagcttcagcctgctgaggatgagcagcaagagcttctggagcagcaccacctggatctag

SEQ ID NO: 111726 - DNA, 732 bp, Artificial Sequence
  derived and/or modified sequence
atgggcagcaacagcggccaggccggccgccacatctacaagagcctggctgatgatggcccctttgacagcgtggagccccccaagaggcccaccagccgcctcatcatgcacagcatggccatgtttggccgggagttctgctatgctgtggaggccgcctacgtgacccctgtgctgctgtctgtgggcctgcccagcagcctgtacagcatcgtgtggttcctgagccccatcctgggcttcctgctgcagcctgtggtgggcagcgccagtgaccactgccgcagccgctggggcagaagaagaccctacatcctgaccctgggcgtgatgatgctggtgggcatggccctgtacctgaatggagccaccgtggtggccgccctgattgccaaccccaggaggaagctggtgtgggccatctctgtgaccatgattggagtggtgctgtttgattttgctgctgacttcattgatggccccatcaaggcctacctgtttgatgtgtgcagccaccaggacaaggagaagggcctgcactaccacgccctcttcacagacagccagggcaatgacatcaaggtgacagctgagagcactggagagcacgccagcagcctgcccctgcccctgcaccagcccccccactggatggacagcctgcctgtgcagcacgctgtgctgcaccgcttccacggccctgactgtgtgccccggggcagcctgtag

SEQ ID NO: 111727 - DNA, 897 bp, Artificial Sequence
  derived and/or modified sequence
atgggcagcaacagcggccaggccggccggcacatctacaagagcctggctgacgatggacctttcgattctgtggagcctcctaaaagaccgacctcccgcctgatcatgcactccatggctatgttcggacgcgaattctgctacgcagtcgaggcagcctacgtgactcctgtcctccttagcgttggacttcccagctctttgtacagtatcgtgtggttccttagcccaatcttgggtttcctgctgcagccagtcgtcggaagcgcgagcgaccactgtcgctcacgttggggtcggaggagaccatacattctgacccttggtgttatgatgttggtcggcatggccctctaccttaacggggcaacggtggtggccgcgctgatcgccaatccccggagaaagctggtgtgggcaatctccgtgacaatgattggagttgtgctgttcgacttcgccgctgatttcatcgatggccctatcaaggcgtacttgttcgacgtttgctcccatcaagacaaggagaaagggctgcattaccatgctctgttcactggcacgagaagagctatgactctgaaaagcctgctgagggccctcgtgaacatgcctcctcattatcgctacctttgcatcagccacctcatcggatggacggcctttctgagtaacatgctgttcttcaccgactttatgggtcaaatagtgtacaggggggatccgtatagtgcccataactcgactgagtttctgatttatgaaaggggagtggaagtgggctgctggggattatgtataaactccgtcttcagctcgctgtatagttgcaagtccttctctttattacgcatgagcagtaagtctttctggtcctccaccacatggatttag

SEQ ID NO: 111728 - DNA, 732 bp, Artificial Sequence
  derived and/or modified sequence
atgggcagcaacagcggccaggccggccggcacatctacaagagcctggctgacgacgggccatttgactctgtggagccacccaaaagacctacttctcggctgatcatgcattctatggctatgtttggccgggagttttgctatgccgtcgaggccgcttatgtcacgccagtgctgctctcagtggggttgccctcttcactgtactctattgtgtggtttttatctcctatcctcggtttcttactgcaacccgtcgtcggctctgcttccgaccattgcaggtcacggtgggggcgcaggcgcccctacatattgacccttggcgtcatgatgttggttggtatggctctgtatctcaacggagctactgtcgtggcagccctgattgcaaatccacggaggaagctggtttgggcaatctcagtgacaatgataggagttgtattattcgattttgcagcggacttcatcgacggacccataaaggcatacctgttcgatgtctgcagccaccaggataaggagaaaggtctccactatcacgcactgttcaccgactcgcaggggaacgatatcaaggtgaccgccgaaagcacaggcgaacacgcctctagcctgcccttacctcttcatcagccaccccactggatggatagcctccctgtccagcatgcggtgttgcacaggtttcacggaccggattgtgtgccccgcgggtccctctag

SEQ ID NO: 111729 - DNA, 897 bp, Artificial Sequence
  derived and/or modified sequence
atgggatcgaacagtggtcaggcaggacgccacatctacaaaagtctcgccgatgatggaccatttgatagcgtggagcccccaaagcgaccaactagcaggcttattatgcatagtatggccatgtttgggagggaattttgttacgccgtggaagctgcatatgtgacccccgtgctgctcagcgtgggcctacctagtagcctatactcaattgtctggttcttaagtcctatcctggggtttcttttgcagccagttgtaggtagcgcttcggaccattgcaggtcccgctggggacgcagacgaccttacatcctgactctgggcgtcatgatgcttgttggcatggctctctatttgaatggggctaccgtcgtcgccgcattaattgccaacccacggagaaaactggtgtgggccatttctgtgacaatgattggagtcgtccttttcgactttgcagccgatttcatcgatgggcctatcaaggcctatctattcgatgtatgcagccaccaggacaaggaaaagggcctacattaccatgccctgtttacaggaactcgcagagcgatgaccttgaaaagtctgcttcgtgccctggtcaatatgccccctcactataggtatctttgcatcagtcatctgatcgggtggacagctttcctgtctaatatgctgtttttcactgactttatgggacagattgtgtataggggagacccttactcagcccacaattctactgagttcctgatctacgagcgcggtgtcgaggtggggtgctggggcttatgcatcaactcagtttttagcagtctctactcatgtaagtctttcagcctgctgagaatgtccagtaagagtttttggtctagcactacttggatctag

SEQ ID NO: 111730 - DNA, 732 bp, Artificial Sequence
  derived and/or modified sequence
atgggttctaattcaggccaggcagggaggcacatctataaatccctggccgacgatggcccttttgacagcgtcgaaccacctaaaagacctacctcacgacttattatgcatagtatggcaatgttcggacgcgagttctgctatgccgttgaggctgcttatgtaactccggtactgttatccgtgggcctccctagctcattatactcaatagtctggttcttgtcgcctatcctgggatttctcttacagccagtagtgggctccgcctccgaccattgcaggtcccggtggggacgtagacgtccatacatactgactctcggcgtgatgatgcttgtcggtatggctctctacctcaatggagccaccgtggttgccgctctgatcgctaatccgcgtaggaagctcgtctgggcgatcagtgtaaccatgattggcgtggtgctgttcgattttgctgctgatttcattgacggacccataaaggcttacctctttgacgtctgttcacatcaagacaaggagaagggactccactatcacgctctgtttaccgattcacagggcaatgacatcaaggtcacagccgagtcaactggtgagcatgctagctctctccccctgccccttcaccaacctccgcactggatggatagtctccctgttcagcacgctgtattacacaggtttcacgggccagactgtgtcccaaggggctccctatag

SEQ ID NO: 111731 - DNA, 989 bp, Artificial Sequence
  derived and/or modified sequence
gccaggctccacgtcaaatccagtttgaaacacagaccctaggaccacgcaggaggtggtgggctcgcaggaaggttcctctcccagtggccatgggtagcaacagtgggcaggctggccgccacatctataaatccctagctgatgatggcccctttgactctgtggagccgcctaaaagacccaccagcagactcatcatgcacagcatggccatgttcggaagagagttctgctacgcggtggaggcagcgtatgtgaccccagtcctgctcagcgtaggtctgcccagcagcctgtacagcattgtgtggttcctcagccccatcctgggattcctgctgcagcccgtggtcggatcggccagcgaccactgccggtccaggtggggccgccggagaccctacatcctcaccctgggagtcatgatgctcgtgggcatggctctgtacctcaatggggctactgttgtagcagctttgattgctaacccaaggaggaagctggtttgggccataagtgtcaccatgataggtgtcgttctctttgattttgctgccgacttcattgatgggcccatcaaagcctacttatttgatgtctgctcccatcaggacaaggagaagggcctccactaccatgccctcttcacaggtactcgcagggcaatgacattaaagtcactgctgagagcactggtgaacatgcctcctcactaccgctacctttgcatcagccacctcattggatggacagccttcctgtccaacatgctgttcttcacagatttcatgggccagattgtgtaccgcggggatccctatagtgcacacaactccacagagtttctcatctacgaaagaggagtcgaggttggatgttggggcttgtgcatcaactccgtgttttcctcactttattcttgtaagtctttctctctcctaaggatgtcttctaaaagtttctggtctagcacaacttggatttga

SEQ ID NO: 111732 - DNA, 1040 bp, Artificial Sequence
  derived and/or modified sequence
acagaccctaggaccacgcaggaggtggtgggctcgcaggaaggttcctctcccagtggccatgggtagcaacagtgggcaggctggccgccacatctataaatccctagctgatgatggcccctttgactctgtggagccgcctaaaagacccaccagcagactcatcatgcacagcatggccatgttcggaagagagttctgctacgcggtggaggcagcgtatgtgaccccagtcctgctcagcgtaggtctgcccagcagcctgtacagcattgtgtggttcctcagccccatcctgggattcctgctgcagcccgtggtcggatcggccagcgaccactgccggtccaggtggggccgccggagaccctacatcctcaccctgggagtcatgatgctcgtgggcatggctctgtacctcaatggggctactgttgtagcagctttgattgctaacccaaggaggaagctggtttgggccataagtgtcaccatgataggtgtcgttctctttgattttgctgccgacttcattgatgggcccatcaaagcctacttatttgatgtctgctcccatcaggacaaggagaagggcctccactaccatgccctcttcacagactcgcagggcaatgacattaaagtcactgctgagagcactggtgaacatgcctcctcactaccgctacctttgcatcagccacctcattggatggacagccttcctgtccaacatgctgttcttcacagatttcatgggccagattgtgtaccgcggggatccctatagtgcacacaactccacagagtttctcatctacgaaagaggagtcgaggttggatgttggggcttgtgcatcaactccgtgttttcctcactttattcttgtaagtctttctctctcctaaggatgtcttctaaaagtttctggtctagcacaacttggatttgatatttctatgtgtatttcctactgtttaaaataccagattcttaataaatctatggacgtcaggaaaaactatcaccttaaaaa

SEQ ID NO: 111733 - protein, 418 aa, Artificial Sequence
  derived and/or modified sequence
MSGTEEAILGGRDSHPAAGGGSVLCFGQCQYTAEEYQAIQKALRQRLGPEYISSRMAGGGQKVCYIEGHRVINLANEMFGYNGWAHSITQQNVDFVDLNNGKFYVGVCAFVRVQLKDGSYHEDVGYGVSEGLKSKALSLEKARKEAVTDGLKRALRSFGNALGNCILDKDYLRSLNKLPRQLPLEVDLTKAKRQDLEPSVEEARYNSCRPNMALGHPQLQQVTSPSRPSHAVIPADQDCSSRSLSSSAVESEATHQRKLRQKQLQQQFRERMEKQQVRVSTPSAEKSEAAPPAPPVTHSTPVTVSEPLLEKDFLAGVTQELIKTLEDNSEKWAVTPDAGDGVVKPSSRADPAQTSDTLALNNQMVTQNRTPHSVCHQKPQAKSGSWDLQTYSADQRTTGNWESHRKSQDMKKRKYDPS

SEQ ID NO: 111734 - protein, 341 aa, Artificial Sequence
  derived and/or modified sequence
MFGYNGWAHSITQQNVDFVDLNNGKFYVGVCAFVRVQLKDGSYHEDVGYGVSEGLKSKALSLEKARKEAVTDGLKRALRSFGNALGNCILDKDYLRSLNKLPRQLPLEVDLTKAKRQDLEPSVEEARYNSCRPNMALGHPQLQQVTSPSRPSHAVIPADQDCSSRSLSSSAVESEATHQRKLRQKQLQQQFRERMEKQQVRVSTPSAEKSEAAPPAPPVTHSTPVTVSEPLLEKDFLAGVTQELIKTLEDNSEKWAVTPDAGDGVVKPSSRADPAQTSDTLALNNQMVTQNRTPHSVCHQKPQAKSGSWDLQTYSADQRTTGNWESHRKSQDMKKRKYDPS

SEQ ID NO: 111735 - DNA, 1257 bp, Artificial Sequence
  derived and/or modified sequence
atgagcggcaccgaggaggccatcctgggcggcagagacagccaccccgccgccggcggcggcagcgtgctgtgcttcggccagtgccagtacaccgccgaggagtaccaggccatccagaaggccctgagacagagactgggccccgagtacatcagcagcagaatggccggcggcggccagaaggtgtgctacatcgagggccacagagtgatcaacctggccaacgagatgttcggctacaacggctgggcccacagcatcacccagcagaacgtggacttcgtggacctgaacaacggcaagttctacgtgggcgtgtgcgccttcgtgagagtgcagctgaaggacggcagctaccacgaggacgtgggctacggcgtgagcgagggcctgaagagcaaggccctgagcctggagaaggccagaaaggaggccgtgaccgacggcctgaagagagccctgagaagcttcggcaacgccctgggcaactgcatcctggacaaggactacctgagaagcctgaacaagctgcccagacagctgcccctggaggtggacctgaccaaggccaagagacaggacctggagcccagcgtggaggaggccagatacaacagctgcagacccaacatggccctgggccacccccagctgcagcaggtgaccagccccagcagacccagccacgccgtgatccccgccgaccaggactgcagcagcagaagcctgagcagcagcgccgtggagagcgaggccacccaccagagaaagctgagacagaagcagctgcagcagcagttcagagagagaatggagaagcagcaggtgagagtgagcacccccagcgccgagaagagcgaggccgccccccccgccccccccgtgacccacagcacccccgtgaccgtgagcgagcccctgctggagaaggacttcctggccggcgtgacccaggagctgatcaagaccctggaggacaacagcgagaagtgggccgtgacccccgacgccggcgacggcgtggtgaagcccagcagcagagccgaccccgcccagaccagcgacaccctggccctgaacaaccagatggtgacccagaacagaaccccccacagcgtgtgccaccagaagccccaggccaagagcggcagctgggacctgcagacctacagcgccgaccagagaaccaccggcaactgggagagccacagaaagagccaggacatgaagaagagaaagtacgaccccagctag

SEQ ID NO: 111736 - DNA, 1257 bp, Artificial Sequence
  derived and/or modified sequence
atgtcggggaccgaagaggcaatactgggtggacgagactctcatccggccgctggaggtggcagcgtgctatgttttggtcaatgccaatatactgctgaagagtaccaagcaatacaaaaggccctcaggcagcgtctcggcccagagtatatctccagccgcatggcaggaggaggccagaaggtttgttacatagaaggccatcgtgtgatcaacctggcaaacgaaatgtttggatataatgggtgggcgcactcaattacccaacaaaacgttgactttgtcgatcttaacaacggaaagttctacgtcggtgtgtgtgcgtttgtacgggtccagctgaaggacggcagctaccatgaggatgtgggatacggcgtcagcgaaggcctgaaaagtaaggcgctatctcttgagaaggcaaggaaagaagccgtcacagacggcttgaagcgagccctccgctcctttggcaatgctcttggaaactgtatcctcgataaggactaccttcggtctctgaacaaactacctcgccagcttcctctcgaagtggacttgaccaaggccaagcggcaagacctcgagccctcagtggaagaggccaggtacaattcttgccgccctaatatggcgctggggcaccctcagctccagcaagtgacatcgccctctagaccaagccacgccgttattccagccgatcaggattgctcaagtaggagccttagcagttctgccgtggaatccgaggctacgcaccagcggaagctacgccagaaacaactccagcagcagttccgagaacgtatggagaagcagcaggtacgagtgagcacgccatctgcagagaagtcagaagccgctccacccgcaccacctgttacccactctacccccgtcacagtgtccgaaccgctgcttgagaaggatttcctcgccggagtgacgcaggagctgatcaagactttggaggacaacagcgagaaatgggcggtaaccccagacgcaggcgacggcgtggtcaaaccgtcgtctcgagccgacccagcacagacctctgataccctcgccctgaacaaccagatggtaactcaaaaccgtacaccacacagcgtgtgtcatcagaaacctcaggcgaaaagtggatcctgggaccttcaaacctacagtgctgatcagaggacaacaggcaactgggaatcacaccggaagagtcaggacatgaagaagcgtaagtatgatccctcctag

SEQ ID NO: 111737 - DNA, 1257 bp, Artificial Sequence
  derived and/or modified sequence
atgtccggcaccgaagaggctatactggggggtagagattcccatcccgcagccggaggcggatccgtcttatgttttgggcagtgtcagtatacagccgaggagtaccaggccattcagaaggccttaagacagcgcctgggacccgagtacatctccagccgcatggcaggaggcggacaaaaggtgtgctacatcgaggggcacagagtaattaacctggccaatgaaatgtttgggtataacggatgggctcattctattacccaacagaacgtggactttgttgacctgaacaatgggaagttctatgttggcgtttgtgctttcgttagggtccagctaaaggacggatcttaccacgaagatgtgggctatggggtctccgaaggcctgaaatctaaagccctgagcctcgagaaggcacgtaaggaggccgtcacggacggcttgaaacgggccttacgctcatttggcaacgctttgggcaattgcatcctcgataaggactatttgaggtccctgaataaactgccaaggcagctgccgttggaagtggacctgactaaagctaagagacaggatctggagccaagcgtcgaagaggctcgttataactcttgtcggcctaatatggctttaggccatccacagttgcagcaggtgacatctccctccaggcctagtcacgcagtaatccccgcggaccaggattgcagttctaggtcattatcttcctccgctgtagagagcgaagcaacacaccagcgaaagcttcgccagaagcagctgcagcagcagtttcgcgagcgcatggaaaaacagcaggtacgcgtgtctactcccagcgctgaaaagtctgaggcagccccccccgccccccccgtgactcactcgaccccagtaaccgtatctgagcctctcctggagaaagatttccttgcaggcgtcacacaggagcttattaagaccctagaagacaattctgaaaagtgggctgtcactccggacgccggagacggcgttgtcaaaccatccagccgtgctgatccagctcagacttcagataccctcgccttgaacaaccagatggtaactcagaataggacaccccacagcgtgtgtcaccagaagccacaggccaagtctggaagctgggatctgcagacctattcagccgatcagcgcaccacaggcaattgggagtctcatcggaagtctcaagatatgaaaaaacgcaaatatgacccttcttag

SEQ ID NO: 111738 - DNA, 1257 bp, Artificial Sequence
  derived and/or modified sequence
atgagcggcacagaggaggccatcctgggcggccgggacagccaccctgctgctgggggcggctctgtgctgtgcttcggccagtgccagtacacagctgaggagtaccaggccatccagaaggccctgcggcagaggctgggccctgagtacatcagcagcaggatggccggcggcggccagaaggtgtgctacatcgagggccacagggtcatcaacctggccaatgagatgtttggctacaacggctgggcccacagcatcacccagcagaatgtggactttgtggacctgaacaacgggaagttctacgtgggcgtgtgtgcctttgtgcgggtgcagctgaaggatggcagctaccatgaagatgtgggctacggcgtgtctgagggcctgaagagcaaggccctgagcctggagaaggccaggaaggaggccgtgacagatggcctgaagagggccctgcggagctttggaaatgccctgggcaactgcatcctggacaaggactacctgcggagcctgaacaagctgccccggcagctgcccctggaggtggacctgaccaaggccaagaggcaggacctggagcccagcgtggaggaggcccgctacaacagctgccggcccaacatggccctgggccacccccagctgcagcaggtgaccagccccagccggcccagccatgctgtgatcccagctgaccaggactgcagcagccgcagcctgagcagcagcgctgtggagagcgaggccacccaccagaggaagctgcggcagaagcagctgcagcagcagttccgggagaggatggagaagcagcaggtgcgggtgtccaccccatctgctgagaagtctgaggccgcccccccagcccctcctgtgacccacagcacccctgtgacagtgtctgagcccctgctggagaaggacttcctggccggcgtgacccaggagctgatcaagaccctggaggacaacagcgagaagtgggccgtgaccccagatgctggagatggagtggtgaagcccagcagcagagctgaccctgcccagaccagtgacaccctggccctgaacaaccagatggtgacccagaacagaacaccccacagcgtgtgccaccagaagccccaggccaagagcggctcctgggacctgcagacctacagcgctgaccagaggaccaccggcaactgggagagccacaggaagagccaggacatgaagaagaggaaatatgaccccagctag

SEQ ID NO: 111739 - DNA, 1257 bp, Artificial Sequence
  derived and/or modified sequence
atgagcggcaccgaggaggccatcctgggcggccgggacagccaccctgcggcggggggcgggtcagtactttgttttgggcagtgccagtacactgctgaagagtatcaggcaatacaaaaggccctccgacagcggctcgggcctgaatacatctcctcacgcatggctggaggagggcaaaaggtgtgctatattgagggccatagagtgatcaacctggccaatgagatgttcggctacaatggctgggcacattcgattacacagcagaatgtcgatttcgtcgacctgaacaacggaaagttttatgtcggagtgtgtgcattcgtgagggtgcagctgaaagatgggagctaccacgaagacgtaggctacggcgtgtctgaggggctgaaatcaaaggctctgagcctggagaaggcccggaaagaggctgtcacagacggccttaaacgcgcgctgagatccttcgggaatgccttaggcaactgcatcctcgataaagactatctgcgctctctgaataagctacctcgccagctgccccttgaagtcgatttgactaaggccaaaaggcaggacttggaaccatcggtggaagaagcccgctacaattcctgcagaccaaatatggcactgggccatcctcagttgcagcaggttacgtctccctccaggccgagtcacgccgtgataccagcagaccaggactgtagtagccgatctctgtcaagctccgctgtggagagcgaagcaactcaccagcgcaaattgcgtcagaaacagctgcaacagcaatttcgggagcgcatggagaaacagcaggttagagtgagtacgccctccgcggaaaaatccgaggctgctcctcctgcccctccggtgacccattctactcctgttacggtgtcggagcccctgttagagaaagacttcctggccggcgtgactcaggagctaattaaaaccttagaagataacagtgagaagtgggcggtgacccctgatgcaggggatggcgttgtgaagccaagttctcgagcagaccccgctcagactagcgacacattagccctgaacaaccagatggtgacgcagaaccgtacaccgcacagcgtctgccatcagaagccccaggcaaagtctggatcgtgggatctgcagacatattctgctgatcaacggacaaccgggaactgggagagtcacagaaaatctcaagatatgaagaaacggaagtacgatccatcttag

SEQ ID NO: 111740 - DNA, 1257 bp, Artificial Sequence
  derived and/or modified sequence
atgagcggcaccgaggaggccatcctgggcggccgggacagccaccccgccgctggcggtggatcagtattgtgtttcggccagtgccagtatacagctgaagaataccaggccattcagaaagcccttcgacaaaggctgggaccagagtacatctcgtccagaatggcaggaggaggtcagaaggtgtgttatattgaggggcatcgtgtgatcaatctggcaaacgaaatgtttggatacaatggctgggcccattccattacgcagcagaacgtcgactttgtcgatctgaacaacggcaaattctacgtcggcgtctgcgcttttgtcagggtgcagttaaaggatgggtcttaccatgaggacgttggttacggcgtctccgagggcctgaagtccaaagctttgtccctggagaaggcgaggaaagaggctgttaccgatgggcttaaacgggccctcagaagtttcggtaacgctttggggaactgcatcctcgataaggattatctgcgctctctgaataagttgccaaggcaactgccgctggaggttgacttgaccaaggccaagaggcaggacctcgagcctagcgtggaagaagccaggtataattcatgccgacctaacatggcactcgggcacccccagttgcagcaggtcacctccccctccagaccaagccatgcagtcataccggccgatcaggattgttcctctcgttctctgtcttcatctgcagtggagtcggaggctacacaccagcggaagctcagacaaaagcagttacagcagcagttccgcgagcgaatggaaaaacagcaggttcgggtatccacacctagtgcagaaaaaagcgaagcggcaccaccagcaccgccggtaacccactccacccctgtaaccgtcagcgagcctctgttggagaaggatttcctggccggggtgactcaggaattaatcaaaacactggaggataatagcgaaaaatgggccgtgactcccgacgcgggggacggcgtggtgaagccaagctcccgggctgaccctgcccagacaagcgacactctggctctgaacaaccagatggttactcaaaacagaacccctcactccgtgtgtcaccagaagcctcaggctaagagcggttcatgggatctccaaacatactcagccgatcagaggacaacaggaaactgggagtcccataggaaaagccaggatatgaaaaaacgcaaatatgacccatcctag

SEQ ID NO: 111741 - DNA, 1257 bp, Artificial Sequence
  derived and/or modified sequence
atgagcgggactgaagaggctattctgggcggtagagattctcatccagcagccggtggaggttccgtgttgtgttttggccagtgccagtacacagccgaggaataccaggcaattcaaaaggccttacgtcaacgactaggacctgaatacattagcagccgtatggcagggggtggccagaaagtgtgctacattgaagggcaccgcgtgatcaatcttgccaacgaaatgttcggatataatggctgggcccattccatcacccagcaaaacgtggactttgtggatctcaacaacgggaaattctacgtcggagtgtgcgcattcgtgcgagtgcagttgaaagatggttcctaccacgaggacgtcgggtatggagtgagcgaaggcctgaagtctaaggccttgagcctggaaaaggcgagaaaggaggctgtgactgatgggctcaaacgggcactcagatcgtttggaaatgccctagggaactgtattctggacaaagactatctaaggagcctgaacaaactgccacggcagctccctctcgaggtggacctgactaaagcaaagcgccaggatctggaaccatctgtggaagaggcaaggtacaactcatgtcgccctaacatggccttagggcaccctcaactgcagcaagttacctccccgtcacggccaagtcacgcagtaattcctgccgatcaggattgttcaagcaggtctttatcctccagtgccgtggaatctgaagcgacccaccagcggaaactaaggcagaagcaactgcagcagcagtttcgtgagaggatggaaaagcagcaggtgagagtgtcaacccctagcgcagagaaaagtgaggccgctccccctgcccctcccgttacccatagtactccagtgaccgtctcggaacctcttctggaaaaagattttctggcaggggtgacccaggagctcatcaaaactctcgaggataactccgagaagtgggcagttactcccgacgccggagatggcgtcgttaagccatcctctcgagcagatcctgcacaaacgagtgacactctggcgctgaacaatcagatggtgactcagaacaggacgcctcattctgtgtgccatcagaagcctcaggcaaaaagcggctcctgggacttgcagacatactcagcagatcagaggacaacaggcaattgggaaagtcacaggaaatcacaggacatgaagaaaagaaaatatgaccccagctag

SEQ ID NO: 111742 - DNA, 1257 bp, Artificial Sequence
  derived and/or modified sequence
atgagtggaacagaggaagctatactcggcggaagggacagtcatccagccgctggcggtggaagcgtcctctgtttcggccaatgccagtatactgcagaggaatatcaggcaatacagaaagccttgagacagcgattgggtccagagtacatttcctcacgtatggcgggaggtggacaaaaagtatgttacattgaaggacatcgtgtgatcaatttagccaacgaaatgtttggctacaatggctgggcccacagcataacacaacagaatgtggatttcgtcgacctgaataacgggaagttctacgtgggcgtttgcgcttttgttcgcgtgcagcttaaggacggaagttaccatgaagatgtgggatatggcgtttcagaggggcttaagtccaaagcacttagcctggaaaaagccaggaaggaggcagtcacggacgggctcaaacgagccctgcggtcattcggcaacgccctaggaaactgcatattagataaagattacctgcgttctctgaacaaactgccccgtcaactgcccctggaagtggacctgacaaaagcaaagaggcaggatctagagccctctgtagaagaagcgagatataatagttgccggccaaatatggctctcggacaccctcaactgcagcaggtgacatcgccatcacggccatctcatgccgtgatcccggcagaccaggattgtagtagcaggtctctctcttcaagcgcagtcgagtccgaggcaacacaccagagaaagcttcgacagaaacaactgcaacagcagtttagggagagaatggagaagcagcaggttagggtgtccacaccctccgccgaaaaatccgaggctgccccaccggcacctccagtcactcactccacccccgtgacagtctcagaacccttgttagagaaggacttcctggctggtgtcacccaggagctgatcaagactctcgaagataactcagagaaatgggctgttacaccggacgccggtgacggcgtcgtgaagccatccagtagagccgatccagcgcagaccagcgacacccttgccctgaataaccaaatggtgacacagaaccgcacgcctcactcagtttgccaccagaaaccccaggccaagtccggatcttgggatctacagacatatagtgccgatcagcgaactactggcaactgggagtcacaccgaaagagccaggacatgaagaagcgcaagtacgatccctcctag

SEQ ID NO: 111743 - DNA, 2710 bp, Artificial Sequence
  derived and/or modified sequence
ttcccagagacgctcgcgcacccttcccattctcctctgcgcggcctccatctaagatctcttccccttgtccatagcctagatcgagctccctgtgtgcaccgcgcgctgcccgaggcgcaggtcaaccagaatcaagatgtctgggactgaggaagcaattcttggaggacgtgacagccatcctgctgctggcggcggctcagtgttatgctttggacagtgccagtacacagcagaagagtaccaggccatccagaaggccctgaggcagaggctgggcccagaatacataagtagccgcatggctggcggaggccagaaggtgtgctacattgagggtcatcgggtaattaatctggccaatgagatgtttggttacaatggctgggcacactccatcacgcagcagaatgtggattttgttgacctcaacaatggcaagttctacgtgggagtctgtgcatttgtgagggtccagctgaaggatggttcatatcatgaagatgttggttatggtgttagtgagggcctcaagtccaaggctttatctttggagaaggcaaggaaggaggcggtgacagacgggctgaagcgagccctcaggagttttgggaatgcacttggaaactgtattctggacaaagactacctgagatcactaaataagcttccacgccagttgcctcttgaagtggatttaactaaagcgaagagacaagatcttgaaccgtctgtggaggaggcaagatacaacagctgccgaccgaacatggccctgggacacccacagctgcagcaggtgacctccccttccagacccagccatgctgtgataccggcggaccaggactgcagctcccgaagcctgagctcatccgccgtggagagcgaggccacgcaccagcggaagctccggcagaagcagctgcagcagcagttccgggagcggatggagaagcagcaggttcgagtctccacgccgtcagctgagaagagtgaggcagcgcctccggcccctcctgtgacgcacagcactcctgtaactgtctcagaaccactcctggagaaagacttccttgcaggagtgactcaagaattaatcaagactcttgaagacaactctgaaaagtgggctgtgactcccgatgcaggggatggtgtggtcaagccctcgtctagagcagacccagcccagacctctgacacattagccttgaacaaccagatggtgacccagaacaggactccacacagcgtttgccaccagaaaccacaagcaaaatctggatcttgggacctccaaacttatagcgctgaccaacgcacaacaggaaactgggaatctcataggaagagccaggacatgaagaaaaggaaatatgatccatcttaactgaggctcaggccacataattggactctgtcacaaagggactttggaaaactactttttggtcatgaaattgttcatcgctgctggagaatgaacgtcattgcgatttatcttgcttcattctgaaccttatcaagaggatctgactgagagcccactgcagttagagctgagcacttttgaaaagcttgtccatcactctagtagggagaggctctggacagatgaataccttttcttcggcttgtgaggcttcccactatttattactgaactattatgttaatgaagatggacattttaggaatcaccaatggctccttgccctcaagcaatataggccagacttggtcctaagcacctgcctcagcaattgtctacattcagttgttttgcataacgtctgccttctttcctttacggtccatgcctttaatgttgcccacattaagcactgtggatcacgacaggaaaaaggttggagcagtgcttttcactactttgtatcaatccaggctacaatcttcatttaatataaataatttatggatttatgacattacaatcctgcattgtttcaagactgacattttttcctaaggaaggaaataatcatctaagaccacgaaaaaaggctgttttttgtttttttttttttttttttttttgagacggggtctggctgtgttgccctgactggagttcagtggtgcaaacacagctctctccacaacctcttgggcccaagtgatactcccacctctgccttacaaaatacagggattactggtgtgagccactgtgtctggccagaaaaggcatttttgagaaagcaaatcgtataccttattaacaaaatagaatatatatatattgcttatctgaaatgcttgaaaccagaattgttttgcattttttgaatatttgtatacacataatgagaccttggggatgggacccaagtctgaacgtggaattcacctgtgtttcgtgtatatgcctcatacacataattttgtgcatgaaacagagtttttgtataagaagatacactgcagctgaagagggctgggtttttttttctcttagggtcgctgcataaactgttgtatgcctggtgctttgcgacttgtcacacgaggtcacgtgtggaattttccacttctggcatcacgtcagtgctcagaaattttctgatctcagagcatttcaattagggatgctcaaacgcaactgtttctacttccccatttcaggtgtgagatgtaacccaccttgaccataaattggcttttcatagtgctcagatgtttc

SEQ ID NO: 111744 - DNA, 2366 bp, Artificial Sequence
  derived and/or modified sequence
gttccctcccaggatcgacatgcacttggatcattgcagtttctgggcctgctgtcatctcccccttcagtacttcccacatatgactaccaactgttagacgatgtgctgctgccagaccagcctttcatttcttggacatccggctatttacccaggaaaagtcatcctttgactatttttcatgacctttctcatctgactcgtgatctgcccatcttgttactccctagcagtgtggtaagaggtcaaccagaatcaagatgtctgggactgaggaagcaattcttggaggacgtgacagccatcctgctgctggcggcggctcagtgttatgctttggacagtgccagtacacagcagaagagtaccaggccatccagaaggccctgaggcagaggctgggcccagaatacataagtagccgcatggctggcggaggccagaaggtgtgctacattgagggtcatcgggtaattaatctggccaatgagatgtttggttacaatggctgggcacactccatcacgcagcagaatgtggattttgttgacctcaacaatggcaagttctacgtgggagtctgtgcatttgtgagggtccagctgaaggatggttcatatcatgaagatgttggttatggtgttagtgagggcctcaagtccaaggctttatctttggagaaggcaaggaaggaggcggtgacagacgggctgaagcgagccctcaggagttttgggaatgcacttggaaactgtattctggacaaagactacctgagatcactaaataagcttccacgccagttgcctcttgaagtggatttaactaaagcgaagagacaagatcttgaaccgtctgtggaggaggcaagatacaacagctgccgaccgaacatggccctgggacacccacagctgcagcaggtgacctccccttccagacccagccatgctgtgataccggcggaccaggactgcagctcccgaagcctgagctcatccgccgtggagagcgaggccacgcaccagcggaagctccggcagaagcagctgcagcagcagttccgggagcggatggagaagcagcaggttcgagtctccacgccgtcagctgagaagagtgaggcagcgcctccggcccctcctgtgacgcacagcactcctgtaactgtctcagaaccactcctggagaaagacttccttgcaggagtgactcaagaattaatcaagactcttgaagacaactctgaaaagtgggctgtgactcccgatgcaggggatggtgtggtcaagccctcgtctagagcagacccagcccagacctctgacacattagccttgaacaaccagatggtgacccagaacaggactccacacagcgtttgccaccagaaaccacaagcaaaatctggatcttgggacctccaaacttatagcgctgaccaacgcacaacaggaaactgggaatctcataggaagagccaggacatgaagaaaaggaaatatgatccatcttaactgaggctcaggccacataattggactctgtcacaaagggactttggaaaactactttttggtcatgaaattgttcatcgctgctggagaatgaacgtcattgcgatttatcttgcttcattctgaaccttatcaagaggatctgactgagagcccactgcagttagagctgagcacttttgaaaagcttgtccatcactctagtagggagaggctctggacagatgaataccttttcttcggcttgtgaggcttcccactatttattactgaactattatgttaatgaagatggacattttaggaatcaccaatggctccttgccctcaagcaatataggccagacttggtcctaagcacctgcctcagcaattgtctacattcagttgttttgcataacgtctgccttctttcctttacggtccatgcctttaatgttgcccacattaagcactgtggatcacgacaggaaaaaggttggagcagtgcttttcactactttgtatcaatccaggctacaatcttcatttaatataaataatttatggatttatgacattacaatcctgcattgtttcaagactgacattttttcctaaggaaggaaataatcatctaagaccacgaaaaaaggctgttttttgtttttttttttttttttttttttgagacggggtctggctgtgttgccctgactggagttcagtggtgcaaacacagctctctccacaacctcttgggcccaagtgatactcccacctctgccttacaaaatacagggattactggtgtgagccactgtgtctggccagaaaaggcatttttgagaaagcaaatcgtatacc

SEQ ID NO: 111745 - DNA, 1380 bp, Artificial Sequence
  derived and/or modified sequence
aagatctcttccccttgtccatagcctagatcgagctccctgtgtgcaccgcgcgctgcccgaggcgcgtgtgctacattgagggtcatcgggtaattaatctggccaatgagatgtttggttacaatggctgggcacactccatcacgcagcagaatgtggattttgttgacctcaacaatggcaagttctacgtgggagtctgtgcatttgtgagggtccagctgaaggatggttcatatcatgaagatgttggttatggtgttagtgagggcctcaagtccaaggctttatctttggagaaggcaaggaaggaggcggtgacagacgggctgaagcgagccctcaggagttttgggaatgcacttggaaactgtattctggacaaagactacctgagatcactaaataagcttccacgccagttgcctcttgaagtggatttaactaaagcgaagagacaagatcttgaaccgtctgtggaggaggcaagatacaacagctgccgaccgaacatggccctgggacacccacagctgcagcaggtgacctccccttccagacccagccatgctgtgataccggcggaccaggactgcagctcccgaagcctgagctcatccgccgtggagagcgaggccacgcaccagcggaagctccggcagaagcagctgcagcagcagttccgggagcggatggagaagcagcaggttcgagtctccacgccgtcagctgagaagagtgaggcagcgcctccggcccctcctgtgacgcacagcactcctgtaactgtctcagaaccactcctggagaaagacttccttgcaggagtgactcaagaattaatcaagactcttgaagacaactctgaaaagtgggctgtgactcccgatgcaggggatggtgtggtcaagccctcgtctagagcagacccagcccagacctctgacacattagccttgaacaaccagatggtgacccagaacaggactccacacagcgtttgccaccagaaaccacaagcaaaatctggatcttgggacctccaaacttatagcgctgaccaacgcacaacaggaaactgggaatctcataggaagagccaggacatgaagaaaaggaaatatgatccatcttaactgaggctcaggccacataattggactctgtcacaaagggactttggaaaactactttttggtcatgaaattgttcatcgctgctggagaatgaacgtcattgcgatttatcttgcttcattctgaaccttatcaagaggatctgactgagagcccactgcagttagagctgagcacttttgaaaagcttgtccatcactctagtagggagaggctctggacagatgaataccttttcttc

SEQ ID NO: 111746 - protein, 226 aa, Artificial Sequence
  derived and/or modified sequence
MSGTEEAILGGRDSHPAAGGGSVLCFGQCQYTAEEYQAIQKALRQRLGPEYISSRMAGGGQKVCYIEGHRVINLANEMFGYNGWAHSITQQNVDFVDLNNGKFYVGVCAFVRVQLKDGSYHEDVGYGVSEGLKSKALSLEKARKEAVTDGLKRALRLPLLGVSGRILYSLFSVHSVMCAGGLPTPTASAQTAPSSPCSSAVLRYAQEFWECTWKLYSGQRLPEITK

SEQ ID NO: 111747 - DNA, 681 bp, Artificial Sequence
  derived and/or modified sequence
atgagcggcaccgaggaggccatcctgggcggcagagacagccaccccgccgccggcggcggcagcgtgctgtgcttcggccagtgccagtacaccgccgaggagtaccaggccatccagaaggccctgagacagagactgggccccgagtacatcagcagcagaatggccggcggcggccagaaggtgtgctacatcgagggccacagagtgatcaacctggccaacgagatgttcggctacaacggctgggcccacagcatcacccagcagaacgtggacttcgtggacctgaacaacggcaagttctacgtgggcgtgtgcgccttcgtgagagtgcagctgaaggacggcagctaccacgaggacgtgggctacggcgtgagcgagggcctgaagagcaaggccctgagcctggagaaggccagaaaggaggccgtgaccgacggcctgaagagagccctgagactgcccctgctgggcgtgagcggcagaatcctgtacagcctgttcagcgtgcacagcgtgatgtgcgccggcggcctgcccacccccaccgccagcgcccagaccgcccccagcagcccctgcagcagcgccgtgctgagatacgcccaggagttctgggagtgcacctggaagctgtacagcggccagagactgcccgagatcaccaagtag

SEQ ID NO: 111748 - DNA, 681 bp, Artificial Sequence
  derived and/or modified sequence
atgagcggaacagaggaggccatcctgggaggcagagatagccatcccgctgccggcggcggaagtgtgctgtgctttggtcagtgtcagtacaccgctgaggagtatcaggccatacagaaggcccttaggcagagactggggcccgagtacatctccagtagaatggccggcggaggacagaaggtgtgctatatcgaaggtcacagagtgattaacctcgccaacgagatgtttgggtacaacggatgggcccactccatcactcagcagaatgttgactttgtggatttaaacaatggtaaattttacgtgggcgtttgcgcattcgtgcgcgtccagctgaaagacgggagctatcatgaggatgtaggttatggggtgagcgaagggctaaagagcaaagccctttctctcgagaaagctcgcaaggaggctgtaactgatggcctgaagcgggccctacggctaccgttgcttggggtctcaggacgcatactgtacagtttgttctctgtccactccgtgatgtgtgccgggggacttccaactccgaccgcttccgctcagaccgcaccctccagcccttgttctagcgcagtgctcaggtacgctcaagaattctgggagtgtacatggaagttatatagtggccagcggttacccgagattacaaaatag

SEQ ID NO: 111749 - DNA, 681 bp, Artificial Sequence
  derived and/or modified sequence
atgagcggcacagaggaggccatcctgggcggccgggacagccaccctgctgctgggggcggctctgtgctgtgcttcggccagtgccagtacacagctgaggagtaccaggccatccagaaggccctgcggcagaggctgggccctgagtacatcagcagcaggatggccggcggcggccagaaggtgtgctacatcgagggccacagggtcatcaacctggccaatgagatgtttggctacaacggctgggcccacagcatcacccagcagaatgtggactttgtggacctgaacaacgggaagttctacgtgggcgtgtgtgcctttgtgcgggtgcagctgaaggatggcagctaccatgaagatgtgggctacggcgtgtctgagggcctgaagagcaaggccctgagcctggagaaggccaggaaggaggccgtgacagatggcctgaagagggccctgcggctgcccctgctgggcgtgtctggccgcatcctgtacagcctcttctctgtgcacagcgtgatgtgtgccggcggcctgcccacccccacagccagcgcccagacagcccccagcagcccctgcagcagcgctgtgctgcgctatgcccaggagttctgggagtgcacctggaagctgtacagcggccagaggctgcctgagatcaccaagtag

SEQ ID NO: 111750 - DNA, 681 bp, Artificial Sequence
  derived and/or modified sequence
atgagcggcaccgaggaggccatcctgggcggccgggacagccaccctgcagccggtggagggtctgtcctgtgcttcggccagtgccagtacactgcagaggagtatcaagccatccagaaagccctgagacagcggctggggccagaatacatctcctcacgaatggccggtggaggccagaaggtctgctacatcgaggggcacagagtgattaacctggccaatgagatgttcgggtataacggctgggctcacagcattacccagcagaacgtggactttgtggatctgaataacggtaagttctatgtgggagtctgcgcctttgtgagggttcagctcaaggatgggtcataccacgaggacgtggggtacggagtgagcgaggggttgaaatctaaggcactctctctcgagaaggctagaaaagaggccgtgacagacgggctgaagcgcgctctgcggctgcctctcctgggggtcagcgggcggattttgtacagcctgttctccgtgcattctgtcatgtgtgccggcgggctccccaccccaactgcctctgctcagactgcaccctcttctccttgctcatctgctgtacttagatatgctcaagagttctgggaatgcacatggaagctgtatagcggacagcgattgcccgagataaccaagtag

SEQ ID NO: 111751 - DNA, 681 bp, Artificial Sequence
  derived and/or modified sequence
atgtctggcacagaagaggctattctgggtggtcgcgactcccatcccgctgccggtggaggctccgtgctgtgttttgggcagtgccagtatactgccgaagagtatcaggccatacaaaaagccctgcgacaacgcttgggtcccgagtatatcagtagcagaatggcaggaggcggacagaaagtgtgttatattgaaggccaccgcgtgattaacctcgctaacgaaatgtttggatacaacggttgggctcacagcatcactcaacaaaatgttgattttgttgatctcaataatggtaaattctacgtgggtgtgtgtgcattcgtgcgcgtgcagctgaaggatggttcctaccacgaggatgtcggatacggtgtaagcgaaggcctcaagtccaaagcactgtccctggaaaaagctaggaaggaggccgttactgatgggctgaaacgggctttgaggctgccactgctgggtgtctcaggacgcatactctatagtctcttctccgtacattccgtaatgtgcgctgggggtctgcccacaccgacggcttctgcccagaccgccccatcaagtccatgctcatcagctgttttacggtatgcacaggaattttgggagtgtacttggaagctgtactctggccaacgcttgccagaaattacaaaatag

SEQ ID NO: 111752 - DNA, 681 bp, Artificial Sequence
  derived and/or modified sequence
atgtctgggactgaggaagcaattcttggaggacgtgacagccatcctgctgctggcggcggctcagtgttatgctttggacagtgccagtacacagcagaagagtaccaggccatccagaaggccctgaggcagaggctgggcccagaatacataagtagccgcatggctggcggaggccagaaggtgtgctacattgagggtcatcgggtaattaatctggccaatgagatgtttggttacaatggctgggcacactccatcacgcagcagaatgtggattttgttgacctcaacaatggcaagttctacgtgggagtctgtgcatttgtgagggtccagctgaaggatggttcatatcatgaagatgttggttatggtgttagtgagggcctcaagtccaaggctttatctttggagaaggcaaggaaggaggcggtgacagacgggctgaagcgagccctcaggcttcccttgctgggagtaagtggtagaatcctgtactctctcttctccgtgcactcagtcatgtgtgccggaggccttcccactcctactgcgagtgcacagacagcaccctcctctccgtgctcctcagcagtcctccgctacgcacaggagttttgggaatgcacttggaaactgtattctggacaaagactacctgagatcactaaataa

SEQ ID NO: 111753 - DNA, 1026 bp, Artificial Sequence
  derived and/or modified sequence
atgttcggctacaacggctgggcccacagcatcacccagcagaacgtggacttcgtggacctgaacaacggcaagttctacgtgggcgtgtgcgccttcgtgagagtgcagctgaaggacggcagctaccacgaggacgtgggctacggcgtgagcgagggcctgaagagcaaggccctgagcctggagaaggccagaaaggaggccgtgaccgacggcctgaagagagccctgagaagcttcggcaacgccctgggcaactgcatcctggacaaggactacctgagaagcctgaacaagctgcccagacagctgcccctggaggtggacctgaccaaggccaagagacaggacctggagcccagcgtggaggaggccagatacaacagctgcagacccaacatggccctgggccacccccagctgcagcaggtgaccagccccagcagacccagccacgccgtgatccccgccgaccaggactgcagcagcagaagcctgagcagcagcgccgtggagagcgaggccacccaccagagaaagctgagacagaagcagctgcagcagcagttcagagagagaatggagaagcagcaggtgagagtgagcacccccagcgccgagaagagcgaggccgccccccccgccccccccgtgacccacagcacccccgtgaccgtgagcgagcccctgctggagaaggacttcctggccggcgtgacccaggagctgatcaagaccctggaggacaacagcgagaagtgggccgtgacccccgacgccggcgacggcgtggtgaagcccagcagcagagccgaccccgcccagaccagcgacaccctggccctgaacaaccagatggtgacccagaacagaaccccccacagcgtgtgccaccagaagccccaggccaagagcggcagctgggacctgcagacctacagcgccgaccagagaaccaccggcaactgggagagccacagaaagagccaggacatgaagaagagaaagtacgaccccagctag

SEQ ID NO: 111754 - DNA, 1026 bp, Artificial Sequence
  derived and/or modified sequence
atgttcggatataatggatgggcacatagcattacacagcagaacgtcgacttcgtggatcttaacaacggaaagttctacgtaggcgtgtgcgcattcgtgagagtacagctcaaggacggtagctaccacgaagacgttggatacggcgtgagtgagggcttgaaatcgaaagccctctctctggagaaggcacggaaagaggccgtaaccgacgggttgaagcgtgcgctgcggagcttcggtaacgccctaggcaactgtatcctcgataaagattatctccggagcctgaacaagctgcctcgccaactgcccttagaggtcgacctaaccaaagcaaagcgccaggatctggagccgagtgtggaggaagctcgatataactcttgcaggccaaacatggcccttggccacccgcagcttcagcaggtcacgtcaccaagtagaccttcccatgccgtaatcccagcggatcaagattgttcatcccgcagcttatcaagcagcgctgtcgagagtgaagcaactcatcagcggaaactacgacaaaaacagctccagcagcagttccgggagcgaatggaaaagcagcaggtgcgcgtctcaacaccctctgcagaaaagtcagaagccgccccccccgcaccaccggtgacccatagcactccagtaacagtgtccgagccactccttgaaaaagatttcctcgccggcgtcacacaagagctcattaagacactcgaggacaacagcgaaaaatgggcagtaactccggatgccggggacggcgtcgtgaagccaagctcacgtgcagatcccgcccagacttctgataccctcgctttaaacaatcagatggtaactcagaaccggactccacattcagtgtgccatcaaaaacctcaggcaaagtctgggagctgggatctgcagacctacagcgctgaccaaaggactaccggtaactgggaatcccacagaaaatcacaggatatgaagaagcgcaagtacgacccaagttag

SEQ ID NO: 111755 - DNA, 1026 bp, Artificial Sequence
  derived and/or modified sequence
atgtttggctacaacggctgggcccacagcatcacccagcagaatgtggactttgtggacctgaacaacgggaagttctacgtgggcgtgtgtgcctttgtgcgggtgcagctgaaggatggcagctaccatgaagatgtgggctatggagtgtctgagggcctgaagagcaaggccctgagcctggagaaggccaggaaggaggccgtgacagatggcctgaagagggccctgcggagctttggaaatgccctgggcaactgcatcctggacaaggactacctgcggagcctgaacaagctgccccggcagctgcccctggaggtggacctgaccaaggccaagaggcaggacctggagcccagcgtggaggaggcccgctacaacagctgccggcccaacatggccctgggccacccccagctgcagcaggtgaccagccccagccggcccagccacgccgtcatcccagctgaccaggactgcagcagccgcagcctgagcagcagcgctgtggagagcgaggccacccaccagaggaagctgcggcagaagcagctgcagcagcagttccgggagaggatggagaagcagcaggtgcgggtgtccacccccagcgctgagaagtctgaggccgcccccccagcccctcctgtgacccacagcacccctgtgacagtgtctgagcccctgctggagaaggacttcctggccggcgtgacccaggagctgatcaagaccctggaggacaacagcgagaagtgggccgtgaccccagatgctggagatggagtggtgaagcccagcagcagagctgaccctgcccagaccagtgacaccctggccctgaacaaccagatggtgacccagaacagaacaccccacagcgtgtgccaccagaagccccaggccaagagcggctcctgggacctgcagacctacagcgctgaccagaggaccactggaaactgggagagccacaggaagagccaggacatgaagaagaggaaatatgaccccagctag

SEQ ID NO: 111756 - DNA, 1026 bp, Artificial Sequence
  derived and/or modified sequence
atgttcggctacaacggctgggcccacagcatcacccagcagaacgtagatttcgtggatttgaataatgggaaattctatgttggggtttgcgcttttgtgcgagttcagttgaaagacggctcctatcatgaagacgtaggatacggggtgtccgaaggtcttaagtccaaggccctttctctggagaaagcccgaaaagaagctgtaacggacggtttgaaacgggctctgaggtcctttggcaatgcactgggtaattgtatcctggataaggattatctgagatcactcaacaagctcccacggcagctgcccctcgaggtggatctcacaaaggcaaaacgtcaagacctagaacccagcgttgaagaggctcggtacaacagttgtagaccaaacatggccctcggccatcctcagttacagcaggtcacaagcccatcccgcccttctcacgcggtcataccggcggatcaggattgcagttctcggtcactgtctagctccgccgtggagtcggaggccacacaccagcgaaagctgaggcagaaacagttgcagcagcaattcagggaaaggatggagaagcaacaggttcgcgtaagtactcccagtgccgaaaagagcgaggccgcccccccggctccccccgtcactcactcgacccccgtgacagtgagcgaaccgctactcgagaaagacttcctggcaggcgttacgcaagaactgattaagacgcttgaggacaattccgaaaagtgggcagtcaccccagatgccggcgacggggtggttaaaccatcttcacgggccgatcctgcccagacatcagatacccttgcgctcaataaccagatggtgactcagaaccggactccccattcagtctgtcatcagaaaccccaggccaagagcgggagctgggacctccagacctatagcgcggaccagcgcacaacaggaaactgggaaagccaccggaagtctcaggacatgaagaagagaaaatacgatcctagctag

SEQ ID NO: 111757 - DNA, 1026 bp, Artificial Sequence
  derived and/or modified sequence
atgttcggctataacgggtgggctcattctatcacacagcaaaacgttgatttcgtggatctgaataatggaaagttttacgtgggcgtgtgcgcattcgtgcgtgtacagctgaaagatggatcctaccacgaggatgtgggttatggtgtgagcgaaggcctgaaatctaaggcgctgagcctggagaaggcacgaaaagaggccgtgacagacgggctgaagcgcgcactccgatccttcggcaacgccttaggcaattgtattctggacaaggattatctcaggtcattgaacaagctgccccgacagctgcccttggaggtagacctgacgaaggccaaacgacaggatctagaaccatctgtcgaagaggcacgctacaacagttgccgccctaatatggccctgggtcacccccagttgcagcaggttacgagtccgagtcgcccttctcatgccgtgatccccgctgaccaagactgctccagtaggtctttaagttcttccgccgtggagagcgaggcgacacaccagcgcaagctaagacagaagcagctgcagcagcagtttcgtgaacgcatggagaaacagcaagtccgcgtttcgactccttctgccgagaagtctgaggccgcaccaccagcacctccagtgactcactcgactccagtcacagtatcagagccccttctagaaaaggactttcttgctggcgtgacgcaggaactcataaaaaccctggaggacaattccgagaaatgggctgtgactccagacgctggggacggcgttgtgaagccatcctcacgtgccgaccccgctcagacatctgacacacttgctttgaataatcagatggtcacgcagaataggactcctcacagcgtgtgccatcagaagccccaggccaaatctggaagttgggatttgcagacatactccgcagatcagcggacaaccggaaactgggagagccaccgcaagagccaggacatgaagaagcgcaagtacgacccttcatag

SEQ ID NO: 111758 - protein, 388 aa, Artificial Sequence
  derived and/or modified sequence
MMTITFLPYTFSLMVTFPDVPLGIFLFCVCVIAIGVVQALIVGYAFHFPHLLSPQIQRSAHRALYRRHVLGIVLQGPALCFAAAIFSLFFVPLSYLLMVTVILLPYVSKVTGWCRDRLLGHREPSAHPVEVFSFDLHEPLSKERVEAFSDGVYAIVATLLILDICEDNVPDPKDVKERFSGSLVAALSATGPRFLAYFGSFATVGLLWFAHHSLFLHVRKATRAMGLLNTLSLAFVGGLPLAYQQTSAFARQPRDELERVRVSCTIIFLASIFQLAMWTTALLHQAETLQPSVWFGGREHVLMFAKLALYPCASLLAFASTCLLSRFSVGIFHLMQIAVPCAFLLLRLLVGLALATLRVLRGLARPEHPPPAPTGQDDPQSQLLPAPC

SEQ ID NO: 111759 - DNA, 1167 bp, Artificial Sequence
  derived and/or modified sequence
atgatgaccatcaccttcctgccctacaccttcagcctgatggtgaccttccccgacgtgcccctgggcatcttcctgttctgcgtgtgcgtgatcgccatcggcgtggtgcaggccctgatcgtgggctacgccttccacttcccccacctgctgagcccccagatccagagaagcgcccacagagccctgtacagaagacacgtgctgggcatcgtgctgcagggccccgccctgtgcttcgccgccgccatcttcagcctgttcttcgtgcccctgagctacctgctgatggtgaccgtgatcctgctgccctacgtgagcaaggtgaccggctggtgcagagacagactgctgggccacagagagcccagcgcccaccccgtggaggtgttcagcttcgacctgcacgagcccctgagcaaggagagagtggaggccttcagcgacggcgtgtacgccatcgtggccaccctgctgatcctggacatctgcgaggacaacgtgcccgaccccaaggacgtgaaggagagattcagcggcagcctggtggccgccctgagcgccaccggccccagattcctggcctacttcggcagcttcgccaccgtgggcctgctgtggttcgcccaccacagcctgttcctgcacgtgagaaaggccaccagagccatgggcctgctgaacaccctgagcctggccttcgtgggcggcctgcccctggcctaccagcagaccagcgccttcgccagacagcccagagacgagctggagagagtgagagtgagctgcaccatcatcttcctggccagcatcttccagctggccatgtggaccaccgccctgctgcaccaggccgagaccctgcagcccagcgtgtggttcggcggcagagagcacgtgctgatgttcgccaagctggccctgtacccctgcgccagcctgctggccttcgccagcacctgcctgctgagcagattcagcgtgggcatcttccacctgatgcagatcgccgtgccctgcgccttcctgctgctgagactgctggtgggcctggccctggccaccctgagagtgctgagaggcctggccagacccgagcaccccccccccgcccccaccggccaggacgacccccagagccagctgctgcccgccccctgctag

SEQ ID NO: 111760 - DNA, 1167 bp, Artificial Sequence
  derived and/or modified sequence
atgatgacaatcacattcctgccctacacgttcagtcttatggtaacctttcccgatgtgcccctcgggatcttcttgttttgcgtctgtgtaatcgccatcggagtggtgcaggctcttattgtgggatatgccttccacttcccacatctgctttcaccccagatccagagaagcgcacatcgagctctctataggagacatgttttggggatcgtcctacagggccccgccctctgttttgcagctgccatattttccctcttcttcgtcccactgagttacctcctaatggtcactgtgatcctattgccctacgtctcaaaagtgactggctggtgccgagacagactacttggacaccgtgaaccatcagcccatccagtcgaggtgttcagtttcgatctccatgagccactgtctaaggagcgtgtggaggcgttctcagacggcgtgtatgctatagtggccactctgcttattctggacatatgcgaagacaatgttcccgaccctaaagatgtgaaagaaagattttctggaagcctcgtggccgccctttctgccactggcccaaggttcttggcatattttggttcattcgcgactgttggtctgctgtggtttgcgcatcattccctattcctgcacgtgcgcaaggctactagagcaatgggacttttgaatactcttagtttagctttcgtggggggcctcccactggcttaccagcaaacctccgctttcgctcgccagccccgggacgaacttgaacgagtgcgagtgagttgtacaatcatattcctggcgtctatctttcagttggcaatgtggacaactgctctcctgcaccaagccgagaccctccaaccttctgtgtggttcggtggacgggagcacgtcctgatgttcgcaaagctggccttatatccgtgcgcctccctgcttgcattcgcctccacctgtctgttgagccgctttagtgttgggattttccatctgatgcaaattgccgttccgtgcgctttcttactcctgcggttgctggtcggcctcgcattagcaacattacgggtacttaggggactggccagaccagaacaccctccaccagctcctaccggacaggatgacccacagtcccagcttctccctgccccgtgctag

SEQ ID NO: 111761 - DNA, 1167 bp, Artificial Sequence
  derived and/or modified sequence
atgatgaccatcaccttcctgccctacaccttcagcctgatggtgaccttcccagatgtgcccctgggcatcttcctgttctgtgtgtgtgtgattgccatcggcgtggtgcaggccctgattgtgggctacgccttccacttcccccacctgctgagcccccagatccagaggtctgcccaccgggccctgtaccgccgccacgtgctgggcatcgtgctgcagggccctgccctgtgctttgctgctgccatcttcagcctcttctttgtgcccctgagctacctgctgatggtgaccgtcatcctgctgccctacgtgtccaaggtgacaggctggtgccgggaccggctgctgggccaccgggagcccagcgcccaccctgtggaggtgttctcctttgacctgcacgagcccctgagcaaggagcgggtggaggccttcagtgatggagtgtatgccatcgtggccaccctgctgatcctggacatctgtgaggacaacgtgcctgaccccaaggatgtgaaggagcgcttcagcggcagcctggtggccgccctgagcgccaccggcccccgcttcctggcctacttcggcagctttgccaccgtgggcctgctgtggtttgcccaccacagcctcttcctgcacgtgaggaaggccacccgggccatgggcctgctgaacaccctgagcctggcctttgtgggcggcctgcccctggcctaccagcagaccagcgcctttgcccggcagcccagagatgagctggagcgggtgcgggtgtcctgcaccatcatcttcctggccagcatcttccagctggccatgtggaccacagccctgctgcaccaggccgagaccctgcagcccagcgtgtggtttggaggccgggagcacgtgctgatgtttgccaagctggccctgtacccctgtgccagcctgctggcctttgccagcacctgcctgctgagccgcttctctgtgggcatcttccacctgatgcagattgctgtgccctgtgccttcctgctgctgcggctgctggtgggcctggccctggccaccctgcgggtgctgcggggcctggcccggcctgagcaccccccaccagcccccaccggccaggatgacccccagagccagctgctgcctgccccctgctag

SEQ ID NO: 111762 - DNA, 1167 bp, Artificial Sequence
  derived and/or modified sequence
atgatgaccatcaccttcctgccctacaccttcagcctgatggtgactttccccgatgttccgctggggatttttctgttctgtgtgtgtgtgattgccattggggttgtgcaggctttgatcgtagggtacgcatttcatttcccacatctcctctccccccagattcaaagatctgctcatagggccctttaccggcgtcacgtcctaggaattgttctccaaggtcccgccctatgtttcgcagctgcaatcttcagcctgtttttcgtgccgctttcttacctcttaatggtaacagtgatcttgctcccgtacgtcagcaaagttaccggctggtgtagagaccgactgctggggcatcgggagcccagtgctcatccagtggaggtgttttcatttgacctacacgaacctctgtctaaagagagagtagaggcattctcggatggagtatatgccatcgtcgcaactcttctaatcttggatatatgcgaggacaacgtgcctgatcctaaggatgttaaagaaagatttagcggtagcctggtggccgcgttatcagccaccggcccaaggtttttggcctacttcggtagctttgctacagtaggcctgctgtggttcgcacatcatagtctgtttctacacgtgcgcaaagcaacccgggcaatgggcctcttaaacactctgtcacttgcgttcgtcgggggactacctcttgcttatcaacagacgtccgccttcgcaaggcagccaagggacgagctagagcgagtaagggtttcctgcactataatttttctggcctcaatcttccaactcgccatgtggactaccgcactcttacaccaggctgaaacacttcaaccttccgtgtggtttggcggccgtgaacatgtcttgatgtttgccaaattggctctatatccgtgtgcctctctgttagcatttgcttcgacctgcctgttgagcaggttttctgtgggaatcttccatcttatgcagattgccgtcccatgcgcatttttgctgctgaggctcctggtgggactggcgctggctaccttgcgagtcttgagaggactggcgaggcccgagcatccccccccagctcccaccggtcaggacgatcctcagtctcagctacttccagcaccctgttag

SEQ ID NO: 111763 - DNA, 1167 bp, Artificial Sequence
  derived and/or modified sequence
atgatgaccataacgtttctgccctacacattttcactgatggttacattccccgacgtgccgttaggaatttttttattctgcgtgtgtgttatcgctatcggtgtcgtccaagctctgattgttggatatgccttccacttccctcatctgcttagtcctcagattcagagatcagcccatcgagccttgtacagaagacacgtgctggggattgtgctccaggggccagccttatgcttcgccgctgccattttctctctgttctttgtacccttatcctacctgcttatggttacagtcatcttgctaccttatgtgagcaaagtgacagggtggtgtcgcgatcgactcctaggccaccgagagccatccgcacaccctgtcgaggttttcagctttgatctccatgagccattgagcaaagaaagggtcgaagccttctcagatggcgtatatgccattgtggccacattgctgatacttgacatctgtgaagacaatgtcccagaccctaaagatgtcaaggaaaggttctctggaagtttggtggctgctcttagcgcgaccgggcctcgctttttagcatactttggatcttttgcgacagtagggctcctttggtttgcacatcacagtctgttcctccacgtacggaaggccacgcgggcaatggggttactaaatacgttgagccttgctttcgtgggcggactgcctctggcttatcagcagacaagtgcattcgcccgtcagccacgcgacgagctagaaagggttcgggtaagttgcacaattatcttcctagcatctatttttcagctagctatgtggacaacagccctgctgcatcaggctgaaaccttacaacccagcgtctggttcgggggtcgcgaacacgtgctcatgtttgctaagttggctttgtacccctgcgccagcctgctcgcttttgcctcaacctgcctgctcagtcgatttagcgtgggcatctttcatcttatgcagattgcagtgccatgcgccttcctcctcttgagattactggtcggcctcgccctggcgacactccgcgtattacggggactggcacgaccagaacatccccctcccgcacccaccggccaggatgatccccagtcacaactgctccccgctccatgctag

SEQ ID NO: 111764 - protein, 919 aa, Artificial Sequence
  derived and/or modified sequence
MWNISQGCTTGTPAPTPDPPSVTCAERVFLESPPMACPAKVHTACKDLYHPICPLGQCKVSIIPPIALNSTDSDGFCRATFSFCVSPLLVFVNSKSGDNQGVKFLRRFKQLLNPAQVFDLMNGGPHLGLRLFQKFDNFRILVCGGDGSVGWVLSEIDKLNLNKQCQLGVLPLGTGNDLARVLGWGGSYDDDTQLPQILEKLERASTKMLDRWSIMTYELKLPPKASLLPGPPEASEEFYMTIYEDSVATHLTKILNSDEHAVVISSAKTLCETVKDFVAKVEKTYDKTLENAVVADAVASKCSVLNEKLEQLLQALHTDSQAAPVLPGLSPLIVEEDAVESSSEESLGESKEQLGDDVTKPSSQKAVKPREIMLRANSLKKAVRQVIEEAGKVMDDPTVHPCEPANQSSDYDSTETDESKEEAKDDGAKESITVKTAPRSPDARASYGHSQTDSVPGPAVAASKENLPVLNTRIICPGLRAGLAASIAGSSIINKMLLANIDPFGATPFIDPDLDSVDGYSEKCVMNNYFGIGLDAKISLEFNNKREEHPEKCRSRTKNLMWYGVLGTRELLQRSYKNLEQRVQLECDGQYIPLPSLQGIAVLNIPSYAGGTNFWGGTKEDDIFAAPSFDDKILEVVAIFDSMQMAVSRVIKLQHHRIAQCRTVKITIFGDEGVPVQVDGEAWVQPPGIIKIVHKNRAQMLTRDRAFESTLKSWEDKQKCDSGKPVLRTHLYIHHAIDLATEEVSQMQLCSQAAEELITRICDAATIHCLLEQELAHAVNACSHALNKANPRCPESLTRDTATEIAINVKALYNETESLLVGRVPLQLESPHEERVSNALHSVEVELQKLTEIPWLYYILHPNEDEEPPMDCTKRNNRSTVFRIVPKFKKEKVQKQKTSSQPGSGDTESGSCEANSPGN

SEQ ID NO: 111765 - DNA, 2760 bp, Artificial Sequence
  derived and/or modified sequence
atgtggaacatcagccagggctgcaccaccggcacccccgcccccacccccgacccccccagcgtgacctgcgccgagagagtgttcctggagagcccccccatggcctgccccgccaaggtgcacaccgcctgcaaggacctgtaccaccccatctgccccctgggccagtgcaaggtgagcatcatcccccccatcgccctgaacagcaccgacagcgacggcttctgcagagccaccttcagcttctgcgtgagccccctgctggtgttcgtgaacagcaagagcggcgacaaccagggcgtgaagttcctgagaagattcaagcagctgctgaaccccgcccaggtgttcgacctgatgaacggcggcccccacctgggcctgagactgttccagaagttcgacaacttcagaatcctggtgtgcggcggcgacggcagcgtgggctgggtgctgagcgagatcgacaagctgaacctgaacaagcagtgccagctgggcgtgctgcccctgggcaccggcaacgacctggccagagtgctgggctggggcggcagctacgacgacgacacccagctgccccagatcctggagaagctggagagagccagcaccaagatgctggacagatggagcatcatgacctacgagctgaagctgccccccaaggccagcctgctgcccggcccccccgaggccagcgaggagttctacatgaccatctacgaggacagcgtggccacccacctgaccaagatcctgaacagcgacgagcacgccgtggtgatcagcagcgccaagaccctgtgcgagaccgtgaaggacttcgtggccaaggtggagaagacctacgacaagaccctggagaacgccgtggtggccgacgccgtggccagcaagtgcagcgtgctgaacgagaagctggagcagctgctgcaggccctgcacaccgacagccaggccgcccccgtgctgcccggcctgagccccctgatcgtggaggaggacgccgtggagagcagcagcgaggagagcctgggcgagagcaaggagcagctgggcgacgacgtgaccaagcccagcagccagaaggccgtgaagcccagagagatcatgctgagagccaacagcctgaagaaggccgtgagacaggtgatcgaggaggccggcaaggtgatggacgaccccaccgtgcacccctgcgagcccgccaaccagagcagcgactacgacagcaccgagaccgacgagagcaaggaggaggccaaggacgacggcgccaaggagagcatcaccgtgaagaccgcccccagaagccccgacgccagagccagctacggccacagccagaccgacagcgtgcccggccccgccgtggccgccagcaaggagaacctgcccgtgctgaacaccagaatcatctgccccggcctgagagccggcctggccgccagcatcgccggcagcagcatcatcaacaagatgctgctggccaacatcgaccccttcggcgccacccccttcatcgaccccgacctggacagcgtggacggctacagcgagaagtgcgtgatgaacaactacttcggcatcggcctggacgccaagatcagcctggagttcaacaacaagagagaggagcaccccgagaagtgcagaagcagaaccaagaacctgatgtggtacggcgtgctgggcaccagagagctgctgcagagaagctacaagaacctggagcagagagtgcagctggagtgcgacggccagtacatccccctgcccagcctgcagggcatcgccgtgctgaacatccccagctacgccggcggcaccaacttctggggcggcaccaaggaggacgacatcttcgccgcccccagcttcgacgacaagatcctggaggtggtggccatcttcgacagcatgcagatggccgtgagcagagtgatcaagctgcagcaccacagaatcgcccagtgcagaaccgtgaagatcaccatcttcggcgacgagggcgtgcccgtgcaggtggacggcgaggcctgggtgcagccccccggcatcatcaagatcgtgcacaagaacagagcccagatgctgaccagagacagagccttcgagagcaccctgaagagctgggaggacaagcagaagtgcgacagcggcaagcccgtgctgagaacccacctgtacatccaccacgccatcgacctggccaccgaggaggtgagccagatgcagctgtgcagccaggccgccgaggagctgatcaccagaatctgcgacgccgccaccatccactgcctgctggagcaggagctggcccacgccgtgaacgcctgcagccacgccctgaacaaggccaaccccagatgccccgagagcctgaccagagacaccgccaccgagatcgccatcaacgtgaaggccctgtacaacgagaccgagagcctgctggtgggcagagtgcccctgcagctggagagcccccacgaggagagagtgagcaacgccctgcacagcgtggaggtggagctgcagaagctgaccgagatcccctggctgtactacatcctgcaccccaacgaggacgaggagccccccatggactgcaccaagagaaacaacagaagcaccgtgttcagaatcgtgcccaagttcaagaaggagaaggtgcagaagcagaagaccagcagccagcccggcagcggcgacaccgagagcggcagctgcgaggccaacagccccggcaactag

SEQ ID NO: 111766 - DNA, 3004 bp, Artificial Sequence
  derived and/or modified sequence
atcattagattgaattatccctttcagatcatcactccattcagaaggctaatgctgtgtgctgagaacagaaaggagatggaggattggatcagctcactgaagtctgtacagaccagagaaccctacgaggtggcccagtttaatgtggaacatttctcagggatgcacaactggtacgcctgctcccacgcccgacccaccttctgtaacgtgtgcagagagagtctttctggagtcacctcccatggcctgtcctgcgaaggtacacactgcctgcaaagatttataccatccaatatgtccacttggtcaatgtaaagtatctatcatacctccaattgcactaaacagcaccgattccgatggtttctgtagagcaacattttcgttctgtgttagtcctctattggtttttgtcaattctaagagtggagataatcagggagtaaagttcctccgtcgctttaaacagttgctaaatccggctcaggtgtttgatttaatgaatggaggtcctcatttaggtttaagattatttcagaagtttgacaatttccggattcttgtttgtggaggcgatggaagtgtaggttgggttttgtcagaaatcgataagctcaacttgaataaacagtgtcagctgggagtgttgcctttgggtacaggaaatgaccttgcccgagttcttggctggggaggttcatatgacgatgacacccaacttcctcagatcctagagaaactggaacgagccagtaccaaaatgttggacaggtggagtataatgacatatgaactcaaattgccaccaaaagcttccctacttccaggacctccagaagcatctgaagaattttatatgacgatttatgaagactcagttgcaacgcatcttacaaaaatcctcaattctgatgaacatgcagtggtcatatcttctgccaagacgctatgtgaaactgtaaaggacttcgttgccaaagtagaaaagacgtatgacaaaaccttggaaaatgccgttgtagctgatgccgtggccagtaaatgttcagtcctaaacgagaagctcgaacaactgctgcaggctttgcacacagattcccaggctgcgcctgttctccctggcctcagccctctcattgtggaagaagatgctgtggaatcgtccagtgaagagtccctgggtgaaagcaaagagcagcttggggatgacgttacaaaaccttcctcccagaaagccgtcaaaccaagggaaatcatgttgcgggcaaatagtttaaagaaagcagtgaggcaagtcattgaggaagccggaaaagttatggatgacccgacagttcacccctgtgaaccagctaatcagtcctctgattatgacagcacagaaacagatgaatctaaggaggaagctaaagatgatggtgccaaagaatcaataactgttaaaactgcacctcggtctccagatgcccgggcaagttatggccattcccaaactgattctgtccctggtccagctgtggcagccagcaaagaaaacctccctgtgctcaataccagaataatctgcccaggtttaagagcaggactggctgcctcaattgctgggagttcgattatcaacaaaatgttactggcaaacattgatccttttggtgccacgccgtttattgacccggatctagattccgtagatggatattcagaaaaatgtgtcatgaacaattactttgggattggattagatgcaaaaatttcattagaatttaataataaaagagaggagcaccctgaaaaatgcaggagccgaactaaaaacttgatgtggtatggagtccttggaacccgggagttattacagagatcgtacaagaatttagaacaaagggttcaacttgagtgtgatgggcagtatattcctcttcccagcttgcaaggcatagccgtgttgaacattcccagctatgctggaggcactaacttttggggtggaactaaagaggatgatatatttgctgcaccatcctttgatgacaagatcctggaagttgtagcaatatttgatagcatgcaaatggcagtttcaagggtcattaaactgcagcatcatcgaatagcccagtgccgtacagtgaaaatcactatatttggtgacgaaggagtcccagtgcaagtggatggtgaagcgtgggttcagcctccagggattatcaaaattgtgcacaaaaacagagcacaaatgctaacaagggacagagcctttgagagcactctgaaatcttgggaagataagcagaagtgtgattctggtaaaccagttctccgaacccatttgtacatccatcacgccattgacttggcaacagaagaggtgtcgcagatgcagctatgctcccaggctgcagaggagctcattactaggatatgtgacgcagccacaattcactgtcttttggagcaagaactggcccatgctgtgaatgcctgctcccatgccctgaataaagccaacccaaggtgcccggagagtcttacaagagacactgccactgaaatagccatcaatgtgaaggcgctgtataatgaaacagaatctttgctagttggcagggttcctttgcagctggaatcgccacatgaagagcgagtatccaatgccttacactctgtggaggtggaattacagaaactgacagagattccttggctttattatatcttacacccaaatgaggatgaggaacctcctatggattgcaccaaaaggaacaacagaagcaccgtatttcgaatagtgccaaagtttaaaaaggaaaaggttcagaagcagaagacaagttcacagcctggatctggggataccgaaagtgggtcatgtgaagcgaattctccagggaattaaagagcttggaaggagcactccacagtcggaggtgtaatcatattggtgctatttcttggaagagaagttattgccacttaatacaaagtccttggaagc

SEQ ID NO: 111767 - DNA, 2760 bp, Artificial Sequence
  derived and/or modified sequence
atgtggaacatttcgcaaggttgtacaaccggcacccccgcgccaacccctgaccctcctagcgtgacttgcgctgagcgagtcttcctggaatccccccccatggcctgtccagccaaagtacacaccgcctgcaaggacctgtaccatcctatttgcccgttggggcagtgtaaggtgtctataattcctcctattgctctcaatagcacagattcagacggcttctgcagggcaaccttttcattctgtgtcagcccactgctggtgttcgtaaacagcaagagcggagacaatcaaggcgtcaaattcctgcgaaggtttaagcaactcctaaatccagctcaggttttcgacttgatgaacggtgggcctcatctgggactacgcctctttcaaaagttcgacaacttccgcattctagtgtgtggaggcgacggcagtgttggatgggtgttgtccgagattgacaagctaaaccttaacaagcagtgtcagctgggggtgctacccctcggcacaggcaatgacctggcgagggtcttggggtggggggggagttacgacgatgacacccagctcccgcagatcctggagaaattggagagggcttccacaaagatgttggacagatggtcaattatgacctacgagctcaaacttccccccaaagcctcgctcttgccaggaccacctgaggcctctgaggagttctacatgacaatctacgaagacagcgtggcgactcacctgactaagattctcaattcggacgaacacgctgttgtgatctccagcgccaagaccctgtgcgaaaccgtgaaagattttgtggccaaagtcgaaaagacgtacgataagaccctggagaatgcagtcgtggctgacgccgtagcctccaagtgtagcgtcctcaacgagaagttggagcagctgttgcaggcattgcataccgattcccaagctgcaccagttctgccaggactgtctccgcttatagtggaagaagacgccgttgaaagttcttctgaggagagcctgggtgaaagcaaggagcagttgggagacgatgttactaaaccctctagccagaaagctgtgaaacctagggaaataatgctgagggcaaattcactaaaaaaagccgtccgacaagtaatcgaggaggcgggcaaggtaatggacgatccgactgtccatccatgtgaacccgccaatcagagctcggactacgattccacggaaactgacgaaagtaaagaagaagccaaggatgacggggcaaaggagagcattaccgttaagacggcacctcgttcccccgatgctagggcatcttatgggcattcacagacagactccgtaccgggtccagccgtggcagcctcaaaggagaatctaccagtgctcaataccaggatcatttgtccaggcttaagagccggcttagctgcttcgatagccggcagctcaattatcaacaaaatgctcctggccaatatagatcccttcggagctactccttttatcgatcccgacctcgacagtgtggatggttatagcgaaaaatgtgtgatgaacaactacttcggtattggactggatgccaaaatctccctggagtttaacaacaaacgagaagagcacccggagaaatgcagaagccgtactaaaaatctgatgtggtacggggtgctgggaacccgggaactgttacagaggagctacaagaatctggaacagcgcgtgcagctagagtgtgacggccagtatattcctcttccctccctgcaagggatagcggttttaaacatcccgtcttatgccggcggtacaaacttttggggggggacaaaagaagatgacatattcgctgccccatcctttgacgacaaaatcctggaggtggtcgcaattttcgacagtatgcagatggcggtgagtcgcgtcatcaagcttcagcatcacagaatcgcacagtgtagaaccgtcaaaatcaccatctttggtgatgagggcgtgccagtacaggtggatggcgaagcttgggttcagccaccgggaataattaagatcgttcataagaaccgtgcccagatgttaactcgggacagagccttcgaaagcaccttgaaatcttgggaggacaagcagaagtgcgattctgggaagcccgtgctaagaacacacctttatattcaccacgccatcgatcttgccacggaggaggtcagccagatgcagctgtgcagccaagcagccgaggaattgattacacgtatttgtgacgccgcaacgatacactgtctgcttgaacaggaactggcacatgccgtgaacgcctgtagccatgcgctgaacaaagccaatcccagatgccccgaatcactgacgcgggacaccgctacggaaattgccatcaacgtaaaagccctgtataacgagaccgaaagcctgctagtaggccgtgttccgctacagctcgaaagcccacatgaggaaagagtatccaatgccctgcattcagtggaggttgagctgcagaaactgacagagatcccatggctctattatatactgcaccccaatgaggacgaagaacccccgatggactgtaccaagaggaacaatcggagcactgtctttcggatcgtccccaagtttaagaaagagaaggtgcagaaacagaaaactagtagccaacctggatcaggggacaccgagtctggaagttgtgaggcaaactccccagggaattag

SEQ ID NO: 111768 - DNA, 2760 bp, Artificial Sequence
  derived and/or modified sequence
atgtggaacatcagccagggctgcaccaccggcaccccagcccccaccccagaccccccatctgtgacctgtgccgagagggtcttcctggagagcccccccatggcctgcccagccaaggtgcacacagcctgcaaggacctgtaccaccccatctgccccctgggccagtgcaaggtgtccatcatcccccccatcgccctgaacagcacagacagtgatggcttctgccgggccaccttctccttctgtgtgagccccctgctggtgtttgtgaacagcaagagcggggacaaccagggcgtgaagttcctgcggcgcttcaagcagctgctgaacccagcccaggtgtttgacctgatgaatggaggcccccacctgggcctgcggctcttccagaagtttgacaacttccgcatcctggtgtgtggaggagatggctctgtgggctgggtgctgtctgaaattgacaagctgaacctgaacaagcagtgccagctgggcgtgctgcccctgggcactggaaatgacctggcccgggtgctgggctggggcggcagctatgatgatgacacccagctgccccagatcctggagaagctggagcgggccagcaccaagatgctggaccgctggagcatcatgacctatgagctgaagctgccccccaaggccagcctgctgcccggccccccagaggccagcgaggagttctacatgaccatctatgaggacagcgtggccacccacctgaccaagatcctgaacagtgatgagcacgctgtggtgatcagcagcgccaagaccctgtgtgaaacagtgaaggactttgtggccaaggtggagaagacctatgacaagaccctggagaatgctgtggtggctgatgctgtggccagcaaatgttctgtgctgaatgagaagctggagcagctgctgcaggccctgcacacagacagccaggccgcccctgtgctgcccggcctgagccccctgattgtggaggaggatgctgtggagagcagcagcgaggagagcctgggggagagcaaggagcagctgggagatgatgtgaccaagcccagcagccagaaggctgtgaagccccgggagatcatgctgcgggccaacagcctgaagaaggctgtgcggcaggtgattgaggaggccggcaaggtgatggatgaccccaccgtgcacccctgtgagcccgccaaccagagcagtgactatgacagcacagaaacagatgagagcaaggaggaggccaaggatgatggagccaaggagagcatcaccgtgaagacagcccccaggagcccagatgcccgggccagctatggccacagccagacagacagcgtgcccggccctgctgtggccgccagcaaagaaaacctgcctgtgctgaacacccgcatcatctgccccggcctgcgggccggcctggccgccagcattgctggcagcagcatcatcaacaagatgctgctggccaacatcgacccctttggagccacccccttcatcgaccctgacctggacagcgtggatggctacagcgagaagtgtgtgatgaacaactacttcggcatcggcctggatgccaagatcagcctggagttcaacaacaagcgggaggagcaccctgagaagtgccgcagcaggaccaagaacctgatgtggtatggagtgctgggcacccgggagctgctgcagaggagctacaagaacctggagcagagggtgcagctggagtgtgatggccagtacatccccctgcccagcctgcagggcattgctgtgctgaacatccccagctatgccggcggcaccaacttctggggcggcaccaaggaggatgacatctttgctgcccccagctttgatgacaagatcctggaggtggtggccatctttgacagcatgcagatggctgtgtccagggtcatcaagctgcagcaccaccgcatcgcccagtgcaggacagtgaagatcaccatctttggagatgaaggagtgcctgtgcaggtggatggagaggcctgggtgcagcccccaggcatcatcaagatcgtgcacaagaacagagcccagatgctgacccgggaccgggcctttgagagcaccctgaagtcctgggaggacaagcagaagtgtgacagcggcaagcctgtgctgcggacccacctgtacatccaccacgccatcgacctggccacagaggaggtgtcccagatgcagctgtgcagccaggccgctgaggagctgatcacccgcatctgtgatgctgccaccatccactgcctgctggagcaggagctggcccatgctgtgaatgcctgcagccacgccctgaacaaggccaacccccgctgcccagagagcctgacccgggacacagccacagaaattgccatcaacgtgaaggccctgtacaatgaaacagagagcctgctggtgggccgggtgcccctgcagctggagagcccccatgaggagcgggtgtccaatgccctgcacagcgtggaggtggagctgcagaagctgacagagatcccctggctgtactacatcctgcaccccaatgaagatgaggagccccccatggactgcaccaagaggaacaacagaagcaccgtcttccgcatcgtgcccaagttcaagaaggagaaggtgcagaagcagaagaccagcagccagcccggcagcggggacacagaaagtggcagctgtgaggccaacagccctggcaactag

SEQ ID NO: 111769 - DNA, 2760 bp, Artificial Sequence
  derived and/or modified sequence
atgtggaacatcagccagggctgcaccaccggcacccccgcccccaccccagacccccctagtgtgacttgcgccgagcgagttttcctcgaaagccctcccatggcttgccccgccaaggtgcacactgcttgcaaagatctttaccatccaatctgcccactggggcagtgtaaggtcagtatcatccctcccatcgcactcaactctacggattctgacggcttctgtagagccacgttcagtttctgtgtgtctcctctcctagttttcgtaaactctaagagcggcgacaaccagggcgtaaagtttcttcgtcggttcaaacagttgctgaaccccgctcaggtcttcgatctgatgaacggaggccctcacctgggcctacggcttttccagaagttcgacaattttcgcattctggtgtgcgggggggatggctccgtagggtgggtactctccgaaatcgataaattaaaccttaacaagcagtgccagcttggggttctgcccctcggtactggcaacgacctcgcgcgagtgctgggatggggcggatcttatgatgatgacacacaattgccacagatcttggaaaagcttgagagggccagcaccaaaatgctggatcgctggagcatcatgacctatgagctgaaactgcccccaaaagcatccctgcttccaggccctcctgaagcgtctgaggaattctatatgactatatacgaggacagtgtcgctacacacctgaccaaaattctgaattccgacgaacacgctgtggtcatttcatctgctaaaacattatgtgaaacagtcaaagattttgtggcaaaagtagagaagacctacgacaagaccctcgagaatgcggtggtggcggatgcagttgcttcgaagtgttctgtgctcaatgaaaaactggagcagttgcttcaagcattgcatacagattcccaggccgcccccgtgctccctggtctttcacctttaatcgtggaggaggacgccgtggagtcaagttctgaggaatcacttggcgaatcaaaagagcagcttggggatgatgtgacaaaaccatcaagtcagaaagcagtcaagccaagagaaataatgctcagggccaatagcctgaagaaggctgtgaggcaggtaatcgaggaggctggtaaagtgatggacgaccccactgtgcatccttgtgagccagcgaatcagagtagtgactacgatagtaccgagactgacgagtctaaagaggaagccaaagacgatggtgccaaagagtccatcactgttaaaactgccccgcggtctccggatgcacgtgcctcctatgggcattctcagactgactctgtgcctgggcctgctgtggccgcatctaaggagaacctgcccgtcctaaatacacgaattatctgtcccggactaagggccggtctggcagctagcatcgccggtagttctattattaacaaaatgcttctcgcaaatatcgacccgtttggcgccaccccatttattgaccccgacctggacagtgtggatggatattctgaaaagtgtgtcatgaataattattttggcataggcctggacgcgaagatttcactagagttcaacaacaaaagggaagaacatccggagaaatgccgaagtaggacaaagaatctgatgtggtacggcgtcctaggtaccagagagcttctccagcgcagctataaaaatctagagcagcgtgtgcaattggaatgtgatggacagtacattccactgccgagtttacagggcatcgcagtcctcaacatcccctcgtacgctggtggtacaaatttttggggtggaacaaaggaggacgatatctttgcggccccttcattcgacgataagatccttgaagtggtggctatcttcgattcgatgcagatggctgtttccagagtgataaagctgcagcaccatcgcatcgcccagtgcaggaccgtgaagataacaattttcggtgatgagggagtgcctgttcaggttgacggcgaggcctgggtccagccacctgggatcattaagattgttcataaaaatcgagcacagatgctgacccgcgatcgcgcattcgagagtactctgaagagctgggaggacaagcagaagtgtgacagcgggaaaccagtcctacgcacccacttatacattcatcatgcaatcgaccttgctacagaggaggtgtcccagatgcaattgtgttctcaagcggcggaagagctgatcacacggatatgtgacgctgctaccatacactgccttcttgagcaggagctggcacacgcggttaacgcatgttcacacgcacttaacaaagccaacccgcgatgcccggagagtctcacccgcgatacagccaccgaaatagccattaacgtgaaggccctttacaatgaaacggagtccctgctcgtaggtcgggtgcccctgcagctggaatctcctcacgaggagagagttagtaacgctctgcactcagtagaggtggagctacagaagctgacagaaattccttggctgtattacatactgcatcccaatgaggatgaggaaccgcctatggactgcaccaagcgaaacaaccgatccaccgtcttccgcatagtgcccaaattcaaaaaagaaaaggtgcagaaacagaaaacttcttcacaacccggatctggcgacactgagtcaggcagttgcgaggctaatagtcctggcaactag

SEQ ID NO: 111770 - DNA, 2760 bp, Artificial Sequence
  derived and/or modified sequence
atgtggaacatctcacagggctgtaccacgggaacccctgcgccaacgcccgacccaccaagcgttacctgcgcagaacgggtgttcctcgaatcaccacctatggcctgcccagccaaggtccacactgcctgcaaggatctgtatcatcccatctgcccgctgggtcagtgtaaagtgtcaatcattcccccaatcgccttgaactctaccgatagcgatggcttctgccgtgctacattcagtttctgcgtgtccccattattagtgttcgtgaatagcaagagcggcgataaccagggggtaaagttcctgagacgattcaagcaactgctgaatcctgcacaggtcttcgacctgatgaacggaggtccacatcttggcctcagactgttccagaaatttgacaacttccgtatcctggtgtgcggcggagatgggtctgtcggatgggtgctgtccgagatcgataaactgaatctgaacaagcagtgtcaactgggcgtcctgcctctaggaacaggcaacgatctggctagagttctggggtggggcggatcatacgatgacgatacccagttgccacagatcctggagaaactagagagggcaagcaccaaaatgctggatcgttggagcataatgacttacgaattaaaactgcccccaaaagcgtcactactgcccggacctcccgaggctagtgaagaattctatatgaccatttacgaagactcggtggcaactcacctgacgaaaattttgaactctgatgagcatgctgtcgtgatcagctcagcaaaaaccttgtgcgagactgtgaaggatttcgtggctaaggtggaaaaaacgtacgacaagaccctcgaaaatgcagttgtcgcagacgccgtagccagcaaatgcagcgtgctcaacgaaaagcttgagcagctactccaagcactgcacaccgactctcaagccgcaccggttctgcccggtctctctccattgattgtcgaggaagacgccgtagaaagcagctctgaggagagtctcggcgagtcaaaagagcagctaggagatgatgtgacaaaacctagtagtcagaaggcagttaagccacgggagattatgctgcgggctaactccttaaagaaggccgtgcgacaagtgatcgaagaagcagggaaggtaatggatgatcccacagtccacccatgtgagcctgccaaccagagcagcgattacgattcgaccgagaccgatgaatcgaaagaagaggctaaagacgacggggcaaaggagtccatcacagtaaaaacagcgccacgcagccctgatgctcgcgcatcatatgggcattcacagactgactcggttccgggaccggctgttgccgcttccaaggaaaacttacctgtactcaacacacggatcatctgtccaggacttagggccggacttgctgcatccattgccggatcatccatcatcaacaagatgctgctcgccaacatcgatcctttcggcgcaacgcctttcatcgatcccgacctcgatagcgtcgacgggtacagcgagaagtgtgtaatgaacaactacttcggcatcggactggatgcaaaaatcagcctggagttcaacaacaagagggaggaacaccccgaaaagtgcagatcaagaacgaaaaacctcatgtggtacggtgttcttggtacccgggaactgctgcagcgaagttataagaaccttgagcagagagtgcaattggagtgcgatgggcaatacatccccctgccgtccctgcagggtatagccgtcctcaacattcccagctacgccggaggaaccaacttctggggcggaacgaaggaggacgatatttttgccgcacccagttttgatgacaagattctggaggtagtagcaatcttcgactcaatgcagatggcagtctcaagagtgatcaaactgcaacaccataggattgcccagtgtcggactgttaaaatcaccatatttggagatgaaggtgtccctgtgcaggtggacggggaagcttgggtgcagccacctggaattataaaaatcgtccacaaaaatagggcacagatgctgactcgagatagagctttcgaatccaccctgaaatcctgggaagataaacaaaagtgcgactcaggcaagcccgtgctgcgcacacacctctatattcatcatgctatcgacctcgccaccgaagaagtcagtcagatgcaactgtgcagccaggctgctgaggaactgattacaagaatatgtgatgccgctactatccactgcttacttgagcaagagctggctcacgcagtaaatgcttgttctcacgccctgaataaggccaaccctcgctgccccgaatcactgacgagggataccgccaccgagatcgcaataaacgtaaaagcgctctacaatgaaaccgagagtctcctggtgggaagggtgccactccagcttgaaagcccacacgaagagcgagtgtccaatgctctgcactccgtcgaagtggagctgcagaagctgactgagattccgtggctctattacattttacaccctaacgaggacgaggaaccacctatggactgcactaagcgcaacaatcgctctaccgtgttcagaatcgtgccaaagtttaagaaagagaaggttcaaaagcagaaaactagctcccagcctggctcaggagatacggaaagcgggtcttgtgaggctaattctcctgggaactag

SEQ ID NO: 111771 - protein, 317 aa, Artificial Sequence
  derived and/or modified sequence
MTLKVQEYPTLKVPYETLNKRFRAAQKNIDRETSHVTMVVAELEKTLSGCPAVDSVVSLLDGVVEKLSVLKRKDLVNIEMFLTAKEVEESLERRETATCLAWCHDNKSRLRKMKSCLEFSLRIQEFIELIRQNKRLDAVRHARKHFSQAEGSQLDEVRQAMGMLAFPPDTHISPYKDLLDPARWRMLIQQFRYDNYRLHQLGNNSVFTLTLQAGLSAIKTPQCYKEDGSSKSPDCPVCSRSLNKLAQPLPMAHCANSRLVCKISGDVMNENNPPMMLPNGYVYGYNSLLSIRQDDKVVCPRTKEVFHFSQAEKVYIM

SEQ ID NO: 111772 - DNA, 954 bp, Artificial Sequence
  derived and/or modified sequence
atgaccctgaaagtgcaggagtaccctactctgaaggtgccttatgaaaccctgaacaagcggtttcgcgccgcccaaaagaatattgatcgagagacgtcccatgtcaccatggttgtcgccgaacttgagaaaactctgtctgggtgtcccgccgtggactccgtggtgagtttgttagatggcgtggtggagaagttgtcggtattgaagcgcaaggaccttgtgaacatcgaaatgtttctgaccgctaaggaggtcgaagaatccctggagcggcgcgaaactgccacctgtctggcctggtgccacgacaacaagtcccgcctacgcaaaatgaagtcttgtctggagtttagcctaaggatccaggagttcatcgaactgatccgtcagaataagcggctggatgcggtgcggcatgccaggaagcattttagtcaagccgagggaagccagttagatgaagtacgtcaggccatgggtatgttggcatttcctcctgacacccatatctcaccatacaaggacctgctagaccccgcccgttggaggatgctaatccagcaatttagatatgacaactataggctgcaccagctgggaaataacagtgtgttcactctcacattacaggccggattgtcagccatcaagacaccacagtgttacaaggaggatggctcgagcaagagtcctgattgtccagtttgcagccggagcttgaataagctggcgcagccccttccgatggcccactgtgccaattcccggcttgtttgcaagatttcgggcgacgtgatgaacgaaaacaatccgcccatgatgcttccaaacgggtacgtatacggatataatagtctcctgtcaattaggcaggacgataaagtcgtgtgccctaggaccaaagaggtcttccatttttctcaagctgagaaagtctacatcatgtag

SEQ ID NO: 111773 - DNA, 954 bp, Artificial Sequence
  derived and/or modified sequence
atgaccctgaaggtgcaggagtaccccaccctgaaggtgccctatgagaccctgaacaagcgcttccgggccgcccagaagaacatcgaccgggagaccagccacgtgaccatggtggtggccgagctggagaagaccctgagcggctgcccagctgtggacagcgtggtgtccctgctggatggagtggtggagaagctgtctgtgctgaagaggaaggacctggtgaacatcgagatgttcctgacagccaaggaggtggaggagagcctggagcggcgggagacagccacctgcctggcctggtgccacgacaacaagagccggctgaggaagatgaagagctgcctggagttcagcctgcgcatccaggagttcatcgagctgatccggcagaacaagaggctggatgctgtgagacatgccaggaagcacttcagccaggccgagggcagccagctggatgaggtgcggcaggccatgggcatgctggccttccccccagacacccacatcagcccctacaaggacctgctggaccctgcccgctggaggatgctgatccagcagttccgctatgacaactaccgcctgcaccagctgggcaacaacagcgtcttcaccctgaccctgcaggccggcctgagcgccatcaagaccccccagtgctacaaggaggatggcagcagcaagagcccagactgccctgtgtgcagccgcagcctgaacaagctggcccagcccctgcccatggcccactgtgccaacagccggctggtgtgcaagatctctggagatgtgatgaatgaaaacaacccccccatgatgctgcccaacggctacgtgtatggctacaacagcctgctgagcatccggcaggatgacaaggtggtgtgccccaggaccaaggaggtgttccacttcagccaggccgagaaggtgtacatcatgtag

SEQ ID NO: 111774 - DNA, 1202 bp, Artificial Sequence
  derived and/or modified sequence
aatgttttggccgcttcaagatggcggtgcaggagtcggcggctcagttgtccatgaccctgaaggtccaggagtacccgaccctcaaggtgccctacgagacgctgaacaaacgctttcgcgccgctcagaagaacattgaccgggagaccagccacgtcaccatggtggtggccgagctggagaagacgttgagcggctgccccgccgtggactccgtggtcagcctgctggacggcgtggtggagaagctcagcgtcctcaagaggaaggacctagtgaatattgagatgttcctgacggccaaagaggtggaggagtccctggagaggcgtgagacggccacctgcctggcctggtgccatgacaacaagtcccggctccggaagatgaagagctgcctggagttcagcctcagaatccaggagttcattgaactcatccggcagaataagagactggacgctgtgagacatgcaagaaagcacttcagccaagcagaagggagccagctggacgaggtgcgccaggccatgggcatgctggccttcccgcccgacacgcacatctccccgtacaaggaccttctggaccctgcacggtggcggatgctgatccagcagttccggtacgacaactaccgactacaccagctgggaaacaattctgtgttcaccctcaccctgcaggctggcctctcagccatcaagacaccacagtgctacaaggaggacggcagctccaagagccctgactgccctgtgtgcagccgctccctgaacaagctggcgcagcccctgcccatggcccactgtgccaactcccgcctggtctgcaagatttctggcgacgtgatgaacgagaacaatccgcccatgatgctgcccaacggctacgtctacggctacaattctctgctttctatccgtcaagatgataaagtcgtgtgcccgagaaccaaagaagtcttccacttctcacaagccgagaaggtgtacatcatgtaggccccacgtcgtgaagcgcacgcctcggggacgggctgcagtgggcggggaggccacgccttcctcctgtcccacgctccagcctgccgcggcgtttctgtttcttgcgaccaaagatccgtgagcaacgataaatactcttaggaagagagaaaataaggtttcataagtttgtacttgaaaacatttggattg

SEQ ID NO: 111775 - DNA, 954 bp, Artificial Sequence
  derived and/or modified sequence
atgaccctgaaggtgcaggagtaccccaccctgaaggtgccctacgagaccctgaataagcgctttcgggctgcacagaaaaatattgacagggagacctctcatgtcacaatggttgtcgccgagctggagaaaacattgtctggttgcccagcagtggattccgtagtgagcttattagacggggtagtggaaaaactgtctgttctgaagaggaaagacctagttaatatagagatgttccttacggcgaaagaggtggaggagtcattggaacgaagagaaacagccacttgcctagcttggtgccatgacaataagagcaggctgcgaaaaatgaaaagctgcctggagttctcgctgaggatccaggaatttatcgagttgattcgccagaataaaaggctggacgcagtccgtcacgcacgcaagcacttttcccaagccgagggatcccagttggatgaggtgcgccaggctatggggatgctcgccttccctccagacacccatatctcgccatacaaagacttactcgaccccgccagatggcgcatgctcatccagcagtttaggtatgataactaccgcctccaccagcttggtaacaattctgtctttactttgaccctgcaggctggcctgagtgcaatcaagaccccacagtgctacaaagaagatgggagctccaaatctcctgactgtcccgtgtgctccagatcccttaacaaactggctcaaccactccccatggcccactgtgccaatagccgcctggtgtgcaagatctccggagacgtgatgaacgaaaacaatcccccgatgatgctgccaaacggatatgtgtatggctataactccctactgagcattagacaggacgacaaggttgtctgccctcggactaaggaagtgttccacttctcacaggctgaaaaagtttacattatgtag

SEQ ID NO: 111776 - DNA, 954 bp, Artificial Sequence
  derived and/or modified sequence
atgacattaaaggttcaggaatatccaaccctcaaggtgccatacgagacgcttaataagcggttccgagctgctcagaagaacatcgaccgcgaaacttcccacgtcaccatggtcgtggccgaactagaaaaaaccctttccggatgcccggctgtcgacagcgtggtctctctgttagacggagtcgtggagaagctctccgttctgaagagaaaggacttagtgaatatagagatgttccttacagccaaagaggttgaagagtccctagagcggagagaaaccgcaacttgccttgcctggtgccacgacaataagtcaagattacgtaagatgaagtcttgcctcgagttcagcctgaggatccaggaatttattgagctcattcgccagaataagcgacttgacgcagttcggcacgcccgtaagcactttagccaggctgagggttcccaactggacgaagtgcgacaggcgatgggcatgcttgccttccctcctgacacacacatctctccctataaggacttactcgaccccgctaggtggagaatgctgatccaacagtttaggtacgataactataggctgcaccagttaggtaacaactccgtttttaccctcactctgcaggccggtctgtctgccattaaaacgcctcagtgctacaaagaggacggctcctcaaaatcacccgattgtcccgtttgttccaggtccttaaataaactggcgcagccgctgcctatggcgcattgcgcaaatagtagactcgtctgcaagataagcggggatgtaatgaacgaaaacaacccacctatgatgttgccaaacggctatgtgtacgggtataactctctgctgagcattaggcaggatgataaggtggtctgccctcgtacaaaagaagtctttcatttctcccaagccgagaaagtttacatcatgtag

SEQ ID NO: 111777 - DNA, 954 bp, Artificial Sequence
  derived and/or modified sequence
atgaccctgaaggtgcaggagtaccccaccctgaaggtgccctacgagaccctgaacaagagattcagagccgcccagaagaacatcgacagagagaccagccacgtgaccatggtggtggccgagctggagaagaccctgagcggctgccccgccgtggacagcgtggtgagcctgctggacggcgtggtggagaagctgagcgtgctgaagagaaaggacctggtgaacatcgagatgttcctgaccgccaaggaggtggaggagagcctggagagaagagagaccgccacctgcctggcctggtgccacgacaacaagagcagactgagaaagatgaagagctgcctggagttcagcctgagaatccaggagttcatcgagctgatcagacagaacaagagactggacgccgtgagacacgccagaaagcacttcagccaggccgagggcagccagctggacgaggtgagacaggccatgggcatgctggccttcccccccgacacccacatcagcccctacaaggacctgctggaccccgccagatggagaatgctgatccagcagttcagatacgacaactacagactgcaccagctgggcaacaacagcgtgttcaccctgaccctgcaggccggcctgagcgccatcaagaccccccagtgctacaaggaggacggcagcagcaagagccccgactgccccgtgtgcagcagaagcctgaacaagctggcccagcccctgcccatggcccactgcgccaacagcagactggtgtgcaagatcagcggcgacgtgatgaacgagaacaacccccccatgatgctgcccaacggctacgtgtacggctacaacagcctgctgagcatcagacaggacgacaaggtggtgtgccccagaaccaaggaggtgttccacttcagccaggccgagaaggtgtacatcatgtag

SEQ ID NO: 111778 - protein, 328 aa, Artificial Sequence
  derived and/or modified sequence
MAVQESAAQLSMTLKVQEYPTLKVPYETLNKRFRAAQKNIDRETSHVTMVVAELEKTLSGCPAVDSVVSLLDGVVEKLSVLKRKAVESIQAEDESAKLCKRRIEHLKEHSSDQPAAASVWKRKRMDRMMVEHLLRCGYYNTAVKLARQSGIETCKKALQPSRREPAGRGAPGHGHAGLPARHAHLPVQGPSGPCTVADADPAVPVRQLPTTPAGKQFCVHPHPAGWPLSHQEQCYKEDGSSKSPDCPVCSRSLNKLAQPLPMAHCANSRLVCKISGDVMNENNPPMMLPNGYVYGYNSLLSIRQDDKVVCPRTKEVFHFSQAEKVYIM

SEQ ID NO: 111779 - protein, 328 aa, Artificial Sequence
  derived and/or modified sequence
MAVQESAAQLSMTLKVQEYPTLKVPYETLNKRFRAAQKNIDRETSHVTMVVAELEKTLSGCPAVDSVVSLLDGVVEKLSVLKRKAVESIQAEDESAKLCKRRIEHLKEHSSDQPAAASVWKRKRMDRMMVEHLLRCGYYNTAVKLARQSGIETCKKALQPSRREPAGRGAPGHGHAGLPARHAHLPVQGPSGPCTVADADPAVPVRQLPTTPAGKQFCVHPHPAGWPLSHQDTCYKEDGSSKSPDCPVCSRSLNKLAQPLPMAHCANSRLVCKISGDVMNENNPPMMLPNGYVYGYNSLLSIRQDDKVVCPRTKEVFHFSQAEKVYIM

SEQ ID NO: 111780 - DNA, 987 bp, Artificial Sequence
  derived and/or modified sequence
atggccgtacaggagtcagccgctcagctgagcatgaccttgaaggtgcaagaatatcctacgctcaaagttccatacgaaaccctcaacaagaggttccgtgccgcccagaagaatattgaccgcgagacgtcccacgtgacaatggtcgtagctgaactagagaaaacactcagcggctgtccggcagttgactcagtagtgagcctgctagacggtgtggtggagaagctctccgtgctgaagcgtaaagccgtagaatctattcaggccgaggatgagtctgctaagctatgcaaaaggcgaatcgaacacctgaaagagcatagctccgaccagcccgctgccgcttctgtctggaaacgtaagagaatggatcgaatgatggttgaacatctcctcagatgtgggtactataacaccgcggtaaagttagccaggcagagcggaattgagacctgtaagaaggctcttcagccatcccgtcgcgagccagcaggccgaggcgctccaggtcatggccacgcggggctccccgctcggcacgctcacctacccgtacagggtcccagcgggccttgcacggtggccgatgctgatcctgccgtgcctgttcggcagctgccgactacacctgctggcaaacaattttgcgtccacccacaccccgccggatggcccctctctcatcaggaacagtgttataaagaggacggttcttccaaatcccctgattgtcctgtttgctctagatctctcaataaattagctcagcctttgcccatggcacattgcgccaacagccgactcgtgtgtaagatttccggagacgtcatgaatgaaaacaaccctcctatgatgctacctaacggctacgtctatggttataacagtttactctccatcagacaagacgacaaagttgtatgtccacgtaccaaagaggtatttcactttagccaagcagaaaaagtatatattatgtag

SEQ ID NO: 111781 - DNA, 987 bp, Artificial Sequence
  derived and/or modified sequence
atggctgtgcaagagtcagccgctcagctgtctatgaccctgaaggtacaagaatacccaactctgaaggtgccttatgaaaccctgaacaaacgctttcgtgcagcacagaaaaatattgaccgggaaacttcacacgtgacaatggttgtggccgagctggagaagactctttccggttgccccgccgtggactctgtcgtcagtctcttggacggagtggttgagaagctttcagtgctgaagcgcaaagcagtagaatccattcaggcggaagatgagagcgccaagctctgtaagcggcgcatagagcatcttaaagaacactcttcggatcagcccgccgctgcttctgtttggaaacgaaaacggatggaccggatgatggtcgaacacctactgaggtgcgggtactataataccgcggtgaagctggctcgtcagagcggcatcgagacctgtaagaaggccctgcagccaagtcgccgcgaaccagccggcagaggcgcaccggggcacgggcacgcaggcctaccagcccgccatgcccacctgcccgttcaggggccttccggaccgtgtacagtggcggatgctgaccctgccgtcccggtcaggcaactcccaaccactccggctgggaaacagttctgcgtgcatccacaccccgcggggtggcctcttagtcaccaagatacctgctacaaagaagacgggtccagtaagagccctgactgtcctgtttgctcaaggagtctgaacaaacttgctcagcctctcccaatggctcattgcgcaaattcccggctagtgtgcaagatctctggcgatgtgatgaacgaaaataacccccccatgatgttacctaacggctacgtgtacgggtacaattccctgctgagcatccgacaggacgacaaagtggtgtgtccgagaactaaggaagtgttccacttctcccaggctgagaaggtctacataatgtag

SEQ ID NO: 111782 - DNA, 987 bp, Artificial Sequence
  derived and/or modified sequence
atggctgtgcaggagagcgctgcccagctgtccatgaccctgaaggtgcaggagtaccccaccctgaaggtgccctatgagaccctgaacaagcgcttccgggccgcccagaagaacatcgaccgggagaccagccacgtgaccatggtggtggccgagctggagaagaccctgagcggctgcccagctgtggacagcgtggtgtccctgctggatggagtggtggagaagctgtctgtgctgaagaggaaggctgtggagagcatccaggccgaggatgaaagtgccaagctgtgcaagagaagaattgagcacctgaaggagcacagcagtgaccagcctgctgctgcctctgtgtggaagaggaagaggatggacaggatgatggtggagcacctgctgcgctgtggctactacaacacagctgtgaagctggcccggcagagcggcatcgagacctgcaagaaggccctgcagcccagccggcgggagcccgccggccgcggggcccctggccacggccacgccggcctgcctgcccggcatgcccacctgcctgtgcagggccccagcggcccctgcaccgtggctgatgctgaccctgctgtgcctgtgcggcagctgcccaccaccccagctgggaagcagttctgtgtgcacccccaccctgctggctggcccctgagccaccaggagcagtgctacaaggaggatggcagcagcaagagcccagactgccctgtgtgcagccgcagcctgaacaagctggcccagcccctgcccatggcccactgtgccaacagccggctggtgtgcaagatctctggagatgtgatgaatgaaaacaacccccccatgatgctgcccaacggctacgtgtatggctacaacagcctgctgagcatccggcaggatgacaaggtggtgtgccccaggaccaaggaggtgttccacttcagccaggccgagaaggtgtacatcatgtag

SEQ ID NO: 111783 - DNA, 987 bp, Artificial Sequence
  derived and/or modified sequence
atggctgtgcaggagagcgctgcccagctgtccatgaccctgaaggtgcaggagtaccccaccctgaaggtgccctatgagaccctgaacaagcgcttccgggccgcccagaagaacatcgaccgggagaccagccacgtgaccatggtggtggccgagctggagaagaccctgagcggctgcccagctgtggacagcgtggtgtccctgctggatggagtggtggagaagctgtctgtgctgaagaggaaggctgtggagagcatccaggccgaggatgaaagtgccaagctgtgcaagagaagaattgagcacctgaaggagcacagcagtgaccagcctgctgctgcctctgtgtggaagaggaagaggatggacaggatgatggtggagcacctgctgcgctgtggctactacaacacagctgtgaagctggcccggcagagcggcatcgagacctgcaagaaggccctgcagcccagccggcgggagcccgccggccgcggggcccctggccacggccacgccggcctgcctgcccggcatgcccacctgcctgtgcagggccccagcggcccctgcaccgtggctgatgctgaccctgctgtgcctgtgcggcagctgcccaccaccccagctgggaagcagttctgtgtgcacccccaccctgctggctggcccctgagccaccaggacacctgctacaaggaggatggcagcagcaagagcccagactgccctgtgtgcagccgcagcctgaacaagctggcccagcccctgcccatggcccactgtgccaacagccggctggtgtgcaagatctctggagatgtgatgaatgaaaacaacccccccatgatgctgcccaacggctacgtgtatggctacaacagcctgctgagcatccggcaggatgacaaggtggtgtgccccaggaccaaggaggtgttccacttcagccaggccgagaaggtgtacatcatgtag

SEQ ID NO: 111784 - DNA, 1944 bp, Artificial Sequence
  derived and/or modified sequence
gctaatgttttggccgcttcaagatggcggtgcaggagtcggcggctcagttgtccatgaccctgaaggtccaggagtacccgaccctcaaggtgccctacgagacgctgaacaaacgctttcgcgccgctcagaagaacattgaccgggagaccagccacgtcaccatggtggtggccgagctggagaagacgttgagcggctgccccgccgtggactccgtggtcagcctgctggacggcgtggtggagaagctcagcgtcctcaagaggaaggcggtggaatccatccaggccgaggacgagagcgccaagctgtgcaagcgccggatcgagcacctcaaagagcatagcagcgaccagcccgcggcggccagcgtgtggaagaggaagcgcatggatcgcatgatggtggagcacctgctgcgttgcggctactacaacacggctgtcaagctggcgcgccagagcggcatcgagacatgcaagaaagcacttcagccaagcagaagggagccagctggacgaggtgcgccaggccatgggcatgctggccttcccgcccgacacgcacatctccccgtacaaggaccttctggaccctgcacggtggcggatgctgatccagcagttccggtacgacaactaccgactacaccagctgggaaacaattctgtgttcaccctcaccctgcaggctggcctctcagccatcaagaacagtgctacaaggaggacggcagctccaagagccctgactgccctgtgtgcagccgctccctgaacaagctggcgcagcccctgcccatggcccactgtgccaactcccgcctggtctgcaagatttctggcgacgtgatgaacgagaacaatccgcccatgatgctgcccaacggctacgtctacggctacaattctctgctttctatccgtcaagatgataaagtcgtgtgcccgagaaccaaagaagtcttccacttctcacaagccgagaaggtgtacatcatgtaggccccacgtcgtgaagcgcacgcctcggggacgggctgcagtgggcggggaggccacgccttcctcctgtcccacgctccagcctgccgcggcgtttctgtttcttgcgaccaaagatccgtgagcaacgataaatactcttaggaagagagaaaataaggtttcataagtttgtacttgaaaacatttggattggtaggattttgtaacacgtcaaccatttgatgcttctgaaaagtactttcaacttgcgaaggaaactcttctttaaagactgacctaaacaccgagggaaacttaagaacgtttaaaatataggagtccgtgatttccctgtgttttcagtttctttccttctgtgaacgatgagacttggagaacgggctggtccttcaccacttcctgttggccctggcctggccggggaaggtggcagcggcaccggactgacctgcagtgacccgcgatgccgcgccacgagggacacttatggcttcattcgagagctgctgccaaaacgcctggcgccgccaccgtcgggggctggcttcgaggacgcccgcctgcctcgcgggtcgtgtccgcgggactgtgttcgtacgtgcatagtttcgatatcacatcgcggggctgtgttcgtagctgcgtcgtttcgatatcacaccctctgtgtgccgccttacttcctgcttcgagaatgtataacgtggaaatccacgggaccaaatttctgcagaggccttgccggatggttccataactgtagagtctaattgctatccattacagaaattaatcgttcagttgaaagaagtactgatgacttttcaaaacaaatgaaccaccgtagctgacagagaaccgtatcgtagaggtttgtagttagtgcttatttttgcatgttgatgttgactagctaataaactgtaaatgt

SEQ ID NO: 111785 - DNA, 1945 bp, Artificial Sequence
  derived and/or modified sequence
atgttttggccgcttcaagatggcggtgcaggagtcggcggctcagttgtccatgaccctgaaggtccaggagtacccgaccctcaaggtgccctacgagacgctgaacaaacgctttcgcgccgctcagaagaacattgaccgggagaccagccacgtcaccatggtggtggccgagctggagaagacgttgagcggctgccccgccgtggactccgtggtcagcctgctggacggcgtggtggagaagctcagcgtcctcaagaggaaggcggtggaatccatccaggccgaggacgagagcgccaagctgtgcaagcgccggatcgagcacctcaaagagcatagcagcgaccagcccgcggcggccagcgtgtggaagaggaagcgcatggatcgcatgatggtggagcacctgctgcgttgcggctactacaacacggctgtcaagctggcgcgccagagcggcatcgagacatgcaagaaagcacttcagccaagcagaagggagccagctggacgaggtgcgccaggccatgggcatgctggccttcccgcccgacacgcacatctccccgtacaaggaccttctggaccctgcacggtggcggatgctgatccagcagttccggtacgacaactaccgactacaccagctgggaaacaattctgtgttcaccctcaccctgcaggctggcctctcagccatcaagacacctgctacaaggaggacggcagctccaagagccctgactgccctgtgtgcagccgctccctgaacaagctggcgcagcccctgcccatggcccactgtgccaactcccgcctggtctgcaagatttctggcgacgtgatgaacgagaacaatccgcccatgatgctgcccaacggctacgtctacggctacaattctctgctttctatccgtcaagatgataaagtcgtgtgcccgagaaccaaagaagtcttccacttctcacaagccgagaaggtgtacatcatgtaggccccacgtcgtgaagcgcacgcctcggggacgggctgcagtgggcggggaggccacgccttcctcctgtcccacgctccagcctgccgcggcgtttctgtttcttgcgaccaaagatccgtgagcaacgataaatactcttaggaagagagaaaataaggtttcataagtttgtacttgaaaacatttggattggtaggattttgtaacacgtcaaccatttgatgcttctgaaaagtactttcaacttgcgaaggaaactcttctttaaagactgacctaaacaccgagggaaacttaagaacgtttaaaatataggagtccgtgatttccctgtgttttcagtttctttccttctgtgaacgatgagacttggagaacgggctggtccttcaccacttcctgttggccctggcctggccggggaaggtggcagcggcaccggactgacctgcagtgacccgcgatgccgcgccacgagggacacttatggcttcattcgagagctgctgccaaaacgcctggcgccgccaccgtcgggggctggcttcgaggacgcccgcctgcctcgcgggtcgtgtccgcgggactgtgttcgtacgtgcatagtttcgatatcacatcgcggggctgtgttcgtagctgcgtcgtttcgatatcacaccctctgtgtgccgccttacttcctgcttcgagaatgtataacgtggaaatccacgggaccaaatttctgcagaggccttgccggatggttccataactgtagagtctaattgctatccattacagaaattaatcgttcagttgaaagaagtactgatgacttttcaaaacaaatgaaccaccgtagctgacagagaaccgtatcgtagaggtttgtagttagtgcttatttttgcatgttgatgttgactagctaataaactgtaaatgtaaacc

SEQ ID NO: 111786 - DNA, 987 bp, Artificial Sequence
  derived and/or modified sequence
atggccgtgcaggagagcgccgcccagctgagcatgaccctgaaggtgcaggagtatcctacacttaaagtgccctacgagactctgaacaaacggttccgggccgcacagaaaaatattgacagagagactagccacgtgaccatggttgtggccgagctcgagaagactctgtctggctgtccagctgttgactctgtggttagtttgctggatggcgttgtggagaagctgagcgttcttaaaagaaaagcagtggagtcgattcaagcagaggacgagtcagccaagttatgtaaaagacgcatcgagcacctaaaagagcactcatctgatcagcctgccgccgcttctgtctggaagcggaagaggatggacaggatgatggttgagcacttgttgaggtgtggatactacaacaccgctgtcaaacttgcccgccaatcggggattgagacatgtaagaaagcactgcaaccctcccggcgcgagccagctggaaggggggctccaggccatggtcacgcaggtctgcctgctcggcatgcacacttgccagtgcagggcccttcaggcccctgtacggttgcagacgctgaccccgctgtcccagtcaggcagctgcctacaacaccagcaggcaaacagttttgtgtgcacccacatcccgccggctggccactgagtcaccaggagcagtgctacaaggaagacgggtcgtccaagagtcccgactgccctgtttgttccaggtccctgaataagctcgctcagccccttcctatggcacactgtgccaactctcggctcgtctgtaagatctccggtgacgttatgaatgaaaacaatcccccaatgatgttgccaaatggctacgtttacggctataatagtctcctgtctatccgccaggatgataaggtcgtgtgcccccgcaccaaagaggtcttccattttagtcaggccgaaaaagtgtacatcatgtag

SEQ ID NO: 111787 - DNA, 987 bp, Artificial Sequence
  derived and/or modified sequence
atggccgtgcaggagagcgccgcccagctgagcatgaccctgaaggttcaagagtaccccacccttaaagtgccgtacgagacgcttaataaaaggttcagggccgcccaaaagaacatcgatcgagaaaccagccatgtcacaatggtggtggccgagctggaaaaaacgctgtctggttgtcccgccgttgactcagtagtcagcttgttagacggggtagtagaaaaactgtcggttctgaagcgcaaagccgtcgaatcgatacaggctgaagacgaaagcgctaagttatgcaaaaggcgtatagagcacctgaaagagcattcctcagatcagcccgctgcagcgtctgtgtggaagcgaaaacggatggacagaatgatggtggagcacctcttgcgttgtggatattacaatactgcagtgaaactggcgcggcagagtggcatcgaaacctgtaagaaggctctgcagccctctaggagagagcctgccggcagaggcgccccgggacacggccatgcaggcctgcccgcccggcatgcacacctgccagtgcaaggaccatccggcccctgtactgtggctgatgccgaccctgcagtccctgtccgccaattacccaccaccccagctgggaaacagttctgcgtgcatccccatcctgccggatggccactgagccatcaggacacctgctataaagaagacggctcctctaagagtccggactgcccggtgtgttctcggtctctcaacaagctggcccagccgctgcccatggcccactgtgctaactcgaggcttgtgtgcaagatcagtggggacgtgatgaatgagaataaccctccaatgatgttgccaaacggctacgtgtacggctacaactctctgctctcaatcaggcaggacgataaagttgtgtgtccacgcaccaaagaagtcttccacttctctcaggccgagaaggtgtacatcatgtag

SEQ ID NO: 111788 - DNA, 987 bp, Artificial Sequence
  derived and/or modified sequence
atggctgtccaggaatccgctgcccagctatcaatgacactgaaggtgcaggagtaccctacattgaaagtgccctatgaaactttaaataaacggtttcgggcagcacagaagaacatcgaccgtgaaacatcccatgtgacaatggtggtagccgagcttgagaaaaccctgagcggctgtcccgctgtggactccgtggtctccttactggatggagtggtggagaaactctcagtcctgaagcggaaagctgttgagagtatccaagccgaagacgagtccgccaagctctgtaaacggaggattgagcacctcaaagaacatagcagtgatcagcccgcagccgctagcgtgtggaaacgaaagaggatggatcgcatgatggttgaacacctcctccgttgtgggtactacaacaccgctgtcaaacttgccagacagtccggaattgaaacctgcaaaaaggcattgcagccgtcacggagggagcctgccggtagaggagctcctggccacggccatgctggccttcccgctaggcacgctcatctgcctgtgcagggcccaagtggtccgtgcactgtcgctgacgccgaccccgcagtgcctgtccgtcagctgcctaccactcctgcgggaaagcagttctgtgtgcatcctcacccggcagggtggcctctgtcacaccaggagcagtgctacaaggaggacggcagcagcaaatccccggactgtccggtgtgttcccggagcttgaacaagctggcccaacctctcccgatggcccattgcgccaacagtagactggtttgcaagataagcggggacgtgatgaacgagaataacccgcctatgatgctcccaaacgggtatgtgtacggttacaactcccttctgtcaattaggcaggatgataaggtcgtttgccctcgaaccaaggaggtgtttcatttctcccaagccgaaaaggtctacattatgtag

SEQ ID NO: 111789 - DNA, 987 bp, Artificial Sequence
  derived and/or modified sequence
atggcggtgcaggagtccgccgctcaactttcgatgacgctgaaggttcaagaatacccgactctgaaggtaccatatgagactcttaataagcgctttcgtgccgctcagaagaatattgaccgggagacatcacatgtgacgatggtagttgccgaactcgaaaaaaccctgagtggctgtcctgcggttgactctgttgtcagcttgcttgacggggttgtggagaagttgtctgtgctgaagcggaaggccgtggagagcatacaggcggaagatgagagtgctaagctatgtaagcgacgcattgaacaccttaaggaacacagcagtgaccaaccagctgccgcaagcgtgtggaaaaggaaacgaatggatcggatgatggtggaacacttgcttcgctgcggttactacaatacagcagttaaattggcacgccagagcggaatcgagacctgcaagaaagccctgcaaccgagccggcgagagccagcgggacgcggagcccctggtcatgggcacgctgggctccccgctagacacgctcatttgccagttcagggcccttccggcccttgtacggtggcagatgccgaccccgctgtgcccgtacggcagctgcctactacccctgctgggaaacaattttgtgtccatccgcatcctgccggatggcccttgtctcaccaagacacgtgctataaggaggacggctcctcaaagtcccccgactgtcctgtgtgctcccgaagcctgaataagttggcgcagccccttccaatggcacactgtgctaactctcgtttggtctgtaaaattagcggcgatgtgatgaacgaaaataaccctcccatgatgttaccaaatggctacgtgtacggatataatagtctgttgtcgatccgtcaagacgacaaggttgtgtgccctcgcacaaaagaggtatttcacttttctcaggccgagaaagtctatattatgtag

SEQ ID NO: 111790 - DNA, 987 bp, Artificial Sequence
  derived and/or modified sequence
atggccgtgcaggagagcgccgcccagctgagcatgaccctgaaggtgcaggagtaccccaccctgaaggtgccctacgagaccctgaacaagagattcagagccgcccagaagaacatcgacagagagaccagccacgtgaccatggtggtggccgagctggagaagaccctgagcggctgccccgccgtggacagcgtggtgagcctgctggacggcgtggtggagaagctgagcgtgctgaagagaaaggccgtggagagcatccaggccgaggacgagagcgccaagctgtgcaagagaagaatcgagcacctgaaggagcacagcagcgaccagcccgccgccgccagcgtgtggaagagaaagagaatggacagaatgatggtggagcacctgctgagatgcggctactacaacaccgccgtgaagctggccagacagagcggcatcgagacctgcaagaaggccctgcagcccagcagaagagagcccgccggcagaggcgcccccggccacggccacgccggcctgcccgccagacacgcccacctgcccgtgcagggccccagcggcccctgcaccgtggccgacgccgaccccgccgtgcccgtgagacagctgcccaccacccccgccggcaagcagttctgcgtgcacccccaccccgccggctggcccctgagccaccaggagcagtgctacaaggaggacggcagcagcaagagccccgactgccccgtgtgcagcagaagcctgaacaagctggcccagcccctgcccatggcccactgcgccaacagcagactggtgtgcaagatcagcggcgacgtgatgaacgagaacaacccccccatgatgctgcccaacggctacgtgtacggctacaacagcctgctgagcatcagacaggacgacaaggtggtgtgccccagaaccaaggaggtgttccacttcagccaggccgagaaggtgtacatcatgtag

SEQ ID NO: 111791 - DNA, 987 bp, Artificial Sequence
  derived and/or modified sequence
atggccgtgcaggagagcgccgcccagctgagcatgaccctgaaggtgcaggagtaccccaccctgaaggtgccctacgagaccctgaacaagagattcagagccgcccagaagaacatcgacagagagaccagccacgtgaccatggtggtggccgagctggagaagaccctgagcggctgccccgccgtggacagcgtggtgagcctgctggacggcgtggtggagaagctgagcgtgctgaagagaaaggccgtggagagcatccaggccgaggacgagagcgccaagctgtgcaagagaagaatcgagcacctgaaggagcacagcagcgaccagcccgccgccgccagcgtgtggaagagaaagagaatggacagaatgatggtggagcacctgctgagatgcggctactacaacaccgccgtgaagctggccagacagagcggcatcgagacctgcaagaaggccctgcagcccagcagaagagagcccgccggcagaggcgcccccggccacggccacgccggcctgcccgccagacacgcccacctgcccgtgcagggccccagcggcccctgcaccgtggccgacgccgaccccgccgtgcccgtgagacagctgcccaccacccccgccggcaagcagttctgcgtgcacccccaccccgccggctggcccctgagccaccaggacacctgctacaaggaggacggcagcagcaagagccccgactgccccgtgtgcagcagaagcctgaacaagctggcccagcccctgcccatggcccactgcgccaacagcagactggtgtgcaagatcagcggcgacgtgatgaacgagaacaacccccccatgatgctgcccaacggctacgtgtacggctacaacagcctgctgagcatcagacaggacgacaaggtggtgtgccccagaaccaaggaggtgttccacttcagccaggccgagaaggtgtacatcatgtag

SEQ ID NO: 111792 - protein, 395 aa, Artificial Sequence
  derived and/or modified sequence
MWTLRATGREVGSSSCEDTVAPVPYETLNKRFRAAQKNIDRETSHVTMVVAELEKTLSGCPAVDSVVSLLDGVVEKLSVLKRKAVESIQAEDESAKLCKRRIEHLKEHSSDQPAAASVWKRKRMDRMMVEHLLRCGYYNTAVKLARQSGIEDLVNIEMFLTAKEVEESLERRETATCLAWCHDNKSRLRKMKSCLEFSLRIQEFIELIRQNKRLDAVRHARKHFSQAEGSQLDEVRQAMGMLAFPPDTHISPYKDLLDPARWRMLIQQFRYDNYRLHQLGNNSVFTLTLQAGLSAIKTPQCYKEDGSSKSPDCPVCSRSLNKLAQPLPMAHCANSRLVCKISGDVMNENNPPMMLPNGYVYGYNSLLSIRQDDKVVCPRTKEVFHFSQAEKVYIM

SEQ ID NO: 111793 - DNA, 1188 bp, Artificial Sequence
  derived and/or modified sequence
atgtggacactgcgcgccacaggtcgcgaggtgggctcatcctcttgcgaggacacagtcgctcccgtaccctatgaaacactcaataaacgctttagagccgcacagaagaacatcgaccgggaaacaagtcacgtcacaatggtggtggctgaactggagaagacactgtccgggtgccccgccgtagactctgtggtttcactgctagacggagtggtcgagaaactgtctgtgctcaagcggaaggctgtggagtctattcaggctgaagacgagtcagcgaagttatgcaagaggaggattgagcatttgaaagagcatagttcagaccagcctgctgccgcttctgtctggaagcggaaaaggatggaccggatgatggtagagcacctgctgagatgtgggtactacaataccgcggttaaacttgccagacagagcggtattgaagacctggttaatatcgaaatgtttctgaccgccaaagaagtcgaagagtctcttgaacggagagagactgccacttgtctcgcttggtgccatgacaacaagtcaagattgcggaagatgaagtcttgtctggaattcagtctgcgaatccaggaatttatcgagctgataagacaaaacaagcggttggatgctgtgaggcacgctcgcaaacactttagccaggcagagggctcccagctcgacgaagtgaggcaggccatggggatgctggcctttcccccagatacacatatcagcccctataaagatctgttggatcccgcccggtggagaatgctcattcagcagtttcgctatgacaattaccgcctgcaccagctcggaaacaactcagtatttaccctaaccctccaggcggggctatcagccattaaaactccgcaatgctataaagaagatggtagttcgaagagcccagattgtcccgtgtgctcaaggtccctcaacaaactggctcaaccgttgcctatggcccactgcgcgaactcaagacttgtctgcaagatctcaggcgatgtcatgaatgaaaataacccccctatgatgcttcccaatggttatgtctatgggtataattcactgctgtcgatcaggcaggatgacaaggtcgtatgtccaaggaccaaagaggtgttccatttcagtcaggctgagaaagtttacattatgtag

SEQ ID NO: 111794 - DNA, 1188 bp, Artificial Sequence
  derived and/or modified sequence
atgtggaccctgcgggccaccggccgggaggtgggcagcagcagctgtgaagatactgtggcccctgtgccctatgagaccctgaacaagcgcttccgggccgcccagaagaacatcgaccgggagaccagccacgtgaccatggtggtggccgagctggagaagaccctgagcggctgcccagctgtggacagcgtggtgtccctgctggatggagtggtggagaagctgtctgtgctgaagaggaaggctgtggagagcatccaggctgaagatgagagcgccaagctgtgcaagaggcgcatcgagcacctgaaggagcacagcagtgaccagcctgctgctgcctctgtgtggaagaggaagaggatggacaggatgatggtggagcacctgctgcgctgtggctactacaacacagctgtgaagctggcccggcagagcggcatcgaggacctggtgaacatcgagatgttcctgacagccaaggaggtggaggagagcctggagcggcgggagacagccacctgcctggcctggtgccacgacaacaagagccggctgaggaagatgaagagctgcctggagttcagcctgcgcatccaggagttcatcgagctgatccggcagaacaagaggctggatgctgtgagacatgccaggaagcacttcagccaggccgagggcagccagctggatgaggtgcggcaggccatgggcatgctggccttccccccagacacccacatcagcccctacaaggacctgctggaccctgcccgctggaggatgctgatccagcagttccgctatgacaactaccgcctgcaccagctgggcaacaacagcgtcttcaccctgaccctgcaggccggcctgagcgccatcaagaccccccagtgctacaaggaggatggcagcagcaagagcccagactgccctgtgtgcagccgcagcctgaacaagctggcccagcccctgcccatggcccactgtgccaacagccggctggtgtgcaagatctctggagatgtgatgaatgaaaacaacccccccatgatgctgcccaacggctacgtgtatggctacaacagcctgctgagcatccggcaggatgacaaggtggtgtgccccaggaccaaggaggtgttccacttcagccaggccgagaaggtgtacatcatgtag

SEQ ID NO: 111795 - DNA, 1444 bp, Artificial Sequence
  derived and/or modified sequence
ttgcactgggagcaaagggttcctgtctgcagcacaccagctgcccggagctctgccctgtgcctgagcagcgtcagcaccgcggtgaggcggacggcccggcaggggttggaaagtccagaaaggccccgttcccgcgtagaacttgaatgcagctaagggacgtccagagaggcctttccttttctggtggcggtctggaatgtgctggtgccctacgagacgctgaacaaacgctttcgcgccgctcagaagaacattgaccgggagaccagccacgtcaccatggtggtggccgagctggagaagacgttgagcggctgccccgccgtggactccgtggtcagcctgctggacggcgtggtggagaagctcagcgtcctcaagaggaaggcggtggaatccatccaggccgaggacgagagcgccaagctgtgcaagcgccggatcgagcacctcaaagagcatagcagcgaccagcccgcggcggccagcgtgtggaagaggaagcgcatggatcgcatgatggtggagcacctgctgcgttgcggctactacaacacggctgtcaagctggcgcgccagagcggcatcgaggacctagtgaatattgagatgttcctgacggccaaagaggtggaggagtccctggagaggcgtgagacggccacctgcctggcctggtgccatgacaacaagtcccggctccggaagatgaagagctgcctggagttcagcctcagaatccaggagttcattgaactcatccggcagaataagagactggacgctgtgagacatgcaagaaagcacttcagccaagcagaagggagccagctggacgaggtgcgccaggccatgggcatgctggccttcccgcccgacacgcacatctccccgtacaaggaccttctggaccctgcacggtggcggatgctgatccagcagttccggtacgacaactaccgactacaccagctgggaaacaattctgtgttcaccctcaccctgcaggctggcctctcagccatcaagacaccacagtgctacaaggaggacggcagctccaagagccctgactgccctgtgtgcagccgctccctgaacaagctggcgcagcccctgcccatggcccactgtgccaactcccgcctggtctgcaagatttctggcgacgtgatgaacgagaacaatccgcccatgatgctgcccaacggctacgtctacggctacaattctctgctttctatccgtcaagatgataaagtcgtgtgcccgagaaccaaagaagtcttccacttctcacaagccgagaaggtgtacatcatgtaggccccacgtcgtgaagcgcacgcctcggggacgggctgcagtgggcggggaggccacgccttcctcctgtcccacgctccagcctgccgcggcgtttctgtttcttgcgacc

SEQ ID NO: 111796 - DNA, 1607 bp, Artificial Sequence
  derived and/or modified sequence
ggcctggctcctctggggggcgtggatgtggggaggagctgctgtctgggtcagcagctgccctgctggagggagagggggtgctgcgctcatcccctgaactcagattggatagccccgggccagcgctggaggaggagcagaggcagggaggtgggaggagcgtgcgcagaggcgtgggaggcctgaggagtaagcggctggatgtggaccctgagagccactggcagggaggtggggtcttccagttgtgaagacaccgtggccccggtgccctacgagacgctgaacaaacgctttcgcgccgctcagaagaacattgaccgggagaccagccacgtcaccatggtggtggccgagctggagaagacgttgagcggctgccccgccgtggactccgtggtcagcctgctggacggcgtggtggagaagctcagcgtcctcaagaggaaggcggtggaatccatccaggccgaggacgagagcgccaagctgtgcaagcgccggatcgagcacctcaaagagcatagcagcgaccagcccgcggcggccagcgtgtggaagaggaagcgcatggatcgcatgatggtggagcacctgctgcgttgcggctactacaacacggctgtcaagctggcgcgccagagcggcatcgaggacctagtgaatattgagatgttcctgacggccaaagaggtggaggagtccctggagaggcgtgagacggccacctgcctggcctggtgccatgacaacaagtcccggctccggaagatgaagagctgcctggagttcagcctcagaatccaggagttcattgaactcatccggcagaataagagactggacgctgtgagacatgcaagaaagcacttcagccaagcagaagggagccagctggacgaggtgcgccaggccatgggcatgctggccttcccgcccgacacgcacatctccccgtacaaggaccttctggaccctgcacggtggcggatgctgatccagcagttccggtacgacaactaccgactacaccagctgggaaacaattctgtgttcaccctcaccctgcaggctggcctctcagccatcaagacaccacagtgctacaaggaggacggcagctccaagagccctgactgccctgtgtgcagccgctccctgaacaagctggcgcagcccctgcccatggcccactgtgccaactcccgcctggtctgcaagatttctggcgacgtgatgaacgagaacaatccgcccatgatgctgcccaacggctacgtctacggctacaattctctgctttctatccgtcaagatgataaagtcgtgtgcccgagaaccaaagaagtcttccacttctcacaagccgagaaggtgtacatcatgtaggccccacgtcgtgaagcgcacgcctcggggacgggctgcagtgggcggggaggccacgccttcctcctgtcccacgctccagcctgccgcggcgtttctgtttcttgcgaccaaagatccgtgagcaacgataaatactcttaggaagagagaaaataaggtttcataagtttgtacttgaaaacatttggattggtaggattttgtaacacgtc

SEQ ID NO: 111797 - DNA, 1188 bp, Artificial Sequence
  derived and/or modified sequence
atgtggaccctgcgggccaccggccgggaggtgggcagcagcagctgtgaggacacagtggcgcctgtgccctacgagacactaaataagaggttcagagcggctcagaaaaatattgaccgggagacctctcatgtcaccatggtggtcgcggagctagaaaagacgttaagtgggtgtcccgctgtggactcggtggtgtctctgctggatggagtcgttgaaaagttaagcgttctcaaacgcaaagccgtggagagcatacaagcagaagacgaaagtgcgaaactttgtaagcggagaatagagcatctgaaagaacattcgtccgatcagccggcggccgcttccgtatggaagagaaagcggatggaccggatgatggttgaacaccttctccgctgtggatattacaatacggccgtcaaacttgcgaggcaatccggaatagaggacctggtcaacattgagatgttcctgaccgctaaagaagtcgaggaaagcctggaaaggagggagactgcaacttgtcttgcttggtgtcatgacaacaagtctagactgcggaaaatgaagagctgtctcgaattctcattgagaatccaagagtttattgagctgataagacagaacaaaagactggacgcagtgcggcatgccaggaagcatttctcccaagcggaaggctcccagctggatgaagtcagacaggcaatgggcatgctggctttcccacccgacacccacatctccccttacaaggatctgctggaccctgcccggtggcggatgcttatccagcagttccggtatgacaattatagactccatcagctagggaataactcagttttcactctaacactgcaggccgggctgtccgccattaaaacaccccagtgttacaaagaagacgggagtagcaaaagcccagactgcccggtttgtagccgctctctgaataagctggcacagccgctccccatggcacactgcgccaattcaaggctcgtttgtaagattagcggcgacgtgatgaacgaaaataaccctccgatgatgctgccaaacggctatgtttacggatataactcccttctgtctattcggcaagacgataaagtggtgtgccctcgtacaaaagaggtgtttcacttctcacaggctgaaaaagtgtatatcatgtag

SEQ ID NO: 111798 - DNA, 1188 bp, Artificial Sequence
  derived and/or modified sequence
atgtggacacttcgggctaccggtcgagaagtcggaagtagctcgtgcgaggacactgtggctcctgttccctacgaaacactgaataaaagattcagggccgcacagaagaatattgaccgcgagacgtctcacgtaactatggtggtggccgagctcgaaaaaacattaagcggctgcccagctgtggacagcgtggtatccctgctcgatggcgtcgtagaaaagctaagtgtactgaagaggaaggctgtggaaagcatccaagctgaggatgagagcgccaaactgtgcaagaggcgtattgaacatctgaaggaacactcctcagatcagccggcagcagccagcgtgtggaagagaaagagaatggacagaatgatggttgagcacctcctcagatgtgggtactataacaccgctgtgaaacttgctcgccagtcaggcatcgaagacctcgttaacatcgaaatgtttctcacagccaaggaagtggaggagagtctggagcgtcgggaaaccgctacctgtctcgcttggtgtcacgataataagtcccgcttgcgcaagatgaagtcttgtctggagttttccctcaggatccaggaattcatcgagctgattcgtcaaaacaaacgtctcgacgccgtcagacacgctcggaagcatttttcacaggctgaaggttcccagcttgatgaggtccggcaggctatgggcatgttagccttcccaccagatacccatatatccccttacaaggacctactagaccccgctcgctggcgaatgctgatccagcagtttaggtatgataactacaggctgcaccagctggggaacaattccgtgttcacactgaccttacaggccggtctgagcgccatcaaaaccccacagtgctacaaagaagacgggtcaagcaaatctcccgactgtcccgtttgttccaggagtctcaacaaattggctcagccattgcccatggcacactgtgctaactcacgtctggtctgcaagataagcggcgacgttatgaatgagaataatccacccatgatgttgccgaacggttatgtctatgggtataatagcttattgagtatccgccaggacgacaaggtcgtttgcccgcgaacaaaagaggttttccacttttctcaggctgaaaaggtgtacattatgtag

SEQ ID NO: 111799 - DNA, 1188 bp, Artificial Sequence
  derived and/or modified sequence
atgtggaccctgagagccaccggcagagaggtgggcagcagcagctgcgaggacaccgtggcccccgtgccctacgagaccctgaacaagagattcagagccgcccagaagaacatcgacagagagaccagccacgtgaccatggtggtggccgagctggagaagaccctgagcggctgccccgccgtggacagcgtggtgagcctgctggacggcgtggtggagaagctgagcgtgctgaagagaaaggccgtggagagcatccaggccgaggacgagagcgccaagctgtgcaagagaagaatcgagcacctgaaggagcacagcagcgaccagcccgccgccgccagcgtgtggaagagaaagagaatggacagaatgatggtggagcacctgctgagatgcggctactacaacaccgccgtgaagctggccagacagagcggcatcgaggacctggtgaacatcgagatgttcctgaccgccaaggaggtggaggagagcctggagagaagagagaccgccacctgcctggcctggtgccacgacaacaagagcagactgagaaagatgaagagctgcctggagttcagcctgagaatccaggagttcatcgagctgatcagacagaacaagagactggacgccgtgagacacgccagaaagcacttcagccaggccgagggcagccagctggacgaggtgagacaggccatgggcatgctggccttcccccccgacacccacatcagcccctacaaggacctgctggaccccgccagatggagaatgctgatccagcagttcagatacgacaactacagactgcaccagctgggcaacaacagcgtgttcaccctgaccctgcaggccggcctgagcgccatcaagaccccccagtgctacaaggaggacggcagcagcaagagccccgactgccccgtgtgcagcagaagcctgaacaagctggcccagcccctgcccatggcccactgcgccaacagcagactggtgtgcaagatcagcggcgacgtgatgaacgagaacaacccccccatgatgctgcccaacggctacgtgtacggctacaacagcctgctgagcatcagacaggacgacaaggtggtgtgccccagaaccaaggaggtgttccacttcagccaggccgagaaggtgtacatcatgtag

SEQ ID NO: 111800 - DNA, 1047 bp, Artificial Sequence
  derived and/or modified sequence
atggttgtggccgaacttgaaaagaccctgagcgggtgtccagccgtcgactccgtggtgagtctcctagacggagtggtggagaagctgtccgtgctaaagcgcaaagctgtcgaaagtatccaggccgaggatgaatccgctaaactgtgcaagagacgcatagaacatctgaaggagcatagctccgatcaaccggctgccgcttccgtttggaagcggaagagaatggaccggatgatggtagagcatttgctgagatgcggatactataacactgcagtgaaactggcgcgccagagcggtatcgaagacctggttaatatcgaaatgttcctgacggccaaagaagtggaggaatctcttgagcgacgcgagactgccacatgcctggcttggtgccatgacaataagtcacgcctgcgtaaaatgaagagctgcctggaattcagccttaggatccaggaattcatcgagttgatccgtcaaaacaaacggttggatgccgtgagacatgcaagaaaacacttctcacaggccgagggctctcagctggacgaggtgaggcaggctatgggtatgttggcctttcctcctgacacccacatcagtccatataaggacctacttgatcctgcccgatggcgaatgctgatccaacagtttcgttacgacaactaccggcttcatcagctgggaaacaattccgtattcacactgaccttgcaggcggggcttagcgcaattaagacgccacagtgctataaggaggacggtagtagtaaaagccccgattgccccgtgtgctctagatccctgaataagctggctcagcctctgccaatggcccactgcgccaatagtagactggtgtgcaaaatcagcggggatgtgatgaacgaaaacaatccaccaatgatgctccccaacggctacgtttatggttacaactctctgctgagcatccgtcaggatgacaaagtcgtttgtcctaggaccaaagaagttttccattttagccaagccgagaaggtgtacatcatgtag

SEQ ID NO: 111801 - DNA, 1047 bp, Artificial Sequence
  derived and/or modified sequence
atggtggtggccgagctggagaagaccctgagcggctgcccagctgtggacagcgtggtgtccctgctggatggagtggtggagaagctgtctgtgctgaagaggaaggctgtggagagcatccaggccgaggatgaaagtgccaagctgtgcaagagaagaattgagcacctgaaggagcacagcagtgaccagcctgctgctgcctctgtgtggaagaggaagaggatggacaggatgatggtggagcacctgctgcgctgtggctactacaacacagctgtgaagctggcccggcagagcggcatcgaggacctggtgaacatcgagatgttcctgacagccaaggaggtggaggagagcctggagcggcgggagacagccacctgcctggcctggtgccacgacaacaagagccggctgaggaagatgaagagctgcctggagttcagcctgcgcatccaggagttcatcgagctgatccggcagaacaagaggctggatgctgtgagacatgccaggaagcacttcagccaggccgagggcagccagctggatgaggtgcggcaggccatgggcatgctggccttccccccagacacccacatcagcccctacaaggacctgctggaccctgcccgctggaggatgctgatccagcagttccgctatgacaactaccgcctgcaccagctgggcaacaacagcgtcttcaccctgaccctgcaggccggcctgagcgccatcaagaccccccagtgctacaaggaggatggcagcagcaagagcccagactgccctgtgtgcagccgcagcctgaacaagctggcccagcccctgcccatggcccactgtgccaacagccggctggtgtgcaagatctctggagatgtgatgaatgaaaacaacccccccatgatgctgcccaacggctacgtgtatggctacaacagcctgctgagcatccggcaggatgacaaggtggtgtgccccaggaccaaggaggtgttccacttcagccaggccgagaaggtgtacatcatgtag

SEQ ID NO: 111802 - DNA, 1047 bp, Artificial Sequence
  derived and/or modified sequence
atggtggtggccgagctggagaagaccctgagcggctgccccgccgtggactccgtggttagccttttagatggagtggtggagaaactgagcgttttgaaacggaaagcagtggaatccattcaagcagaggacgagtctgcaaaactgtgcaagaggagaatcgagcatcttaaggagcacagctctgaccagcccgcagcagcgagtgtgtggaaaagaaaaagaatggatagaatgatggtggaacaccttttgagatgtggttactataacacagctgtgaagctcgccagacagagtggaatcgaagacctcgtaaacatcgagatgtttctgaccgctaaggaagtggaggaatccctagagcggcgcgaaacggcaacatgtcttgcatggtgtcacgataacaagtctcggttgaggaagatgaagtcctgtctggagtttagtctccggatccaggaatttattgagcttatcagacagaataaaaggcttgacgcagtacgccatgcacggaaacatttcagccaggcagagggttcacagctcgacgaagtcaggcaagcgatggggatgctggcgttcccgccagacactcacatcagcccatacaaagacctgctagatccagccaggtggaggatgctcatccagcagtttaggtatgacaactaccggctgcaccagctcggaaataatagtgtattcaccctcacgctgcaggccgggcttagcgcaatcaaaactcctcaatgctataaagaggatggatcaagcaagagtcccgattgccctgtgtgtagtcgctcactgaacaaactggctcagcctcttcctatggcccattgcgcgaacagtcgtctcgtgtgcaagatctctggggacgttatgaatgagaacaatcctcctatgatgctgcctaatggctacgtctatggatacaactccctcctgtccatccgacaggacgataaggtggtctgccccaggacaaaagaggtcttccatttctcacaggccgagaaggtgtacatcatgtag

SEQ ID NO: 111803 - DNA, 1047 bp, Artificial Sequence
  derived and/or modified sequence
atggtggtggcggagctggagaaaaccctgtcggggtgtcctgctgtggactccgtggtttcactgcttgacggggtggtggaaaagctgtccgtgctgaagcggaaggcagtggaatccattcaagccgaggatgagtccgccaaactctgcaagcgtcgcattgaacacctcaaggagcacagtagcgatcagcccgctgcagcgtccgtgtggaagcgcaagcgcatggacaggatgatggtcgaacaccttctacgatgtggctactataacacagccgtcaaactggcccgacagtccggtattgaagaccttgtgaatatcgaaatgtttctgactgccaaagaagtggaggaatctcttgaacgccgtgagacagccacatgcttagcttggtgccacgataataagagcagactgaggaagatgaagtcttgcctggagtttagcctcagaatccaggaatttattgaactaattcgccagaataaaagactggatgccgtgaggcacgctagaaagcacttttctcaggcggaggggagccagctggacgaggtcagacaggctatggggatgctcgcattccctccggacacccatatttctccttataaagacttgctggatccagctcgatggaggatgcttattcagcagttccggtatgacaattacaggctgcaccagctaggaaacaattctgtctttacacttaccctgcaagctggcctaagtgcaattaaaaccccccagtgctataaggaggacggaagtagcaaatcgcctgactgtcccgtgtgctcccggagtctcaacaaactggcacaacccctgcccatggctcactgtgctaactcccggctggtgtgtaagattagcggggacgtgatgaatgagaacaaccctccgatgatgctccctaacggatatgtctatggttacaatagcctgctgagtatccgacaggatgacaaagtggtgtgtccgcgaacaaaagaggttttccacttctcccaggctgagaaagtgtacattatgtag

SEQ ID NO: 111804 - DNA, 1047 bp, Artificial Sequence
  derived and/or modified sequence
atggtggtggccgagctggagaagaccctgagcggctgccccgccgtggacagcgtggtgagcctgctggacggcgtggtggagaagctgagcgtgctgaagagaaaggccgtggagagcatccaggccgaggacgagagcgccaagctgtgcaagagaagaatcgagcacctgaaggagcacagcagcgaccagcccgccgccgccagcgtgtggaagagaaagagaatggacagaatgatggtggagcacctgctgagatgcggctactacaacaccgccgtgaagctggccagacagagcggcatcgaggacctggtgaacatcgagatgttcctgaccgccaaggaggtggaggagagcctggagagaagagagaccgccacctgcctggcctggtgccacgacaacaagagcagactgagaaagatgaagagctgcctggagttcagcctgagaatccaggagttcatcgagctgatcagacagaacaagagactggacgccgtgagacacgccagaaagcacttcagccaggccgagggcagccagctggacgaggtgagacaggccatgggcatgctggccttcccccccgacacccacatcagcccctacaaggacctgctggaccccgccagatggagaatgctgatccagcagttcagatacgacaactacagactgcaccagctgggcaacaacagcgtgttcaccctgaccctgcaggccggcctgagcgccatcaagaccccccagtgctacaaggaggacggcagcagcaagagccccgactgccccgtgtgcagcagaagcctgaacaagctggcccagcccctgcccatggcccactgcgccaacagcagactggtgtgcaagatcagcggcgacgtgatgaacgagaacaacccccccatgatgctgcccaacggctacgtgtacggctacaacagcctgctgagcatcagacaggacgacaaggtggtgtgccccagaaccaaggaggtgttccacttcagccaggccgagaaggtgtacatcatgtag

SEQ ID NO: 111805 - protein, 993 aa, Artificial Sequence
  derived and/or modified sequence
MDQSVAIQETLAEGEYCVIAVQGVLCEGDSRQSRLLGLVRYRLEHGGQEHALFLYTHRRMAITGDDVSLDQIVPVSRDFTLEEVSPDGELYILGSDVTVQLDTAELSLVFQLPFGSQTRMFLHEVARACPGFDSATRDPEFLWLSRYRCAELELEMPTPRGCNSALVTWPGYATIGGGRYPSRKKRWGLEEARPQGAGSVLFWGGAMEKTGFRLMERAHGGGFVWGRSARDGRRDEELEEAGREMSAAAGSRERNTAGGSNFDGLRPNGKGVPMDQSSRGQDKPESLQPRQNKSKSEITDMVRSSTITVSDKAHILSMQKFGLRDTIVKSHLLQKEEDYTYIQNFRFFAGTYNVNGQSPKECLRLWLSNGIQAPDVYCVGFQELDLSKEAFFFHDTPKEEEWFKAVSEGLHPDAKYAKVKLIRLVGIMLLLYVKQEHAAYISEVEAETVGTGIMGRMGNKGGVAIRFQFHNTSICVVNSHLAAHIEEYERRNQDYKDICSRMQFCQPDPSLPPLTISNHDVILWLGDLNYRIEELDVEKVKKLIEEKDFQMLYAYDQLKIQVAAKTVFEGFTEGELTFQPTYKYDTGSDDWDTSEKCRAPAWCDRILWKGKNITQLSYQSHMALKTSDHKPVSSVFDIGVRVVNDELYRKTLEEIVRSLDKMENANIPSVSLSKREFCFQNVKYMQLKVESFTIHNGQVPCHFEFINKPDEESYCKQWLNANPSRGFLLPDSDVEIDLELFVNKMTATKLNSGEDKIEDILVLHLDRGKDYFLSVSGNYLPSCFGSPIHTLCYMREPILDLPLETISELTLMPVWTGDDGSQLDSPMEIPKELWMMVDYLYRNAVQQEDLFQQPGLRSEFEHIRDCLDTGMIDNLSASNHSVAEALLLFLESLPEPVICYSTYHNCLECSGNYTASKQVISTLPIFHKNVFHYLMAFLRELLKNSAKNHLDENILASIFGSLLLRNPAGHQKLDMTEKKKAQEFIHQFLCNPL

SEQ ID NO: 111806 - protein, 749 aa, Artificial Sequence
  derived and/or modified sequence
MSAAAGSRERNTAGGSNFDGLRPNGKGVPMDQSSRGQDKPESLQPRQNKSKSEITDMVRSSTITVSDKAHILSMQKFGLRDTIVKSHLLQKEEDYTYIQNFRFFAGTYNVNGQSPKECLRLWLSNGIQAPDVYCVGFQELDLSKEAFFFHDTPKEEEWFKAVSEGLHPDAKYAKVKLIRLVGIMLLLYVKQEHAAYISEVEAETVGTGIMGRMGNKGGVAIRFQFHNTSICVVNSHLAAHIEEYERRNQDYKDICSRMQFCQPDPSLPPLTISNHDVILWLGDLNYRIEELDVEKVKKLIEEKDFQMLYAYDQLKIQVAAKTVFEGFTEGELTFQPTYKYDTGSDDWDTSEKCRAPAWCDRILWKGKNITQLSYQSHMALKTSDHKPVSSVFDIGVRVVNDELYRKTLEEIVRSLDKMENANIPSVSLSKREFCFQNVKYMQLKVESFTIHNGQVPCHFEFINKPDEESYCKQWLNANPSRGFLLPDSDVEIDLELFVNKMTATKLNSGEDKIEDILVLHLDRGKDYFLSVSGNYLPSCFGSPIHTLCYMREPILDLPLETISELTLMPVWTGDDGSQLDSPMEIPKELWMMVDYLYRNAVQQEDLFQQPGLRSEFEHIRDCLDTGMIDNLSASNHSVAEALLLFLESLPEPVICYSTYHNCLECSGNYTASKQVISTLPIFHKNVFHYLMAFLRELLKNSAKNHLDENILASIFGSLLLRNPAGHQKLDMTEKKKAQEFIHQFLCNPL

SEQ ID NO: 111807 - protein, 828 aa, Artificial Sequence
  derived and/or modified sequence
MDQSVAIQETLAEGEYCVIAVQGVLCEGDSRQSRLLGLVRYRLEHGGQEHALFLYTHRRMAITGDDVSLDQIVPVSRDFTLEEVSPDGELYILGSDVTVQLDTAELSLVFQLPFGSQTRMFLHEVARACPGFDSATRDPEFLWLSRYRCAELELEMPTPRGCNSALVTWPGYATIGGGRYPSRKKRWGLEEARPQGAGSVLFWGGAMEKTGFRLMERAHGGGFVWGRSARDGRRDEELEEAGREMSAAAGSRERNTAGGSNFDGLRPNGKGVPMDQSSRGQDKPESLQPRQNKSKSEITDMVRSSTITVSDKAHILSMQKFGLRDTIVKSHLLQKEEDYTYIQNFRFFAGTYNVNGQSPKECLRLWLSNGIQAPDVYCVGFQELDLSKEAFFFHDTPKEEEWFKAVSEGLHPDAKYAKVKLIRLVGIMLLLYVKQEHAAYISEVEAETVGTGIMGRMGNKGGVAIRFQFHNTSICVVNSHLAAHIEEYERRNQDYKDICSRMQFCQPDPSLPPLTISNHDVILWLGDLNYRIEELDVEKVKKLIEEKDFQMLYAYDQLKIQVAAKTVFEGFTEGELTFQPTYKYDTGSDDWDTSEKCRAPAWCDRILWKGKNITQLSYQSHMALKTSDHKPVSSVFDIGVRVVNDELYRKTLEEIVRSLDKMENANIPSVSLSKREFCFQNVKYMQLKVESFTIHNGQVPCHFEFINKPDEESYCKQWLNANPSRGFLLPDSDVEIDLELFVNKMTATKLNSGEDKIEDILVLHLDRGKDYFLSVSGNYLPSCFGSPIHTLCYMREPILDLPLETISELLAYLAAYCFETQLVTKSLI

SEQ ID NO: 111808 - protein, 175 aa, Artificial Sequence
  derived and/or modified sequence
MQKFGLRDTIVKSHLLQKEEDYTYIQNFRFFAGTYNVNGQSPKECLRLWLSNGIQAPDVYCVGFQELDLSKEAFFFHDTPKEEEWFKAVSEGLHPDAKYAKVKLIRLVGIMLLLYVKQEHAAYISEVEAETVGTGIMGRMCDLVAGGPQLQDRRAGCGKSEKAHRREGLSNAVCI

SEQ ID NO: 111809 - DNA, 2982 bp, Artificial Sequence
  derived and/or modified sequence
atggatcagagcgtggcaattcaagaaaccctcgcagagggggagtactgcgtgatagctgttcagggcgtcctatgtgaaggcgattccaggcagagtcgtttactggggcttgtccgttacaggttagaacatggcggacaagagcatgcactgttcctgtacacgcacaggcgcatggccataacaggagacgatgtatccctggaccagatcgtgccagtatctcgcgactttactctggaagaggtgtcccccgacggcgagttatatatactgggatcggacgtgacggtgcagctggacaccgcggaactgtcacttgtattccaactgccgttcggcagtcaaactcggatgtttttacatgaagtcgctagagcctgtccaggctttgactcggctacccgtgacccagagtttctgtggctgtccaggtaccgatgcgctgaactggaactggagatgccgacccccagagggtgtaattccgccctggtgacatggcctggatacgctactatcggaggtggacggtacccatctcgtaaaaagcggtggggactggaggaagcaagacctcagggggccgggagcgtcttattttggggaggagcaatggagaagaccggttttaggctcatggaacgggcccatggcggcggctttgtctggggccggtcggcaagagacgggcgaagagatgaagaactcgaagaggcaggcagggaaatgtccgcagctgcaggttcgagggaacgcaacaccgccggtgggagcaattttgacgggctccgacccaatggcaaaggggtcccaatggaccagtctagccgcgggcaggataagcccgagtccctccagccgaggcaaaacaagagtaaatctgagatcacagatatggtgagaagctctaccattacagtcagtgataaagcgcacatattatccatgcagaagttcgggctgcgcgacacaatcgtgaaatcacacttattgcagaaggaggaagactacacctacatccagaatttccggttttttgccggaacatataacgtgaacgggcagtccccaaaagaatgtctacgcctgtggctttcaaatggaattcaggctcctgatgtgtattgcgtcgggtttcaagagctggatctgtccaaagaggccttctttttccacgatacccctaaggaagaagagtggttcaaggcggtatccgaaggacttcatccagatgctaaatatgcaaaggttaagctgattagacttgtgggcatcatgctgctactgtatgttaaacaggaacatgctgcctacatttcagaggtcgaggccgaaacagtgggcacgggaataatgggccgcatgggcaacaagggtggggtggcgatacggttccaatttcacaatacatcaatctgtgtggtcaactctcaccttgctgcccatatcgaagagtatgagcgcagaaatcaagattacaaagatatctgcagtcggatgcagttctgtcaacctgatccatctctacctcccctgacaatcagcaaccacgacgtgatcctgtggctgggagatcttaactaccgcattgaagaactcgacgtggaaaaggtgaaaaaactgatcgaagaaaaggattttcagatgctatatgcctatgaccagttgaagattcaggtcgcagcaaagactgtgttcgaaggttttacggaaggagagctcacttttcaacccacctataagtacgacacgggtagcgacgactgggacactagcgaaaaatgccgcgcgccagcatggtgtgaccgcatcctgtggaaaggaaagaacattacgcagttgagctaccaatctcacatggcccttaagaccagtgaccacaagcccgtcagtagtgtcttcgatatcggggtgagggtggtgaacgatgagctgtataggaaaacccttgaggaaattgttagatctctagacaaaatggaaaacgccaacattcccagcgtaagcctgagcaaacgggaattctgctttcaaaatgtcaagtacatgcagttgaaagtagaaagttttaccatccataacggccaggtgccttgtcattttgagttcattaataagcctgatgaggaatcatattgtaagcagtggctgaacgccaacccctctcgaggtttcctgctccccgactcagacgttgaaatcgatttggagctgttcgtgaacaagatgacggcaacgaaactgaacagtggcgaggacaaaatagaggacattctggtactgcacctcgaccgcggaaaggattactttctgagcgtgagcggaaactacctgccatcttgcttcggcagtcccattcataccctgtgctacatgcgggaacccattctcgatctcccactggagactatctctgagctaactctcatgcccgtatggaccggagacgacggcagccaactcgactccccaatggagatcccaaaagaactgtggatgatggttgactatttataccgtaacgccgttcagcaggaagatctttttcagcaacccggtcttaggtcagagtttgagcacatccgggactgcctggacaccggcatgatagacaacctctcagcctctaaccatagcgtcgctgaagcgttgctcctctttttagaaagcctccctgaaccagtgatctgctattcaacctatcacaactgcctggaatgtagcggcaattataccgcatcgaagcaagtgatctctaccctaccaatatttcataaaaacgttttccactatctgatggcatttcttagagaacttctcaaaaacagtgcaaagaaccacctggatgagaatattttggcatccatattcggcagtctgttgttacgcaacccagctgggcatcagaaactggacatgactgagaagaagaaggctcaggaattcatccaccagtttttatgtaacccactgtag

SEQ ID NO: 111810 - DNA, 2982 bp, Artificial Sequence
  derived and/or modified sequence
atggatcaaagcgtagcgatccaggagactttggcggagggtgaatattgcgtgatcgccgttcagggcgtgttatgtgaaggcgacagcagacagagccggttgctcggcctggtacgctatcggttggagcacggaggacaggagcatgctttatttctttacacacatagacgcatggctatcaccggcgatgacgtctctctggatcagatcgtacccgtgtcccgggattttactctggaagaagtgagccccgacggtgagctgtatattctgggcagcgatgttaccgttcaattagatacagccgagctgtccctggtgtttcaactgccttttggctcgcaaacgcggatgttcctccatgaagtggccagggcatgtccaggcttcgactctgctacgcgggacccggaattcttatggctgtccaggtatcggtgcgccgaactggagttagaaatgcctacccctcgcggctgcaactccgcgctcgtgacctggccaggttacgccaccataggtggcggacggtaccccagcagaaagaagagatggggcttggaagaggcacgaccccagggggctgggtcagtcctgttttgggggggggccatggaaaagacaggattccgcttaatggagagagcacacggcgggggtttcgtgtggggccgctccgcacgcgatggccgacgggatgaggagctggaggaagctggccgggagatgtcagctgcagccggtagcagagaacgcaatactgctgggggtagtaatttcgacggacttagaccgaacgggaagggagtacccatggaccaatcaagtcggggccaggataaacccgagtcccttcagccccggcagaacaaatcaaaaagcgaaatcactgacatggtgcggtcctccaccataacagtgtcagataaggctcacatactcagcatgcagaagttcggacttcgggacaccatcgtcaaatcacatctcttgcaaaaagaagaggattacacctatatacaaaacttccgcttttttgcaggtacatataatgtgaacggccagtctcctaaggaatgtcttagactttggttatcaaatgggatccaggccccagacgtgtactgtgtcggatttcaagagctggacctatcaaaagaggcttttttcttccacgacacccctaaagaggaggagtggtttaaagcagtttccgagggactgcaccccgacgcaaagtacgccaaggtgaaattgattagactcgtgggcattatgttgctgctgtacgtgaaacaggaacatgccgcctatattagtgaggtcgaggcagaaacggtggggaccggtatcatgggaaggatggggaacaaggggggagtggccatccggttccaatttcacaatacttccatatgcgtcgtaaactcccatctggccgcacatattgaggaatacgagcggcgaaatcaggactataaggatatatgttccagaatgcaattttgtcaacccgacccgtcccttccacctctcactatctcaaatcatgacgtcatcctatggctgggcgacttgaactacagaatcgaggaactcgatgtggaaaaagtgaagaaactgatcgaagagaaagactttcagatgctgtacgcctatgatcagttgaagatccaggtggctgccaagaccgtgtttgaggggtttactgagggcgagctgacgttccaacctacctataagtatgacactggaagcgatgattgggatactagcgaaaaatgccgcgcaccagcctggtgcgatcggattttgtggaagggtaagaacattacacagctttcttatcagtctcacatggctctgaagaccagcgatcataaaccagtgtctagcgtgttcgatatcggcgttagagtcgtgaacgatgaactgtataggaagaccctggaagagattgttcggagcctcgacaagatggagaacgctaatatccctagtgtatcactttctaagcgggagttttgttttcaaaatgttaaatatatgcagctcaaggttgagtcgttcaccatccacaacggccaggtgccgtgtcatttcgagttcatcaataaacccgacgaggagtcttattgtaaacaatggctgaacgccaatccgtctagaggtttcttgctgccagattcggacgttgagatcgatctggaactgttcgtgaacaagatgaccgctacaaagttgaattctggcgaagataagattgaggatattcttgtcctgcacctagaccgaggtaaagattactttctaagtgtttccggcaactacctgccgagctgctttggctcccctatacacactctatgttacatgcgtgaacctattctggacctgccgctcgaaactatctctgagttgaccctcatgcctgtctggaccggagatgacggaagccagctcgactccccaatggagatccccaaggagctgtggatgatggttgactacctgtacagaaacgctgtgcaacaagaagacctgtttcagcaaccggggctgcggagcgaattcgaacatattcgggattgtcttgatacaggaatgattgacaatctatcagcttctaaccactctgtggccgaagctctcctgctatttttagagtctctgccggagccggtgatatgctattcgacataccacaactgcctcgagtgttccggaaattacacagcatccaagcaggtgattagcactctgcccatctttcataaaaatgtgtttcattatctgatggcgtttttacgtgagctgctaaagaacagcgcaaagaaccacttggacgaaaacatcctggctagtatctttggaagtctgctgctccgaaacccagcaggccaccagaagcttgacatgaccgagaaaaagaaggcgcaggagtttattcatcaatttttatgcaacccactgtag

SEQ ID NO: 111811 - DNA, 2250 bp, Artificial Sequence
  derived and/or modified sequence
atgtcagcggctgccggaagcagagagaggaacacagcgggcggttcaaatttcgatgggttgcggcccaatgggaagggtgtaccaatggaccaaagcagccgcggccaagataagcctgaaagcctgcagccacgccagaataagtctaaaagcgagatcacagatatggtgagatcaagcacaataacggtgtctgataaggcacatattctctccatgcagaagttcggccttagagatacaattgtcaagagccatctgttacaaaaggaggaggactatacatatatacaaaacttcaggttcttcgccgggacctacaacgtgaatgggcagtctccaaaggaatgtctcaggttgtggttatcaaacggaatacaagcccccgacgtctattgcgtgggcttccaggagcttgatctgtcaaaagaagcttttttcttccacgatacgcccaaagaggaagagtggttcaaggccgtgtccgaaggtctccaccctgacgcaaagtacgccaaagtcaagctgatacgcctggtgggcattatgcttttgctgtatgtcaaacaagagcacgcagcctatatcagcgaggtggaggccgagaccgtaggtacgggaatcatgggccggatggggaataaggggggagttgccatcaggttccagttccacaacacctctatctgcgtggtgaacagccatctggcagctcacatcgaagaatacgaacgacgcaaccaagactataaggatatctgtagccgtatgcagttctgtcagcctgaccctagtctccccccccttacaatttcaaatcacgacgtgatcctgtggttaggcgatctgaactacagaattgaggaactcgacgtggagaaagtcaaaaagctgatcgaggagaaagattttcagatgttgtatgcctacgatcaactgaaaatccaagtggcagcaaagacggttttcgagggattcactgagggcgagcttacattccagcctacatacaaatatgatacgggtagtgacgattgggatacgagcgaaaagtgccgcgcgcctgcatggtgtgatcgaatcttatggaagggtaagaatatcacacagttgtcgtatcagtctcacatggcactgaagacatcggatcacaagccagtctcgagtgttttcgacattggggtgcgggtagtgaacgacgagctttacaggaagactctggaagagatcgtgcggtctctggacaagatggagaatgctaacatcccttctgtgagccttagcaagcgggagttctgttttcagaatgtgaagtacatgcaactgaaagtggaatcttttacaatacacaacgggcaggtcccctgccacttcgaattcatcaacaaaccggacgaggaaagttactgcaaacagtggctgaacgcaaacccatctagaggcttcttgttgcccgattctgatgtcgagatagacttggaactgtttgtgaacaagatgacggcaactaaactgaacagcggagaagacaagatagaggacatcctggtcttacacctggacaggggcaaggactattttctgtccgttagcggcaactacctgccctcctgtttcgggtccccgattcatacactatgttacatgcgggagcccatactggacctgcctctcgaaaccatttctgagcttacattaatgccagtatggaccggcgatgacggatcccagctcgattcaccaatggagatccccaaagaactctggatgatggtggactacctttaccgcaacgctgttcagcaggaagacctatttcagcagccaggccttcggtctgaatttgagcacatccgagattgcctggacacgggcatgattgacaatctatctgcttccaaccattccgtcgctgaagccctgctgttatttcttgagtctctgcccgagccggtcatttgttacagcacctaccacaattgcctggagtgtagtggcaactataccgccagtaaacaggttatttccaccctgcccatcttccacaaaaatgtgttccattatctgatggcttttctgcgcgagctgcttaagaactctgctaagaaccatttggatgagaatatcttggcctctatatttgggagtcttctgcttaggaatcccgccgggcaccaaaaattggatatgactgagaagaagaaggcgcaagaatttatacaccagttcctatgtaaccccctctag

SEQ ID NO: 111812 - DNA, 2487 bp, Artificial Sequence
  derived and/or modified sequence
atggatcagagcgtggctattcaggagacactggccgagggcgagtattgtgtgatcgccgtccagggcgtcttgtgcgaaggcgattcccgacaaagtaggcttctggggctggtgcggtatagacttgagcacggaggacaggagcacgccctgttcctatatacccatcgacgcatggcgattacaggagatgatgtgagtcttgatcagatcgtgccagtgagtcgggatttcactctagaggaggtgtcccccgatggcgagctgtacattctaggttctgacgtgaccgtgcaactggatactgctgagcttagcctagtctttcagctacctttcggttcccaaactcgaatgtttctccatgaggtggcaagggcctgtcccggattcgattccgcgactcgggatcctgagtttctctggttgtccaggtatcgctgtgcagagctcgaactggaaatgcctacccccagagggtgtaactcggccctggtgacatggcctggatatgcgactattggcggagggcggtatccatctaggaagaagcgttggggtctagaggaagcccgcccccagggagccgggagtgtactcttctggggcggcgccatggagaagacagggttcagacttatggagcgtgcccacggaggggggtttgtgtggggtagatccgctcgggacggccggagagatgaagagctggaagaagccggcagggaaatgagtgctgcggctgggtccagagagcgaaatacagcgggcgggtccaacttcgatggactgagacctaacggtaaaggcgtgcccatggaccagagtagtcgtgggcaggataaacctgaaagtttgcagccccgacagaacaagtcaaagtctgagatcaccgatatggtccgcagctccacaatcactgtatcggataaggcacacattctttccatgcaaaagtttggattgcgcgatactattgtaaaaagccacctgctgcaaaaggaggaagattacacttacatccagaattttcgtttcttcgccggcacatacaacgttaacggccagtctcccaaggagtgtttaaggctctggttatccaacggaatacaggcacccgatgtgtactgcgtgggcttccaagagctcgacctatccaaagaggcattttttttccatgacacgcctaaggaagaggaatggttcaaggccgtgagcgaagggctgcatccggacgcaaagtatgccaaggtgaagttgatccggttagtcggaattatgctgctgttatacgtgaagcaggaacacgccgcatatattagcgaggtagaagctgagaccgtgggcacagggatcatgggaagaatgggtaataagggtggcgtagccattaggtttcagtttcacaacaccagcatctgcgtggtgaattctcacctcgccgctcatatcgaagagtatgagcggaggaatcaggactataaggatatatgttcaagaatgcagttctgccaacctgatccatcactccctccactgacaatctctaaccacgacgtcatactgtggctgggtgaccttaactacagaattgaagagctcgatgttgaaaaggtgaaaaaactaatcgaagaaaaggatttccagatgttgtacgcttacgatcagctgaagatccaagtggccgcaaagactgtcttcgaagggttcactgagggcgagctcacttttcaacccacatataagtatgacactgggtctgacgactgggatacctcagagaaatgtagggctccggcctggtgcgacaggatcctgtggaaggggaaaaacatcacacaattgtcataccagagtcatatggctctgaagaccagcgatcataagccagtgtcttcggtcttcgatatcggggttagagtggtcaatgacgaactgtatcgtaaaacgttggaagagatcgtgaggtccttggacaagatggagaacgcgaatattccatcagtatcactgagtaagcgggagttttgcttccagaacgtgaagtatatgcagctcaaggtcgaatcctttactattcataacgggcaggtgccatgccattttgagttcattaacaaacctgacgaagagagctattgcaagcagtggctgaacgcaaacccgagccgcggcttcttgttacccgattcagacgtggaaatcgacttagaactgtttgtcaataagatgacagccactaaattgaactcgggcgaagataagatagaagacatcctggtgcttcatttagataggggcaaagattactttttgagtgtaagcgggaactatctaccatcgtgcttcgggagcccgatccatacactctgctacatgcgggagcccatcttagacttacccctggagaccatttccgaattactggcgtacttggcagcctactgctttgagactcagctggtgacaaagtccctgatttag

SEQ ID NO: 111813 - DNA, 4694 bp, Artificial Sequence
  derived and/or modified sequence
aaatgtagtcactgtcccggaacctggggcagcggagtcccgtgcgccctgtggtgacagctcaggagggtgtgtgcgctcagcaggggccagcatggaccagtctgtggcaatccaggagacgctggctgagggggaatactgcgtcatcgcggtgcaaggtgtgctgtgtgagggggacagccggcagagccgcctcctgggactcgtgcgctaccgcctggagcacggcggccaggaacacgctctcttcctctatacgcaccggaggatggccattaccggggacgatgtctctctggaccagatagtgccagtctcgcgggattttacgctggaagaagtgtccccagatggtgaactctacatccttggctcagatgtgaccgtccagctggacacagcagagcttagcctcgtattccaactgccctttggttcacaaaccaggatgttcctccacgaagttgccagggcctgtccaggcttcgattctgcgacccgggatcctgaattcctgtggctgtctcggtataggtgcgcagagctggagctggagatgccaacgccgcgcggttgtaactcggccctagttacctggccagggtacgcgacaattggcggaggcaggtatccgtcccggaagaaacggtggggattggaggaggcccggccacagggggcgggctccgttctgttttggggcggagcgatggagaagacaggctttcgattgatggagcgggcacacgggggcgggttcgtctgggggcggagcgcgcgggacgggcggcgggatgaggagcttgaggaagcaggcagggaaatgtctgccgccgccggctctcgggagcgcaacactgcaggtggttctaactttgatggtttgagaccaaatgggaagggagtgcctatggaccaaagctccaggggtcaagataaaccagaaagcttgcaaccaagacagaataaatccaagtccgaaattactgacatggttcgctcctccactatcacagtgtcggacaaggctcatattttatccatgcagaagtttggactgcgagatacaattgtgaaatcacatctactacagaaagaagaggattacacctatatccagaacttcaggttttttgcgggaacatacaatgtaaatgggcagtcccccaaagaatgcctccggctgtggctgagcaatggtatccaggccccagatgtctattgtgtagggttccaggagcttgatctgagtaaggaagcttttttctttcacgataccccaaaggaggaagagtggttcaaagctgtgtcagagggtcttcatccagatgccaaatatgcaaaggtgaagcttatccgactggttgggattatgctgctgttatatgtcaaacaggagcatgcagcttatatctcagaagtggaagccgagactgtggggacaggaatcatggggaggatgggcaacaagggaggcgtggcgatcaggttccagttccacaacaccagcatctgcgttgtgaattctcacttggcagcccacattgaagagtatgagaggaggaaccaggactataaggacatttgttctcgaatgcagttttgtcagcctgacccaagccttccccctctcaccatcagcaaccatgatgtgatcttgtggctgggggacctcaactacaggatagaagagctggatgtggaaaaagtgaaaaagctcatcgaagagaaggactttcaaatgctgtatgcatatgatcagctgaaaattcaggtggccgcaaagactgtctttgaaggcttcacagagggtgagctcacattccagcctacttacaagtatgatacgggctctgacgactgggataccagtgagaagtgccgtgctcctgcctggtgtgatcggattctctggaaagggaagaacatcactcagctgagttaccagagccacatggccctgaagaccagtgaccacaagcctgtcagctcagtgtttgacatcggggtgagggtcgtaaatgacgagctttaccggaagacactggaggaaattgttcgctccctggataagatggaaaatgccaacattccttctgtgtccctgtccaagcgagagttctgttttcagaatgtgaagtacatgcaattgaaagtagaatcctttacaattcataatggacaagtaccctgtcattttgaattcatcaacaagcctgatgaagagtcttactgtaagcagtggctgaatgccaaccccagcagaggcttcctcctgccagattctgatgttgagattgacttggagctcttcgtaaataagatgacagctacaaagctcaactcgggtgaagacaaaattgaggacattctggttctgcacttggacaggggaaaggattactttttgtctgtgtctgggaactacctgcccagctgttttgggtctcccattcatacactgtgttacatgagagagccaatcttggacctaccacttgaaaccattagtgagctgactctgatgccagtatggactggagatgatgggagccagttggatagccccatggaaatccccaaagagctctggatgatggttgattacctgtaccgaaatgctgtccagcaggaagatctgtttcagcaaccaggcctgaggtcagaatttgaacatatcagggactgcttggatactggaatgattgataacctctctgccagcaatcattctgtagccgaagccctgctgcttttcctggagagccttccagagcctgtcatctgttacagcacctaccataactgcttggagtgttctggcaactacacagcaagcaaacaggtcatttctactctccccatattccacaaaaatgtcttccactacttgatggcgtttttgcgagaactgctgaaaaattcagcaaaaaatcatttggatgagaatattctagctagcatatttggcagcttattgcttcgaaacccagctggtcaccaaaagcttgatatgacagagaagaagaaggctcaagaatttattcaccagttcctctgcaacccactctgagcctctctctcctcctattttacttgaggctgccaattaccagccccacctgtttcagctcaagagatgccttaagataattatgtgaggccacttggtagcaagaatggcagctatttcctgagcctagtaccccaattaagcccaccattggttagcacactcagcgctgtgagtcgtgaagacacgggagaaaatccaccataataaaactgacattcaattttcaactttagttatttaacacagatttttttattttttatttttttttattttgagacggagttttgctctgtcgcgcagggtggagtgcggtggcacgatctcggctcactgcaacctctgcctcctgggtgcaagcaattatcctgcctcagcctcccgagtagctgggactgcaggcacacactgccacgcccagctaattttttgcattttagtagagacggggtttcaccgtgttgcccaggctgttctaaaactcctgaactcaggtaatctgcctgcctcggcctccccaagtgctaggattacagatgtgagccaccacgcccggccttttttttttttttttcttttttgagatggagtttcactcttgttgcccaggctggagtgcgttggcgtggtcttggctcactgcaacctctgcctccttggttcaagcaattctcctgcctcagcctctcgagtagctgggattataggcgtccgccaccatgcctggctaatttttttgtgtgtttttagtatagacacggtttcaccatgttggccaggctggtctcgaatgcctggcctcaggtgatccacctgccttggcctcccaaagtgctgggattacaggcatgaaccaccacgcctggcctaaaatgtttttaaataactgtacttgtactcactcaccctacctccagggcatagtcagtctgggctgagatccccatgatcagatatttgatggaaagtcctgaaaggccaatgagttggatggcaagaatgcaggcagaagctgctggataaaataggctacagccacctcagatgctttcagtgctctgtctgaggatgtgtatatgcatatgcaaactcgacccccgttcctgcccagataatggctcaataactctgaggctggttgctcagcctctgagggcaatacaggcatttaaaaaattaaaatgaccaggcacagtggctcacgcctgtaatctcggcactttgggagactgaggtgggagcatcacttgagaccaggagtttgggaccaggctgggcaacacagggagaccccctctctacaaaaacatttttaaaaaattagctgggtgtggtgatgcatgcctgtggtcccagttacttgggaggctgacgtgggtggctcacttgagcacaggagtttgaggctgcagtgacctatgaccacatcactgtacgccagcccgggtgagagagggagaccccgtctctaaaaataaaatgtaaaatcactgaaaaaatgagtgttcggtgaaacaagtgggattttctgggccagcaagtcttccaaactgtatatgatgcatcctgtctccatgtgtaatatattttaatgataaatgtatttttaacagtg

SEQ ID NO: 111814 - DNA, 3230 bp, Artificial Sequence
  derived and/or modified sequence
catggaccagtctgtggcaatccaggagacgctggctgagggggaatactgcgtcatcgcggtgcaaggtgtgctgtgtgagggggacagccggcagagccgcctcctgggactcgtgcgctaccgcctggagcacggcggccaggaacacgctctcttcctctatacgcaccggaggatggccattaccggggacgatgtctctctggaccagatagtgccagtctcgcgggattttacgctggaagaagtgtccccagatggtgaactctacatccttggctcagatgtgaccgtccagctggacacagcagagcttagcctcgtattccaactgccctttggttcacaaaccaggatgttcctccacgaagttgccagggcctgtccaggcttcgattctgcgacccgggatcctgaattcctgtggctgtctcggtataggtgcgcagagctggagctggagatgccaacgccgcgcggttgtaactcggccctagttacctggccagggtacgcgacaattggcggaggcaggtatccgtcccggaagaaacggtggggattggaggaggcccggccacagggggcgggctccgttctgttttggggcggagcgatggagaagacaggctttcgattgatggagcgggcacacgggggcgggttcgtctgggggcggagcgcgcgggacgggcggcgggatgaggagcttgaggaagcaggcagggaaatgtctgccgccgccggctctcgggagcgcaacactgcaggtggttctaactttgatggtttgagaccaaatgggaagggagtgcctatggaccaaagctccaggggtcaagataaaccagaaagcttgcaaccaagacagaataaatccaagtccgaaattactgacatggttcgctcctccactatcacagtgtcggacaaggctcatattttatccatgcagaagtttggactgcgagatacaattgtgaaatcacatctactacagaaagaagaggattacacctatatccagaacttcaggttttttgcgggaacatacaatgtaaatgggcagtcccccaaagaatgcctccggctgtggctgagcaatggtatccaggccccagatgtctattgtgtagggttccaggagcttgatctgagtaaggaagcttttttctttcacgataccccaaaggaggaagagtggttcaaagctgtgtcagagggtcttcatccagatgccaaatatgcaaaggtgaagcttatccgactggttgggattatgctgctgttatatgtcaaacaggagcatgcagcttatatctcagaagtggaagccgagactgtggggacaggaatcatggggaggatgggcaacaagggaggcgtggcgatcaggttccagttccacaacaccagcatctgcgttgtgaattctcacttggcagcccacattgaagagtatgagaggaggaaccaggactataaggacatttgttctcgaatgcagttttgtcagcctgacccaagccttccccctctcaccatcagcaaccatgatgtgatcttgtggctgggggacctcaactacaggatagaagagctggatgtggaaaaagtgaaaaagctcatcgaagagaaggactttcaaatgctgtatgcatatgatcagctgaaaattcaggtggccgcaaagactgtctttgaaggcttcacagagggtgagctcacattccagcctacttacaagtatgatacgggctctgacgactgggataccagtgagaagtgccgtgctcctgcctggtgtgatcggattctctggaaagggaagaacatcactcagctgagttaccagagccacatggccctgaagaccagtgaccacaagcctgtcagctcagtgtttgacatcggggtgagggtcgtaaatgacgagctttaccggaagacactggaggaaattgttcgctccctggataagatggaaaatgccaacattccttctgtgtccctgtccaagcgagagttctgttttcagaatgtgaagtacatgcaattgaaagtagaatcctttacaattcataatggacaagtaccctgtcattttgaattcatcaacaagcctgatgaagagtcttactgtaagcagtggctgaatgccaaccccagcagaggcttcctcctgccagattctgatgttgagattgacttggagctcttcgtaaataagatgacagctacaaagctcaactcgggtgaagacaaaattgaggacattctggttctgcacttggacaggggaaaggattactttttgtctgtgtctgggaactacctgcccagctgttttgggtctcccattcatacactgtgttacatgagagagccaatcttggacctaccacttgaaaccattagtgagctgactctgatgccagtatggactggagatgatgggagccagttggatagccccatggaaatccccaaagagctctggatgatggttgattacctgtaccgaaatgctgtccagcaggaagatctgtttcagcaaccaggcctgaggtcagaatttgaacatatcagggactgcttggatactggaatgattgataacctctctgccagcaatcattctgtagccgaagccctgctgcttttcctggagagccttccagagcctgtcatctgttacagcacctaccataactgcttggagtgttctggcaactacacagcaagcaaacaggtcatttctactctccccatattccacaaaaatgtcttccactacttgatggcgtttttgcgagaactgctgaaaaattcagcaaaaaatcatttggatgagaatattctagctagcatatttggcagcttattgcttcgaaacccagctggtcaccaaaagcttgatatgacagagaagaagaaggctcaagaatttattcaccagttcctctgcaacccactctgagcctctctctcctcctattttacttgaggctgccaattaccagccccacctgtttcagctcaagagatgccttaagataattatgtgaggccacttggtagcaagaatggcagctatttcctgagcctagtaccccaattaagcccaccattggttagcacactcagcgctgtgagtcgtgaagacacgggagaaaatccaccataataaaactgacattcaattttcaactttagttatttaacac

SEQ ID NO: 111815 - DNA, 3905 bp, Artificial Sequence
  derived and/or modified sequence
gcggcgggatgaggagcttgaggaagcaggcagggaaatgtctgccgccgccggctctcgggagcgcaacactgcaggtggttctaactttgatggtttgagaccaaatgggaagggagtgcctatggaccaaagctccaggggtcaagataaaccagaaagcttgcaaccaagacagaataaatccaagtccgaaattactgacatggttcgctcctccactatcacagtgtcggacaaggctcatattttatccatgcagaagtttggactgcgagatacaattgtgaaatcacatctactacagaaagaagaggattacacctatatccagaacttcaggttttttgcgggaacatacaatgtaaatgggcagtcccccaaagaatgcctccggctgtggctgagcaatggtatccaggccccagatgtctattgtgtagggttccaggagcttgatctgagtaaggaagcttttttctttcacgataccccaaaggaggaagagtggttcaaagctgtgtcagagggtcttcatccagatgccaaatatgcaaaggtgaagcttatccgactggttgggattatgctgctgttatatgtcaaacaggagcatgcagcttatatctcagaagtggaagccgagactgtggggacaggaatcatggggaggatgggcaacaagggaggcgtggcgatcaggttccagttccacaacaccagcatctgcgttgtgaattctcacttggcagcccacattgaagagtatgagaggaggaaccaggactataaggacatttgttctcgaatgcagttttgtcagcctgacccaagccttccccctctcaccatcagcaaccatgatgtgatcttgtggctgggggacctcaactacaggatagaagagctggatgtggaaaaagtgaaaaagctcatcgaagagaaggactttcaaatgctgtatgcatatgatcagctgaaaattcaggtggccgcaaagactgtctttgaaggcttcacagagggtgagctcacattccagcctacttacaagtatgatacgggctctgacgactgggataccagtgagaagtgccgtgctcctgcctggtgtgatcggattctctggaaagggaagaacatcactcagctgagttaccagagccacatggccctgaagaccagtgaccacaagcctgtcagctcagtgtttgacatcggggtgagggtcgtaaatgacgagctttaccggaagacactggaggaaattgttcgctccctggataagatggaaaatgccaacattccttctgtgtccctgtccaagcgagagttctgttttcagaatgtgaagtacatgcaattgaaagtagaatcctttacaattcataatggacaagtaccctgtcattttgaattcatcaacaagcctgatgaagagtcttactgtaagcagtggctgaatgccaaccccagcagaggcttcctcctgccagattctgatgttgagattgacttggagctcttcgtaaataagatgacagctacaaagctcaactcgggtgaagacaaaattgaggacattctggttctgcacttggacaggggaaaggattactttttgtctgtgtctgggaactacctgcccagctgttttgggtctcccattcatacactgtgttacatgagagagccaatcttggacctaccacttgaaaccattagtgagctgactctgatgccagtatggactggagatgatgggagccagttggatagccccatggaaatccccaaagagctctggatgatggttgattacctgtaccgaaatgctgtccagcaggaagatctgtttcagcaaccaggcctgaggtcagaatttgaacatatcagggactgcttggatactggaatgattgataacctctctgccagcaatcattctgtagccgaagccctgctgcttttcctggagagccttccagagcctgtcatctgttacagcacctaccataactgcttggagtgttctggcaactacacagcaagcaaacaggtcatttctactctccccatattccacaaaaatgtcttccactacttgatggcgtttttgcgagaactgctgaaaaattcagcaaaaaatcatttggatgagaatattctagctagcatatttggcagcttattgcttcgaaacccagctggtcaccaaaagcttgatatgacagagaagaagaaggctcaagaatttattcaccagttcctctgcaacccactctgagcctctctctcctcctattttacttgaggctgccaattaccagccccacctgtttcagctcaagagatgccttaagataattatgtgaggccacttggtagcaagaatggcagctatttcctgagcctagtaccccaattaagcccaccattggttagcacactcagcgctgtgagtcgtgaagacacgggagaaaatccaccataataaaactgacattcaattttcaactttagttatttaacacagatttttttattttttatttttttttattttgagacggagttttgctctgtcgcgcagggtggagtgcggtggcacgatctcggctcactgcaacctctgcctcctgggtgcaagcaattatcctgcctcagcctcccgagtagctgggactgcaggcacacactgccacgcccagctaattttttgcattttagtagagacggggtttcaccgtgttgcccaggctgttctaaaactcctgaactcaggtaatctgcctgcctcggcctccccaagtgctaggattacagatgtgagccaccacgcccggccttttttttttttttttcttttttgagatggagtttcactcttgttgcccaggctggagtgcgttggcgtggtcttggctcactgcaacctctgcctccttggttcaagcaattctcctgcctcagcctctcgagtagctgggattataggcgtccgccaccatgcctggctaatttttttgtgtgtttttagtatagacacggtttcaccatgttggccaggctggtctcgaatgcctggcctcaggtgatccacctgccttggcctcccaaagtgctgggattacaggcatgaaccaccacgcctggcctaaaatgtttttaaataactgtacttgtactcactcaccctacctccagggcatagtcagtctgggctgagatccccatgatcagatatttgatggaaagtcctgaaaggccaatgagttggatggcaagaatgcaggcagaagctgctggataaaataggctacagccacctcagatgctttcagtgctctgtctgaggatgtgtatatgcatatgcaaactcgacccccgttcctgcccagataatggctcaataactctgaggctggttgctcagcctctgagggcaatacaggcatttaaaaaattaaaatgaccaggcacagtggctcacgcctgtaatctcggcactttgggagactgaggtgggagcatcacttgagaccaggagtttgggaccaggctgggcaacacagggagaccccctctctacaaaaacatttttaaaaaattagctgggtgtggtgatgcatgcctgtggtcccagttacttgggaggctgacgtgggtggctcacttgagcacaggagtttgaggctgcagtgacctatgaccacatcactgtacgccagcccgggtgagagagggagaccccgtctctaaaaataaaatgtaaaatcactgaaaaaatgagtgttcggtgaaacaagtgggattttctgggccagcaagtcttccaaactgtatatgatgcatcctgtctccatgtgtaatatattttaatgataaatgtatttttaacagtg

SEQ ID NO: 111816 - DNA, 4255 bp, Artificial Sequence
  derived and/or modified sequence
aaatgtagtcactgtcccggaacctggggcagcggagtcccgtgcgccctgtggtgacagctcaggagggtgtgtgcgctcagcaggggccagcatggaccagtctgtggcaatccaggagacgctggctgagggggaatactgcgtcatcgcggtgcaaggtgtgctgtgtgagggggacagccggcagagccgcctcctgggactcgtgcgctaccgcctggagcacggcggccaggaacacgctctcttcctctatacgcaccggaggatggccattaccggggacgatgtctctctggaccagatagtgccagtctcgcgggattttacgctggaagaagtgtccccagatggtgaactctacatccttggctcagatgtgaccgtccagctggacacagcagagcttagcctcgtattccaactgccctttggttcacaaaccaggatgttcctccacgaagttgccagggcctgtccaggcttcgattctgcgacccgggatcctgaattcctgtggctgtctcggtataggtgcgcagagctggagctggagatgccaacgccgcgcggttgtaactcggccctagttacctggccagggtacgcgacaattggcggaggcaggtatccgtcccggaagaaacggtggggattggaggaggcccggccacagggggcgggctccgttctgttttggggcggagcgatggagaagacaggctttcgattgatggagcgggcacacgggggcgggttcgtctgggggcggagcgcgcgggacgggcggcgggatgaggagcttgaggaagcaggcagggaaatgtctgccgccgccggctctcgggagcgcaacactgcaggtggttctaactttgatggtttgagaccaaatgggaagggagtgcctatggaccaaagctccaggggtcaagataaaccagaaagcttgcaaccaagacagaataaatccaagtccgaaattactgacatggttcgctcctccactatcacagtgtcggacaaggctcatattttatccatgcagaagtttggactgcgagatacaattgtgaaatcacatctactacagaaagaagaggattacacctatatccagaacttcaggttttttgcgggaacatacaatgtaaatgggcagtcccccaaagaatgcctccggctgtggctgagcaatggtatccaggccccagatgtctattgtgtagggttccaggagcttgatctgagtaaggaagcttttttctttcacgataccccaaaggaggaagagtggttcaaagctgtgtcagagggtcttcatccagatgccaaatatgcaaaggtgaagcttatccgactggttgggattatgctgctgttatatgtcaaacaggagcatgcagcttatatctcagaagtggaagccgagactgtggggacaggaatcatggggaggatgggcaacaagggaggcgtggcgatcaggttccagttccacaacaccagcatctgcgttgtgaattctcacttggcagcccacattgaagagtatgagaggaggaaccaggactataaggacatttgttctcgaatgcagttttgtcagcctgacccaagccttccccctctcaccatcagcaaccatgatgtgatcttgtggctgggggacctcaactacaggatagaagagctggatgtggaaaaagtgaaaaagctcatcgaagagaaggactttcaaatgctgtatgcatatgatcagctgaaaattcaggtggccgcaaagactgtctttgaaggcttcacagagggtgagctcacattccagcctacttacaagtatgatacgggctctgacgactgggataccagtgagaagtgccgtgctcctgcctggtgtgatcggattctctggaaagggaagaacatcactcagctgagttaccagagccacatggccctgaagaccagtgaccacaagcctgtcagctcagtgtttgacatcggggtgagggtcgtaaatgacgagctttaccggaagacactggaggaaattgttcgctccctggataagatggaaaatgccaacattccttctgtgtccctgtccaagcgagagttctgttttcagaatgtgaagtacatgcaattgaaagtagaatcctttacaattcataatggacaagtaccctgtcattttgaattcatcaacaagcctgatgaagagtcttactgtaagcagtggctgaatgccaaccccagcagaggcttcctcctgccagattctgatgttgagattgacttggagctcttcgtaaataagatgacagctacaaagctcaactcgggtgaagacaaaattgaggacattctggttctgcacttggacaggggaaaggattactttttgtctgtgtctgggaactacctgcccagctgttttgggtctcccattcatacactgtgttacatgagagagccaatcttggacctaccacttgaaaccattagtgagctgctagcatatttggcagcttattgcttcgaaacccagctggtcaccaaaagcttgatatgacagagaagaagaaggctcaagaatttattcaccagttcctctgcaacccactctgagcctctctctcctcctattttacttgaggctgccaattaccagccccacctgtttcagctcaagagatgccttaagataattatgtgaggccacttggtagcaagaatggcagctatttcctgagcctagtaccccaattaagcccaccattggttagcacactcagcgctgtgagtcgtgaagacacgggagaaaatccaccataataaaactgacattcaattttcaactttagttatttaacacagatttttttattttttatttttttttattttgagacggagttttgctctgtcgcgcagggtggagtgcggtggcacgatctcggctcactgcaacctctgcctcctgggtgcaagcaattatcctgcctcagcctcccgagtagctgggactgcaggcacacactgccacgcccagctaattttttgcattttagtagagacggggtttcaccgtgttgcccaggctgttctaaaactcctgaactcaggtaatctgcctgcctcggcctccccaagtgctaggattacagatgtgagccaccacgcccggccttttttttttttttttcttttttgagatggagtttcactcttgttgcccaggctggagtgcgttggcgtggtcttggctcactgcaacctctgcctccttggttcaagcaattctcctgcctcagcctctcgagtagctgggattataggcgtccgccaccatgcctggctaatttttttgtgtgtttttagtatagacacggtttcaccatgttggccaggctggtctcgaatgcctggcctcaggtgatccacctgccttggcctcccaaagtgctgggattacaggcatgaaccaccacgcctggcctaaaatgtttttaaataactgtacttgtactcactcaccctacctccagggcatagtcagtctgggctgagatccccatgatcagatatttgatggaaagtcctgaaaggccaatgagttggatggcaagaatgcaggcagaagctgctggataaaataggctacagccacctcagatgctttcagtgctctgtctgaggatgtgtatatgcatatgcaaactcgacccccgttcctgcccagataatggctcaataactctgaggctggttgctcagcctctgagggcaatacaggcatttaaaaaattaaaatgaccaggcacagtggctcacgcctgtaatctcggcactttgggagactgaggtgggagcatcacttgagaccaggagtttgggaccaggctgggcaacacagggagaccccctctctacaaaaacatttttaaaaaattagctgggtgtggtgatgcatgcctgtggtcccagttacttgggaggctgacgtgggtggctcacttgagcacaggagtttgaggctgcagtgacctatgaccacatcactgtacgccagcccgggtgagagagggagaccccgtctctaaaaataaaatgtaaaatcactgaaaaaatgagtgttcggtgaaacaagtgggattttctgggccagcaagtcttccaaactgtatatgatgcatcctgtctccatgtgtaatatattttaatgataaatgtatttttaacagtg

SEQ ID NO: 111817 - DNA, 2982 bp, Artificial Sequence
  derived and/or modified sequence
atggaccagagcgtggccatccaggagaccctggccgagggggagtactgtgtgattgctgtgcagggcgtgctgtgtgagggggacagccggcagagccggctgctgggcctggtgcgctaccgcctggagcacggcggccaggagcacgccctcttcctgtacacccacaggaggatggccatcactggagatgatgtgtccctggaccagatcgtgcctgtgtcccgggacttcaccctggaggaggtgtccccagatggagagctgtacatcctgggcagtgatgtgacagtgcagctggacacagctgagctgagcctggtgttccagctgcccttcggcagccagaccaggatgttcctgcacgaggtggcccgggcctgccccggctttgacagcgccacccgggaccctgagttcctgtggctgagccgctaccgctgtgccgagctggagctggagatgcccaccccccggggctgcaacagcgccctggtgacctggccaggctacgccaccatcggcggcggccgctaccccagcaggaagaagcgctggggcctggaggaggcccggccccagggcgccggctctgtgctcttctggggcggggccatggagaagacaggcttccggctgatggagcgggcccatggaggcggctttgtgtggggccgcagcgccagagatggaagaagagatgaggagctggaggaggccggccgggagatgtctgctgctgctggcagccgggagaggaacacagctgggggcagcaactttgatggcctgcggcccaacgggaagggcgtgcccatggaccagagcagccggggccaggacaagccagagagcctgcagccccggcagaacaagagcaagtctgagatcacagacatggtgcgcagcagcaccatcaccgtgtctgacaaggcccacatcctgtccatgcagaagtttggcctgcgggacaccatcgtgaagagccacctgctgcagaaggaggaggactacacctacatccagaacttccgcttctttgctggcacctacaacgtgaatggccagagccccaaggaatgtctgcggctgtggctgagcaatggcatccaggccccagatgtgtactgtgtgggcttccaggagctggacctgagcaaggaggccttcttcttccatgacacccccaaggaggaggagtggttcaaggctgtgtctgagggcctgcacccagatgccaagtatgccaaggtgaagctgatccggctggtgggcatcatgctgctgctgtatgtgaagcaggagcacgccgcctacatcagcgaggtggaggccgagaccgtgggcaccggcatcatgggccgcatgggcaacaagggcggcgtggccatccgcttccagttccacaacaccagcatctgtgtggtgaacagccacctggccgcccacatcgaggagtatgaaagaagaaaccaggactacaaggacatctgcagcaggatgcagttctgccagcctgaccccagcctgccccccctgaccatcagcaaccatgatgtgatcctgtggctgggggacctgaactaccgcatcgaggagctggatgtggagaaggtgaagaagctgattgaggagaaggacttccagatgctgtatgcctatgaccagctgaagatccaggtggccgccaagacagtgtttgagggcttcacagaaggagagctgaccttccagcccacctacaagtatgacaccggcagtgatgactgggacaccagcgagaagtgccgggccccagcctggtgtgaccgcatcctgtggaagggcaagaacatcacccagctgagctaccagagccacatggccctgaagaccagtgaccacaagcctgtgtcctctgtgtttgacatcggcgtgcgggtggtgaatgatgagctgtacaggaagaccctggaggagatcgtgcgcagcctggacaagatggagaatgccaacatccccagcgtgtccctgagcaagcgggagttctgcttccagaatgtgaagtacatgcagctgaaggtggagagcttcaccatccacaacggccaggtgccctgccactttgagttcatcaacaagccagatgaggagagctactgcaagcagtggctgaatgccaaccccagccggggcttcctgctgcctgacagtgatgtggagattgacctggagctgtttgtgaacaagatgacagccaccaagctgaacagcggggaggacaagattgaggacatcctggtgctgcacctggaccggggcaaggactacttcctgtctgtgtctggcaactacctgcccagctgcttcggcagccccatccacaccctgtgctacatgagggagcccatcctggacctgcccctggagaccatcagcgagctgaccctgatgcctgtgtggacaggagatgatggcagccagctggacagccccatggagatccccaaggagctgtggatgatggtggactacctgtacagaaatgctgtgcagcaggaggacctcttccagcagcccggcctgcggagtgaatttgagcacatccgggactgcctggacaccggcatgattgacaacctgagcgccagcaaccacagcgtggccgaggccctgctgctcttcctggagagcctgcctgagcccgtcatctgctacagcacctaccacaactgcctggagtgcagcggcaactacacagccagcaagcaggtgatcagcaccctgcccatcttccacaagaatgtgttccactacctgatggccttcctgcgggagctgctgaagaacagcgccaagaaccacctggatgagaacatcctggccagcatcttcggcagcctgctgctgagaaatcctgctggccaccagaagctggacatgacagagaagaagaaggcccaggagttcatccaccagttcctgtgcaaccccctgtag

SEQ ID NO: 111818 - DNA, 2250 bp, Artificial Sequence
  derived and/or modified sequence
atgtctgctgctgctggcagccgggagaggaacacagctgggggcagcaactttgatggcctgcggcccaacgggaagggcgtgcccatggaccagagcagccggggccaggacaagccagagagcctgcagccccggcagaacaagagcaagtctgagatcacagacatggtgcgcagcagcaccatcaccgtgtctgacaaggcccacatcctgtccatgcagaagtttggcctgcgggacaccatcgtgaagagccacctgctgcagaaggaggaggactacacctacatccagaacttccgcttctttgctggcacctacaacgtgaatggccagagccccaaggaatgtctgcggctgtggctgagcaatggcatccaggccccagatgtgtactgtgtgggcttccaggagctggacctgagcaaggaggccttcttcttccatgacacccccaaggaggaggagtggttcaaggctgtgtctgagggcctgcacccagatgccaagtatgccaaggtgaagctgatccggctggtgggcatcatgctgctgctgtatgtgaagcaggagcacgccgcctacatcagcgaggtggaggccgagaccgtgggcaccggcatcatgggccgcatgggcaacaagggcggcgtggccatccgcttccagttccacaacaccagcatctgtgtggtgaacagccacctggccgcccacatcgaggagtatgaaagaagaaaccaggactacaaggacatctgcagcaggatgcagttctgccagcctgaccccagcctgccccccctgaccatcagcaaccatgatgtgatcctgtggctgggggacctgaactaccgcatcgaggagctggatgtggagaaggtgaagaagctgattgaggagaaggacttccagatgctgtatgcctatgaccagctgaagatccaggtggccgccaagacagtgtttgagggcttcacagaaggagagctgaccttccagcccacctacaagtatgacaccggcagtgatgactgggacaccagcgagaagtgccgggccccagcctggtgtgaccgcatcctgtggaagggcaagaacatcacccagctgagctaccagagccacatggccctgaagaccagtgaccacaagcctgtgtcctctgtgtttgacatcggcgtgcgggtggtgaatgatgagctgtacaggaagaccctggaggagatcgtgcgcagcctggacaagatggagaatgccaacatccccagcgtgtccctgagcaagcgggagttctgcttccagaatgtgaagtacatgcagctgaaggtggagagcttcaccatccacaacggccaggtgccctgccactttgagttcatcaacaagccagatgaggagagctactgcaagcagtggctgaatgccaaccccagccggggcttcctgctgcctgacagtgatgtggagattgacctggagctgtttgtgaacaagatgacagccaccaagctgaacagcggggaggacaagattgaggacatcctggtgctgcacctggaccggggcaaggactacttcctgtctgtgtctggcaactacctgcccagctgcttcggcagccccatccacaccctgtgctacatgagggagcccatcctggacctgcccctggagaccatcagcgagctgaccctgatgcctgtgtggacaggagatgatggcagccagctggacagccccatggagatccccaaggagctgtggatgatggtggactacctgtacagaaatgctgtgcagcaggaggacctcttccagcagcccggcctgcggagtgaatttgagcacatccgggactgcctggacaccggcatgattgacaacctgagcgccagcaaccacagcgtggccgaggccctgctgctcttcctggagagcctgcctgagcccgtcatctgctacagcacctaccacaactgcctggagtgcagcggcaactacacagccagcaagcaggtgatcagcaccctgcccatcttccacaagaatgtgttccactacctgatggccttcctgcgggagctgctgaagaacagcgccaagaaccacctggatgagaacatcctggccagcatcttcggcagcctgctgctgagaaatcctgctggccaccagaagctggacatgacagagaagaagaaggcccaggagttcatccaccagttcctgtgcaaccccctgtag

SEQ ID NO: 111819 - DNA, 2487 bp, Artificial Sequence
  derived and/or modified sequence
atggaccagagcgtggccatccaggagaccctggccgagggggagtactgtgtgattgctgtgcagggcgtgctgtgtgagggggacagccggcagagccggctgctgggcctggtgcgctaccgcctggagcacggcggccaggagcacgccctcttcctgtacacccacaggaggatggccatcactggagatgatgtgtccctggaccagatcgtgcctgtgtcccgggacttcaccctggaggaggtgtccccagatggagagctgtacatcctgggcagtgatgtgacagtgcagctggacacagctgagctgagcctggtgttccagctgcccttcggcagccagaccaggatgttcctgcacgaggtggcccgggcctgccccggctttgacagcgccacccgggaccctgagttcctgtggctgagccgctaccgctgtgccgagctggagctggagatgcccaccccccggggctgcaacagcgccctggtgacctggccaggctacgccaccatcggcggcggccgctaccccagcaggaagaagcgctggggcctggaggaggcccggccccagggcgccggctctgtgctcttctggggcggggccatggagaagacaggcttccggctgatggagcgggcccatggaggcggctttgtgtggggccgcagcgccagagatggaagaagagatgaggagctggaggaggccggccgggagatgtctgctgctgctggcagccgggagaggaacacagctgggggcagcaactttgatggcctgcggcccaacgggaagggcgtgcccatggaccagagcagccggggccaggacaagccagagagcctgcagccccggcagaacaagagcaagtctgagatcacagacatggtgcgcagcagcaccatcaccgtgtctgacaaggcccacatcctgtccatgcagaagtttggcctgcgggacaccatcgtgaagagccacctgctgcagaaggaggaggactacacctacatccagaacttccgcttctttgctggcacctacaacgtgaatggccagagccccaaggaatgtctgcggctgtggctgagcaatggcatccaggccccagatgtgtactgtgtgggcttccaggagctggacctgagcaaggaggccttcttcttccatgacacccccaaggaggaggagtggttcaaggctgtgtctgagggcctgcacccagatgccaagtatgccaaggtgaagctgatccggctggtgggcatcatgctgctgctgtatgtgaagcaggagcacgccgcctacatcagcgaggtggaggccgagaccgtgggcaccggcatcatgggccgcatgggcaacaagggcggcgtggccatccgcttccagttccacaacaccagcatctgtgtggtgaacagccacctggccgcccacatcgaggagtatgaaagaagaaaccaggactacaaggacatctgcagcaggatgcagttctgccagcctgaccccagcctgccccccctgaccatcagcaaccatgatgtgatcctgtggctgggggacctgaactaccgcatcgaggagctggatgtggagaaggtgaagaagctgattgaggagaaggacttccagatgctgtatgcctatgaccagctgaagatccaggtggccgccaagacagtgtttgagggcttcacagaaggagagctgaccttccagcccacctacaagtatgacaccggcagtgatgactgggacaccagcgagaagtgccgggccccagcctggtgtgaccgcatcctgtggaagggcaagaacatcacccagctgagctaccagagccacatggccctgaagaccagtgaccacaagcctgtgtcctctgtgtttgacatcggcgtgcgggtggtgaatgatgagctgtacaggaagaccctggaggagatcgtgcgcagcctggacaagatggagaatgccaacatccccagcgtgtccctgagcaagcgggagttctgcttccagaatgtgaagtacatgcagctgaaggtggagagcttcaccatccacaacggccaggtgccctgccactttgagttcatcaacaagccagatgaggagagctactgcaagcagtggctgaatgccaaccccagccggggcttcctgctgcctgacagtgatgtggagattgacctggagctgtttgtgaacaagatgacagccaccaagctgaacagcggggaggacaagattgaggacatcctggtgctgcacctggaccggggcaaggactacttcctgtctgtgtctggcaactacctgcccagctgcttcggcagccccatccacaccctgtgctacatgagggagcccatcctggacctgcccctggagaccatcagcgagctgctggcctacctggccgcctactgctttgagacccagctggtgaccaagagcctcatctag

SEQ ID NO: 111820 - DNA, 2982 bp, Artificial Sequence
  derived and/or modified sequence
atggaccagagcgtggccatccaggagaccctggccgagggcgagtactgcgtgatagccgttcagggcgtgctctgtgaaggcgacagtcggcagagccgtctgctagggctggtgagatacagactggaacatgggggccaagagcatgcgctctttttgtatacacatcggagaatggctatcacaggcgatgacgtgagtctcgaccagatcgtgcccgtctccagagattttacgctggaagaggtgtcaccagacggggagctgtacatactggggtccgacgtgaccgtccagctggatactgctgaacttagcttggtgttccagcttccattcggaagtcaaacgcggatgtttctgcatgaagtggcccgggcgtgcccaggatttgactctgctacacgggacccagagtttctgtggctctcccggtaccgatgcgcagagcttgagttagaaatgccaactcctagagggtgcaattccgctctcgttacctggcccggatacgccaccataggcggaggccggtacccttctcggaaaaaaaggtgggggttggaggaagctagaccacagggcgccggatctgtgctattttggggaggggccatggagaagactggatttcgtttgatggagcgggcccacgggggaggatttgtttggggtcgctctgcacgcgatggtcgacgtgacgaggaactggaggaggcagggagggagatgtccgccgccgctggctccagggagcgcaacactgcaggaggctccaattttgacggcctgcgtccgaacggaaagggcgtcccaatggatcagagttcccggggacaggataagcctgaatctctacagcccaggcaaaacaaaagtaaatctgaaattacagatatggtgcgctcaagcaccattaccgtgtctgacaaagcccacattttatccatgcagaagtttggcctacgggacacaattgtgaaatcccacctgcttcagaaggaggaagattacacatacatccaaaatttcaggttttttgccggcacctacaacgttaacgggcagtcacctaaggaatgcctgcgcctgtggctttctaacggcattcaggcgcctgacgtttattgcgtggggttccaggaactggatctaagtaaagaggcctttttcttccacgacacgcccaaggaggaggagtggttcaaagcagtgtctgaggggcttcacccagatgccaaatatgctaaagtgaagttaatcaggctggttggaataatgcttctgctgtatgtcaagcaggagcatgccgcttacatttccgaagtagaagcagagaccgtcgggacaggtatcatgggcagaatgggtaacaagggcggcgtggccatccgctttcagttccacaatacaagcatttgcgtggttaatagccatttggcggcccacatcgaagagtacgaaaggagaaaccaggattataaagacatttgctctcgcatgcaattctgtcagcctgacccatccctgcctccactgaccatatcgaatcatgacgtaatcctgtggctgggagacctgaactacaggatcgaagaattagatgtggagaaagtcaaaaaacttatagaggaaaaagattttcagatgctgtacgcctacgatcagctgaaaattcaggtggccgcgaaaactgtctttgaggggtttacggaaggcgaactgacctttcagcctacatacaaatacgacactggatccgatgattgggacacctcagaaaagtgccgcgcccccgcctggtgcgacaggattctgtggaaggggaaaaatatcacacagctgtcctatcagagtcacatggcactgaagacttctgaccacaagccagtctctagcgtgttcgacatcggtgtgagagtcgttaacgacgagctatacagaaaaacacttgaggagattgttcggtctcttgataagatggaaaatgcaaacatcccttccgttagcttgtctaagcgcgagttctgttttcagaatgtcaaatacatgcagctaaaggtcgaatccttcactatccataatgggcaggtgccatgtcactttgagttcataaataagcctgacgaggagtcctactgcaaacagtggttgaacgccaatccctcgaggggcttcctgcttcctgactccgacgttgagattgatttggagctctttgtgaataaaatgaccgctacaaagctaaactcgggcgaggacaaaattgaggacattctagtgctccatctagaccggggcaaggattacttcctgtccgtttccgggaactacctgccaagttgtttcggcagtccaatccatacgttgtgttacatgcgtgaacccattctggacctgccccttgagacgatatcggagctgactcttatgcccgtttggactggtgatgatggcagtcaattagattctcccatggaaattcccaaggagctctggatgatggtcgattacctgtataggaatgctgtccaacaggaggatctgttccaacagcccgggttgcgctctgagttcgagcatatcagggactgtctggacactggaatgattgacaatctttccgccagcaaccactcagtggcagaggccctcttacttttcttggaaagcctgcccgaaccagttatctgctacagtacataccacaactgtctggagtgcagtggcaattatactgcaagcaagcaggtgatatctacactgcctatcttccacaaaaatgtgttccactacttaatggccttcctgcgagaactactcaaaaacagtgctaaaaaccacctggatgagaacatattggccagtatatttggatcccttttgttgagaaatcccgcagggcaccaaaaactggatatgacagagaaaaagaaggcccaagaattcattcatcagtttctgtgcaatccactttag

SEQ ID NO: 111821 - DNA, 2982 bp, Artificial Sequence
  derived and/or modified sequence
atggaccagagcgtggccatccaggagaccctggccgagggcgagtattgcgttattgctgtgcagggagtcctgtgcgagggcgacagccgtcagtccaggttgctggggcttgttaggtatcgcttggagcacgggggacaggagcatgccctctttctgtatacccatcgccggatggcgatcactggagacgatgtgagcctggaccagatagtacctgtgtcgcgggatttcactctggaggaggtctcacccgacggcgagttatatattctcggctccgatgtcaccgttcagctagataccgcagagctgagtctggtctttcagttacctttcggcagccagactagaatgtttcttcacgaagtggcaagagcatgtccaggcttcgactcagctactcgagatcctgagtttctctggctttcacgctacaggtgcgccgaactcgaacttgagatgcctaccccacgagggtgcaactctgccctggtgacgtggccaggatacgccactatcggaggcggtagataccctagtcgcaaaaagagatggggccttgaggaggctagacctcaaggagccgggagtgtgctgttctggggtggagcaatggagaaaacaggattcaggctcatggaaagggcacacggcgggggcttcgtgtggggacgaagcgcacgcgatgggaggagagatgaggagctcgaggaggccggccgcgaaatgtccgcagccgcggggagtcgcgagcgcaataccgctggggggagcaattttgatggtctaagacctaacggcaagggagttccaatggaccagtccagtcgtggccaggataaacctgaaagtctccagcccagacagaataagagcaaatcagagataaccgacatggtgaggtcatctacaatcacggtctcagacaaagcacacattctttctatgcagaaatttgggctcagggatactatcgtgaagagtcatctcctccagaaggaggaggactacacatacattcagaacttccgtttctttgctgggacctacaatgtgaatgggcagagccctaaggagtgcctgcggctgtggttgagcaacggcattcaggctcctgacgtgtactgcgtgggttttcaggaactggacctctctaaggaggcatttttctttcatgatacccctaaagaggaggaatggtttaaggccgtatcggagggacttcaccccgatgcaaaatacgctaaagtcaagctcatccggctcgttggaattatgttgttgctgtacgtgaaacaggaacatgccgcctatataagcgaggtggaggctgaaactgtcggaaccgggattatgggtaggatggggaacaagggcggagtggcaatacggtttcagtttcataatactagcatttgtgtggtcaactcccacctggccgcacacatagaggaatacgagcgcagaaaccaggactacaaggatatctgctcaaggatgcagttttgccagcctgatccatctcttccccccctgacgatctcaaaccacgatgtcattctgtggttaggggacctgaactatagaattgaagagctggacgtggagaaggtgaaaaaactgatcgaggagaaagacttccaaatgctttacgcgtacgaccaacttaagattcaggtggccgctaaaactgtgtttgaaggattcaccgaaggagaactgactttccagcccacttacaaatacgacacagggagcgatgattgggacacttctgagaagtgtagagcccccgcctggtgcgaccggatcctgtggaaaggaaagaatattacacagctgtcttatcagagccatatggctttgaaaacatctgaccataagcctgtctcctctgtcttcgacattggtgtgcgggtggtcaacgacgaattgtaccgcaagaccctggaggagatagtgaggagcctggataagatggagaacgccaatataccctccgtttctctgtctaaacgcgagttctgtttccaaaatgtaaaatacatgcagctcaaagtggagtcttttacgatccacaacggtcaggtaccttgccacttcgagtttattaataaacctgatgaggaaagttattgtaaacagtggctaaatgccaatccttccaggggctttctcctccccgattcagacgtggagatcgaccttgaactgtttgttaacaaaatgacagccaccaaactgaattccggtgaggataaaatcgaggacatcctggtgctccacttggatcgtggcaaggactacttcctgagcgtttcagggaattatctccccagttgtttcggtagtcctatacacacgctgtgttacatgcgcgagcctatcctcgatctccctcttgaaaccatcagcgagctgacactgatgcctgtctggaccggcgacgacggaagccagctggatagtcctatggaaatacctaaagagttatggatgatggtggattatctttatcgcaacgccgtgcagcaggaagacttatttcaacaacctgggctgaggtccgaattcgagcacataagggactgcctggacaccggaatgatcgacaaccttagcgcaagtaaccattccgttgctgaggccctgctgctctttttagagagcctgcctgaacctgttatttgttactcaacttaccacaactgcctagagtgttctggtaattacaccgccagcaagcaagtaatttccaccctaccaatctttcataagaatgtgtttcactacctgatggcctttctgagagaactgttgaagaattcggctaagaatcatctggatgaaaatatactagccagtatcttcggatcactacttttacgcaatcccgcaggccaccagaaattagacatgacagaaaagaaaaaggcacaggagtttatacatcaatttctgtgcaaccccctgtag

SEQ ID NO: 111822 - DNA, 2250 bp, Artificial Sequence
  derived and/or modified sequence
atgagcgccgccgccggcagccgggagcggaacaccgccggcggctctaacttcgatgggctccggccaaatggcaagggcgtcccgatggaccagagttctcggggacaggataaacctgagtcacttcagccaagacaaaacaagagtaagagtgaaatcacagatatggttcgatcctcaacaatcacagtgtcagataaggcccacatactgtctatgcagaaattcgggttgagagacacgatcgtgaaaagtcacctgttacagaaagaggaagattatacttacatccagaattttcgcttctttgctgggacctacaatgtcaatggacagtcacctaaagaatgtctacgcctctggttaagtaatgggatccaagcccccgacgtgtactgcgtaggtttccaggagctcgacctaagcaaggaggccttcttttttcacgatacccccaaggaagaagaatggtttaaagcagtcagtgaagggctgcatcctgacgccaaatacgccaaggttaaactcatcaggcttgtggggattatgctgctgttgtatgtgaaacaggaacatgcagcctacattagtgaggtcgaggccgagacggtgggcaccggaatcatggggcgaatgggcaataaggggggcgtggcaattcgtttccagtttcacaacacctctatctgtgtagttaacagtcacctcgccgctcacattgaggagtatgagagaaggaatcaggactacaaggatatttgctccagaatgcaattttgtcagcccgatccatcccttccacccctcactatcagcaaccacgacgtgattctgtggcttggagacttaaattataggatcgaggaacttgacgtagagaaagtaaagaaattgattgaagagaaagatttccagatgctgtatgcttatgaccagctcaagattcaggttgctgcaaagacggtgttcgagggatttactgaaggagaactcacatttcagcctacctacaagtatgacacagggtccgacgattgggacacaagtgaaaagtgccgcgctccagcctggtgcgacagaatcctgtggaagggaaaaaacatcacacaactatcctaccagtcgcatatggctctcaagacatccgaccataagcccgtgtcgagcgtgttcgacatcggcgtgagagtggtcaatgatgagttgtaccgaaaaaccctagaggaaatcgtgcggtcactcgacaaaatggaaaacgccaacataccaagcgtgtccttgagcaagcgggagttttgcttccagaacgtcaagtacatgcagctgaaagttgaaagcttcacgatccacaacggacaggtgccatgtcatttcgaattcatcaacaagcccgatgaggaatcctattgtaagcagtggcttaatgcaaacccgagccgaggctttctgctcccagattctgatgttgagattgatctggagctgttcgttaacaaaatgactgccacaaagctaaacagtggggaagataagattgaagatatcttagtgctgcatctggacagaggaaaagactatttccttagcgtcagtggaaattacctcccttcatgctttggcagccccatccacacactctgttatatgagagagccaatactggacttacccttagaaaccatcagtgagctgactctgatgccagtgtggaccggtgacgatggcagtcagcttgattcccccatggagatccccaaggagctgtggatgatggtggattacttataccgaaacgctgtgcagcaggaggatttgtttcaacagcccgggctgagaagcgagtttgaacacattagagattgtctcgacacaggtatgattgacaacctgtccgcctctaatcatagtgttgccgaggcactcctgttgtttctggaaagcctccctgaacccgtgatatgttattcgacttaccacaactgtctggagtgttcaggcaactacaccgcctctaagcaggtcatctccaccctacctatctttcacaagaatgtgttccactacctcatggcgttccttagggaattgctcaagaactccgcaaaaaaccatttggatgagaacattctggccagcatttttggtagtctactgctcagaaaccccgccggacatcagaaactggacatgaccgaaaaaaagaaggcccaggaattcatccatcagtttttgtgtaaccccctgtag

SEQ ID NO: 111823 - DNA, 2487 bp, Artificial Sequence
  derived and/or modified sequence
atggaccagagcgtggccatccaggagaccctggccgagggcgagtactgcgtcattgcggtgcagggggtcttatgcgaaggtgacagcagacagtctcgacttctgggcctcgtgcggtatcggctggaacacgggggtcaggagcatgccctttttctttacacgcatagacgtatggccattactggcgatgacgtctctctcgaccaaattgtgcctgtttcacgtgatttcacgcttgaagaggtgagccctgatggagagctttatatcctggggagcgacgtgacagtccagcttgacacagctgagctctctctggtctttcagctgccttttggctcccaaaccaggatgttcctccacgaagtcgccagggcttgccccggctttgacagcgccaccagggatccggagtttttgtggttgagccgttatcgctgcgccgaactggagctggaaatgcccacaccccggggatgcaattccgcgctcgtgacgtggccaggctacgccaccatcggcggaggaagatacccttcacgtaagaaacgttggggtctggaggaggccagacctcaaggagctggatccgtcttgttttggggaggagctatggaaaagacagggttcaggctcatggaacgagcccatggcgggggcttcgtttggggaaggtccgcaagggacggtagaagggatgaagaactcgaggaggccggacgcgagatgtcagcagcggccggcagccgggaacgcaacacagccggaggctctaattttgacggcttacgaccaaacgggaaaggggttccgatggaccagagttcccggggtcaggataaacctgaatcgctgcagccacgccagaacaagtccaaatccgagatcacagacatggtgcgcagcagcaccattactgtgtctgacaaagcccacatcttaagtatgcagaagttcggcttgcgtgacactattgttaagtcccatcttttgcagaaagaggaagattacacctacatccagaattttcgattcttcgctgggacctataatgtaaatggccaatctccgaaggagtgtctcaggctgtggctgagcaatggtattcaggcgccagatgtttactgtgttggttttcaggaactggacctgagcaaagaggcatttttctttcatgatacaccaaaagaggaagagtggttcaaggcagtcagtgaggggctgcatcctgatgccaagtacgcaaaagtgaagcttatccgactcgttggcattatgctactactttacgtgaagcaagagcatgctgcgtatatatctgaagtcgaagctgagactgtaggcactgggattatgggacgcatggggaacaagggcggggtggccattaggttccagtttcacaacacatccatttgtgtggtcaattctcatcttgctgcgcacatcgaggaatacgagagaaggaaccaggattataaggatatttgctcccgcatgcagttctgccagccggatcctagtctgcctccgctgacgatctctaaccacgacgtaatcctctggctcggcgacctgaactacagaatcgaggagctggatgtggagaaggttaagaagttaattgaggagaaggattttcaaatgctgtacgcctacgatcagctaaagatccaggttgcagctaagaccgtcttcgaagggttcacggagggggagctcaccttccaacctacgtacaaatatgacacgggcagcgacgattgggataccagcgagaaatgtcgagctccggcttggtgcgaccgcattctctggaaaggcaaaaatatcacacagcttagttaccaatctcacatggcactgaaaacctctgaccataagccagtgtcttccgtctttgatatcggtgtacgcgttgtgaacgacgagttgtacagaaaaactctggaagagatcgtgagaagtctcgataagatggagaatgctaacatcccatcggtgtccttgtccaaacgggagttttgtttccagaatgtgaagtacatgcagctgaaagtggagagctttaccattcacaacggccaggttccctgccattttgaattcataaacaagccagatgaagagtcgtactgcaagcagtggctgaacgccaatccatcccgtggcttcctactcccggattcagacgtcgaaatagacttggaactttttgtcaataaaatgaccgctacgaaactcaatagtggcgaagataagatcgaagacatccttgtattgcatttggacaggggtaaggattatttcttaagcgtgagtggtaattacttaccaagttgtttcgggagccctattcacactctctgttatatgcgggaacctatcctcgacctccccctggaaacaatatcggagttgttggcatacctggcagcctactgtttcgagacacagctcgttacgaaaagtttgatttag

SEQ ID NO: 111824 - DNA, 2982 bp, Artificial Sequence
  derived and/or modified sequence
atggatcaatcagtggcaatacaggaaaccctagcggagggcgagtactgtgtgatcgcagtacagggcgttctctgtgaaggcgactctagacagagtaggcttttgggtcttgtaaggtataggctggagcatggcggacaggaacacgctttgttcctttacacgcatcggaggatggcaattaccggggatgacgtgagcctggaccaaatcgtgccagtatcgcgcgacttcacgcttgaagaggtaagtcctgatggagagctgtatatcctgggatcagacgttaccgtccaattggacactgccgagcttagcctagtgttccaactgccgtttggctcccagaccaggatgtttctccacgaagtcgctcgggcttgccccggtttcgatagcgccacacgcgaccctgaattcctgtggttgtctcgttaccgctgtgcagaactggaactggaaatgccgacacctcggggttgcaattccgctctggttacttggcccggatacgccacgatcggagggggtagatatccttctaggaaaaagagatggggattagaagaggcacgtcctcagggcgcaggatccgtgctcttctggggcggagctatggaaaagacgggctttaggctgatggaaagagcccacggcggagggtttgtgtggggacgcagtgctcgagatggccgtcgggatgaggaactggaagaggcaggaagggaaatgagcgccgctgccggatctcgggaacgcaacacagctggcggatctaatttcgatggtctgaggcctaacggaaagggcgtgccaatggatcaatcaagtagaggacaagacaaacccgagtccttacagccccgacagaataagagcaagtcggagatcacagacatggtccggagctccacaatcactgtcagtgataaagcccatattctcagcatgcaaaaattcggtctgcgcgataccatcgtaaaatctcacctgctgcaaaaagaggaggattacacttacatccaaaacttcaggttctttgctggtacttataacgttaacggtcaatctcctaaggaatgcctgcggctttggctgtccaacggaatccaggccccagacgtctattgtgttggcttccaggagctggatctgagtaaggaggccttcttttttcacgatacccctaaggaagaggagtggttcaaagccgtgtctgaaggcctgcatcccgacgctaagtacgccaaagtgaagctcatacgactagtgggtattatgttgctgctgtacgtaaaacaggaacacgcagcctatatcagcgaagttgaggccgaaacagttggtactggcattatgggcaggatgggcaataagggcggagtcgcaatcaggtttcagtttcataataccagtatctgcgtggttaattcacaccttgccgcacacatagaagagtacgaacgcagaaatcaggattacaaagatatctgctcgcggatgcagttctgccaacccgaccctagtctgccaccactgacaatctcaaatcacgacgtcatcttgtggctgggcgacctgaactacaggatagaagagctggatgtagaaaaagtgaagaagcttattgaggagaaagacttccagatgctgtatgcgtacgaccagctgaagattcaggtggccgctaagactgtcttcgagggcttcactgaaggagaactcacctttcagcctacttacaagtacgatacgggcagcgatgactgggacaccagtgagaagtgcagagcccctgcatggtgcgaccgaattctctggaaaggtaaaaacatcacgcagctctcctatcagtcacacatggctctaaaaacgtccgatcataaacccgtatcctccgtctttgatatcggggtgcgcgtagtgaatgatgagctttaccggaaaaccctcgaggaaattgtgcgctcgctcgacaagatggagaacgccaacatcccaagcgttagcctgagtaaaagggagttctgcttccagaacgtaaagtatatgcagctgaaagtggagtcgttcacaatccacaatggacaggtgccctgtcattttgaattcattaataagccagatgaggaatcctactgtaagcaatggctcaatgcaaacccctctaggggcttcctactgcccgactccgatgtggagatcgacctagaactgttcgttaacaaaatgactgctactaagcttaattcaggagaggataagatcgaggacattttggtgttgcatcttgatcggggtaaagactacttcttgtcagttagtggtaattacctcccaagctgttttggaagtcctatccacacgctatgctacatgcgcgaaccaatcctggatctgcccctggagactatcagcgagctgaccctgatgccagtttggaccggcgatgatggctcccaattagacagtcctatggagattcctaaggaactttggatgatggttgattatctttacagaaacgcggtgcagcaggaagacttatttcagcagccgggtctgagaagcgaattcgagcacattcgcgactgtctcgataccgggatgatcgacaacctatcggcatctaatcattcagtggccgaggccctactgcttttcttggagagccttcccgaacctgttatctgctacagcacttatcataactgcttggaatgctcaggcaattacaccgctagcaaacaggtcattagcaccctcccaatatttcataagaacgtgtttcattacctgatggcgttcttaagagagctgttgaaaaattcagcaaagaaccatcttgatgaaaacatcttagcatccatctttggatctttgctacttcgaaatcctgcaggccaccagaaactcgacatgaccgagaagaaaaaggcacaggagtttatccatcaattcctttgtaatcccctttag

SEQ ID NO: 111825 - DNA, 2982 bp, Artificial Sequence
  derived and/or modified sequence
atggatcagagcgtcgcaattcaggagaccctggctgaaggcgaatattgtgtgattgcagtacagggggtgctgtgcgagggggacagtcgccagagccggctgctgggtctggtccggtacagactggagcatggagggcaggagcacgccctgtttctgtacacacataggagaatggccattaccggtgatgacgtatccctggaccagatcgtccccgttagccgcgacttcaccctggaggaagtgtcccccgatggtgaactctacatacttggaagcgatgtgacggtccaattagacacagcggagctgtcactggtgtttcagctccccttcggctcacagacacgaatgttccttcatgaagtggctagagcatgccccggatttgactcagccacacgcgatcctgagttcctgtggttgagccgttacagatgcgccgagctcgaacttgaaatgcccactccacgtgggtgtaatagtgctctagtcacttggcccggatacgctactatcggaggcggacggtatccctcccggaagaagcggtggggcttggaagaggcccgaccacagggggctgggtccgtgctgttttggggcggagcgatggagaagaccgggtttcgactcatggaaagggctcacggcggtggcttcgtctggggacgttcagctcgggatgggaggagagacgaagaactcgaggaagccggacgagagatgtctgcggctgcaggctcacgcgaacgcaatactgccggaggctccaacttcgatggtctgaggccaaacgggaagggcgtcccaatggaccagtcaagtaggggtcaggataagccagagagcctccagcccaggcagaacaagagcaaatcggagattacagatatggtgcggtctagcacaattacagtcagtgataaggcacacatcctgtctatgcagaagtttgggttacgagatactatcgtgaagtctcaccttctgcagaaagaggaggattatacttacatccagaatttcaggttctttgctggtacttacaatgtgaacggccaaagccccaaggaatgtctgcgtctttggctcagcaatggcatacaggctcctgacgtttattgtgttggattccaggagctggatctgagcaaggaggcattcttttttcatgacacgccaaaggaagaggagtggtttaaggccgtgagcgaggggctgcaccctgacgcgaagtatgcaaaggtcaagctgattcgattagtcgggataatgctgctgctatatgtgaagcaggaacatgccgcatatatctccgaagtcgaagccgaaactgtcggcacagggatcatggggagaatggggaacaagggcggagtcgccattcgctttcagtttcacaacacatccatttgcgttgtcaactctcatctcgccgcacatattgaagagtatgagagaaggaaccaagattataaggacatatgtagccggatgcaattctgccaacccgacccatccctcccacctctcacaatctccaaccacgatgtcatcctttggctcggcgacctcaactatcgaatagaggaactggacgtcgagaaggtgaaaaagctcatcgaggagaaggactttcagatgctgtacgcctacgatcagctgaagattcaggtggccgctaaaactgtattcgagggattcacggaaggcgagttgaccttccagcccacttataagtacgacacaggttcagatgattgggacacctctgaaaaatgccgggcacctgcctggtgtgaccgtatactgtggaaaggcaagaacatcacccaactgtcatatcagtcacatatggccttaaaaacatctgaccacaaaccagttagctccgtgtttgacatcggagtacgcgtcgtgaatgacgagctgtatcggaagacactggaggaaattgtgcgttccctggataagatggagaatgcaaatatcccgagtgtgagcctgagcaagagagaattttgtttccagaatgtcaagtatatgcagcttaaagtggagagttttacaattcacaatggtcaggtgccctgtcattttgagttcatcaataagcctgacgaggagtcatactgcaagcaatggcttaacgcaaacccatcacggggatttcttctgccagactccgacgtggaaattgacctcgagttgttcgtcaataagatgacggcaaccaagcttaattctggggaagacaagattgaggacatacttgtgctccacctcgaccgcggtaaagattattttcttagtgtgtcgggaaactatttgccttcatgcttcggaagcccaatccacacattgtgctatatgagagaacctatcctggatctgccccttgaaaccatctccgagctcacattgatgcccgtgtggacgggggacgatgggtcacaattggattcccccatggagattccaaaagagctgtggatgatggtggactacctctaccgcaatgccgtccagcaggaggaccttttccagcagccaggtctgcggtcagagttcgaacatatcagggattgtttggataccgggatgatcgacaatctgtcagctagcaaccacagcgttgccgaagccttactcctgtttctggaatcccttcctgagcctgtcatttgctactctacctaccataattgcctagagtgctcaggaaactacaccgccagcaagcaggtgatatccactctcccaatctttcacaagaatgtgttccattaccttatggcattcctgagggaactgttaaaaaatagcgccaaaaaccatctggatgagaatattttggcttctatcttcggaagccttctactccgcaaccccgcaggccaccagaaactggatatgacggagaagaagaaggctcaggaattcattcaccagttcctgtgtaatcctctgtag

SEQ ID NO: 111826 - DNA, 2250 bp, Artificial Sequence
  derived and/or modified sequence
atgtcagccgctgcaggctctagggaacgcaacacagctgggggtagtaatttcgacggtttgagaccgaatggaaagggagttcccatggatcaatcttcccgcggtcaggataagccagagtccttacaaccaaggcagaacaaaagcaaaagtgagatcacggatatggtacggtcttctacgattactgttagtgataaggctcatatcctcagtatgcagaagtttggtctgcgagatactattgtgaagtctcacctgctacagaaagaagaagactatacatacatccagaatttccgcttttttgcaggaacctacaacgttaatgggcagagccccaaggagtgtctgcggctctggctctcaaacggcatacaggcacccgatgtctattgtgtcggcttccaggagttggacctgagtaaggaagcgttctttttccacgatacgcccaaagaggaggaatggtttaaagcagtgagtgaaggcttacacccggatgccaaatatgccaaggtcaagctgatcaggcttgttgggatcatgctgctgctctatgtcaaacaggagcatgccgcatatatctccgaggtagaggccgagaccgtgggtacaggtattatggggaggatgggcaacaagggcggagtggccataaggttccagttccacaacacctctatttgcgtggtgaactcccatctagctgcgcacattgaggaatatgagcgcaggaatcaggattataaagacatctgttcccggatgcagttctgccagcctgacccctccctaccccctctgacaatctccaatcacgatgtgatcctctggctgggcgacctgaactatcgcattgaggagcttgatgttgagaaagtgaaaaagctgattgaggagaaggacttccagatgctgtatgcctatgatcagttaaagattcaggtggccgcaaagacagtttttgaaggcttcacggaaggcgagcttacttttcagcccacttataagtatgatacgggaagtgatgactgggatacttcggagaagtgcagagctccagcctggtgcgatcggattctgtggaaggggaagaacatcacgcagctttcatatcagagccatatggcgctcaaaacaagtgaccacaagcccgtgtccagtgttttcgatattggcgtgcgtgttgtgaatgacgaactttacagaaagaccctcgaagaaattgtcagaagccttgataagatggagaatgccaatattcctagtgtttctctttccaagagagaattctgcttccaaaacgtcaagtacatgcagttaaaggttgagtcttttactatacataacggacaggtgccttgtcactttgaattcattaacaaaccagacgaggagtcctactgcaagcagtggttgaatgctaacccatcaagagggtttctgctgcccgactcggacgtagagatagatctcgagctctttgtcaacaagatgacagccactaagctcaactcaggcgaagacaaaattgaagatatactggtgctgcatctggatagaggaaaggattatttcctctcagtgtcaggaaattatttaccaagttgtttcggtagcccgattcacacactctgttatatgcgcgaacccatcctggacctgccgctggaaaccatttctgagttaaccctcatgcctgtctggactggtgacgacggcagtcagctcgacagtcctatggaaatccctaaagaactttggatgatggttgattatttataccgcaacgctgtccagcaggaagacctgttccaacagcctggtctgcggagcgagttcgagcatattcgcgattgtctcgatacagggatgattgacaatctatccgcatctaaccactctgtggccgaggcgttactgctcttcttggagtctctgccagagccagtcatttgctacagcacctatcataattgcctggagtgctcagggaactacaccgctagcaagcaagttatttccacactgccaatattccacaagaacgtcttccactatcttatggcattcctgagagagttactgaagaacagcgcaaaaaatcatcttgacgagaacattctggcatcaatctttggatcattacttctgcgaaacccagctggacatcaaaagctagacatgacagagaagaaaaaggcgcaggaattcattcaccagtttctatgcaaccccctgtag

SEQ ID NO: 111827 - DNA, 2487 bp, Artificial Sequence
  derived and/or modified sequence
atggaccagtcagttgctatacaggaaaccctggcagagggggagtattgtgtcatagccgttcagggtgtgctgtgtgagggggactctaggcagagccgcctgctgggactggtcaggtaccgactggaacatggcggacaggagcacgccctgtttctatatacccacagacgaatggccataactggtgatgacgtgagcttagatcagattgtcccagtaagtagagactttacgctggaggaagtaagccctgatggcgaactgtacatcctaggttccgatgtgacagtgcagctcgacaccgctgagctctctctggtgtttcagcttcctttcggcagccagaccagaatgtttttgcatgaggtagcacgtgcctgccctggcttcgatagcgctactcgcgaccccgaattcctctggcttagtaggtatagatgcgccgagctggagctggaaatgcctacccctcgtggatgcaactcagcccttgtgacttggccgggatatgccactattggaggaggacggtacccttcaagaaaaaagcgctggggcctggaggaggctagaccccagggggcaggctccgtgctgttctgggggggtgccatggagaagacagggtttaggctgatggagagggcccatggagggggtttcgtctggggccgttcagcacgcgatggcaggagagacgaggagttagaagaggctggtagggagatgtcggcagccgcaggctctcgagagcgaaacacagctggtggctctaactttgatggtctgcgacccaacgggaaaggggtgcctatggatcagagctcccgcggacaggataaacccgaatctttgcaaccaaggcagaataagtcgaaatccgagataaccgacatggtgagatcctctacaataaccgtatccgataaagcccatatcctctctatgcagaagtttggcctgcgagatacaatcgttaagtcgcatctcctacagaaagaggaagactacacctacatccagaacttccgatttttcgcaggcacttacaacgtgaacggccagagtcccaaagaatgcctgcggctctggctgtcaaacggtatccaggcaccagacgtgtattgcgttggatttcaggaattggaccttagcaaagaggcttttttcttccacgacacccccaaggaggaggaatggttcaaagccgtgtccgaaggcttgcatcccgatgccaaatatgccaaggtgaagcttattagactggtcgggatcatgttgttgctgtatgttaaacaggagcatgccgcatatattagcgaggtggaggctgagaccgttgggacaggaatcatggggcgaatggggaataaaggaggcgtggccatcagattccagtttcataatacctcaatctgcgtggttaacagccacctggcagcgcacatcgaggagtatgaacgcaggaatcaggactataaagatatatgctcccgaatgcagttttgtcagccagatccgtcactgcccccacttacgatttctaaccacgatgttatcctatggttaggtgacctgaattacagaatcgaggagctagacgtagagaaggttaagaaactgatcgaggagaaagacttccagatgctgtatgcctacgatcagctgaaaatccaggtggccgctaagacagtgttcgagggttttactgagggagaactgacttttcagcctacatacaaatacgacaccgggagcgacgactgggatacaagcgagaagtgtcgagctcctgcatggtgtgatcggatcctctggaagggaaagaacataactcagttatcttatcaaagccacatggcacttaaaacctccgaccataagccagtgtcctcagtgtttgacatcggcgtgagagtggttaacgacgaactgtatcggaaaacactggaagagatcgtcaggtccttggacaaaatggaaaatgctaatatcccttcagtgtccctctccaaacgggagttctgcttccaaaatgttaagtacatgcaattgaaggtagagtccttcactatacacaatggtcaggtcccatgccattttgaattcatcaataagccagatgaagagtcatactgcaagcagtggctaaacgctaatccaagccgagggttcctcctgccagattcggatgtggagatagatctcgaactgttcgttaacaagatgactgccactaaactcaattctggggaggataaaatagaggacatccttgtgctgcatctagacagggggaaggactatttcttgtctgtatcaggcaattatctgccctcttgctttggcagcccaattcatactctgtgctatatgcgcgagcctatacttgaccttcctctcgagacaatatccgaattgttagcttacctggcggcatactgctttgaaacgcaactcgtaacgaagagcctgatatag

SEQ ID NO: 111828 - DNA, 2982 bp, Artificial Sequence
  derived and/or modified sequence
atggaccagagcgtggccatccaggagaccctggccgagggcgagtactgcgtgatcgccgtgcagggcgtgctgtgcgagggcgacagcagacagagcagactgctgggcctggtgagatacagactggagcacggcggccaggagcacgccctgttcctgtacacccacagaagaatggccatcaccggcgacgacgtgagcctggaccagatcgtgcccgtgagcagagacttcaccctggaggaggtgagccccgacggcgagctgtacatcctgggcagcgacgtgaccgtgcagctggacaccgccgagctgagcctggtgttccagctgcccttcggcagccagaccagaatgttcctgcacgaggtggccagagcctgccccggcttcgacagcgccaccagagaccccgagttcctgtggctgagcagatacagatgcgccgagctggagctggagatgcccacccccagaggctgcaacagcgccctggtgacctggcccggctacgccaccatcggcggcggcagataccccagcagaaagaagagatggggcctggaggaggccagaccccagggcgccggcagcgtgctgttctggggcggcgccatggagaagaccggcttcagactgatggagagagcccacggcggcggcttcgtgtggggcagaagcgccagagacggcagaagagacgaggagctggaggaggccggcagagagatgagcgccgccgccggcagcagagagagaaacaccgccggcggcagcaacttcgacggcctgagacccaacggcaagggcgtgcccatggaccagagcagcagaggccaggacaagcccgagagcctgcagcccagacagaacaagagcaagagcgagatcaccgacatggtgagaagcagcaccatcaccgtgagcgacaaggcccacatcctgagcatgcagaagttcggcctgagagacaccatcgtgaagagccacctgctgcagaaggaggaggactacacctacatccagaacttcagattcttcgccggcacctacaacgtgaacggccagagccccaaggagtgcctgagactgtggctgagcaacggcatccaggcccccgacgtgtactgcgtgggcttccaggagctggacctgagcaaggaggccttcttcttccacgacacccccaaggaggaggagtggttcaaggccgtgagcgagggcctgcaccccgacgccaagtacgccaaggtgaagctgatcagactggtgggcatcatgctgctgctgtacgtgaagcaggagcacgccgcctacatcagcgaggtggaggccgagaccgtgggcaccggcatcatgggcagaatgggcaacaagggcggcgtggccatcagattccagttccacaacaccagcatctgcgtggtgaacagccacctggccgcccacatcgaggagtacgagagaagaaaccaggactacaaggacatctgcagcagaatgcagttctgccagcccgaccccagcctgccccccctgaccatcagcaaccacgacgtgatcctgtggctgggcgacctgaactacagaatcgaggagctggacgtggagaaggtgaagaagctgatcgaggagaaggacttccagatgctgtacgcctacgaccagctgaagatccaggtggccgccaagaccgtgttcgagggcttcaccgagggcgagctgaccttccagcccacctacaagtacgacaccggcagcgacgactgggacaccagcgagaagtgcagagcccccgcctggtgcgacagaatcctgtggaagggcaagaacatcacccagctgagctaccagagccacatggccctgaagaccagcgaccacaagcccgtgagcagcgtgttcgacatcggcgtgagagtggtgaacgacgagctgtacagaaagaccctggaggagatcgtgagaagcctggacaagatggagaacgccaacatccccagcgtgagcctgagcaagagagagttctgcttccagaacgtgaagtacatgcagctgaaggtggagagcttcaccatccacaacggccaggtgccctgccacttcgagttcatcaacaagcccgacgaggagagctactgcaagcagtggctgaacgccaaccccagcagaggcttcctgctgcccgacagcgacgtggagatcgacctggagctgttcgtgaacaagatgaccgccaccaagctgaacagcggcgaggacaagatcgaggacatcctggtgctgcacctggacagaggcaaggactacttcctgagcgtgagcggcaactacctgcccagctgcttcggcagccccatccacaccctgtgctacatgagagagcccatcctggacctgcccctggagaccatcagcgagctgaccctgatgcccgtgtggaccggcgacgacggcagccagctggacagccccatggagatccccaaggagctgtggatgatggtggactacctgtacagaaacgccgtgcagcaggaggacctgttccagcagcccggcctgagaagcgagttcgagcacatcagagactgcctggacaccggcatgatcgacaacctgagcgccagcaaccacagcgtggccgaggccctgctgctgttcctggagagcctgcccgagcccgtgatctgctacagcacctaccacaactgcctggagtgcagcggcaactacaccgccagcaagcaggtgatcagcaccctgcccatcttccacaagaacgtgttccactacctgatggccttcctgagagagctgctgaagaacagcgccaagaaccacctggacgagaacatcctggccagcatcttcggcagcctgctgctgagaaaccccgccggccaccagaagctggacatgaccgagaagaagaaggcccaggagttcatccaccagttcctgtgcaaccccctgtag

SEQ ID NO: 111829 - DNA, 2250 bp, Artificial Sequence
  derived and/or modified sequence
atgagcgccgccgccggcagcagagagagaaacaccgccggcggcagcaacttcgacggcctgagacccaacggcaagggcgtgcccatggaccagagcagcagaggccaggacaagcccgagagcctgcagcccagacagaacaagagcaagagcgagatcaccgacatggtgagaagcagcaccatcaccgtgagcgacaaggcccacatcctgagcatgcagaagttcggcctgagagacaccatcgtgaagagccacctgctgcagaaggaggaggactacacctacatccagaacttcagattcttcgccggcacctacaacgtgaacggccagagccccaaggagtgcctgagactgtggctgagcaacggcatccaggcccccgacgtgtactgcgtgggcttccaggagctggacctgagcaaggaggccttcttcttccacgacacccccaaggaggaggagtggttcaaggccgtgagcgagggcctgcaccccgacgccaagtacgccaaggtgaagctgatcagactggtgggcatcatgctgctgctgtacgtgaagcaggagcacgccgcctacatcagcgaggtggaggccgagaccgtgggcaccggcatcatgggcagaatgggcaacaagggcggcgtggccatcagattccagttccacaacaccagcatctgcgtggtgaacagccacctggccgcccacatcgaggagtacgagagaagaaaccaggactacaaggacatctgcagcagaatgcagttctgccagcccgaccccagcctgccccccctgaccatcagcaaccacgacgtgatcctgtggctgggcgacctgaactacagaatcgaggagctggacgtggagaaggtgaagaagctgatcgaggagaaggacttccagatgctgtacgcctacgaccagctgaagatccaggtggccgccaagaccgtgttcgagggcttcaccgagggcgagctgaccttccagcccacctacaagtacgacaccggcagcgacgactgggacaccagcgagaagtgcagagcccccgcctggtgcgacagaatcctgtggaagggcaagaacatcacccagctgagctaccagagccacatggccctgaagaccagcgaccacaagcccgtgagcagcgtgttcgacatcggcgtgagagtggtgaacgacgagctgtacagaaagaccctggaggagatcgtgagaagcctggacaagatggagaacgccaacatccccagcgtgagcctgagcaagagagagttctgcttccagaacgtgaagtacatgcagctgaaggtggagagcttcaccatccacaacggccaggtgccctgccacttcgagttcatcaacaagcccgacgaggagagctactgcaagcagtggctgaacgccaaccccagcagaggcttcctgctgcccgacagcgacgtggagatcgacctggagctgttcgtgaacaagatgaccgccaccaagctgaacagcggcgaggacaagatcgaggacatcctggtgctgcacctggacagaggcaaggactacttcctgagcgtgagcggcaactacctgcccagctgcttcggcagccccatccacaccctgtgctacatgagagagcccatcctggacctgcccctggagaccatcagcgagctgaccctgatgcccgtgtggaccggcgacgacggcagccagctggacagccccatggagatccccaaggagctgtggatgatggtggactacctgtacagaaacgccgtgcagcaggaggacctgttccagcagcccggcctgagaagcgagttcgagcacatcagagactgcctggacaccggcatgatcgacaacctgagcgccagcaaccacagcgtggccgaggccctgctgctgttcctggagagcctgcccgagcccgtgatctgctacagcacctaccacaactgcctggagtgcagcggcaactacaccgccagcaagcaggtgatcagcaccctgcccatcttccacaagaacgtgttccactacctgatggccttcctgagagagctgctgaagaacagcgccaagaaccacctggacgagaacatcctggccagcatcttcggcagcctgctgctgagaaaccccgccggccaccagaagctggacatgaccgagaagaagaaggcccaggagttcatccaccagttcctgtgcaaccccctgtag

SEQ ID NO: 111830 - DNA, 2487 bp, Artificial Sequence
  derived and/or modified sequence
atggaccagagcgtggccatccaggagaccctggccgagggcgagtactgcgtgatcgccgtgcagggcgtgctgtgcgagggcgacagcagacagagcagactgctgggcctggtgagatacagactggagcacggcggccaggagcacgccctgttcctgtacacccacagaagaatggccatcaccggcgacgacgtgagcctggaccagatcgtgcccgtgagcagagacttcaccctggaggaggtgagccccgacggcgagctgtacatcctgggcagcgacgtgaccgtgcagctggacaccgccgagctgagcctggtgttccagctgcccttcggcagccagaccagaatgttcctgcacgaggtggccagagcctgccccggcttcgacagcgccaccagagaccccgagttcctgtggctgagcagatacagatgcgccgagctggagctggagatgcccacccccagaggctgcaacagcgccctggtgacctggcccggctacgccaccatcggcggcggcagataccccagcagaaagaagagatggggcctggaggaggccagaccccagggcgccggcagcgtgctgttctggggcggcgccatggagaagaccggcttcagactgatggagagagcccacggcggcggcttcgtgtggggcagaagcgccagagacggcagaagagacgaggagctggaggaggccggcagagagatgagcgccgccgccggcagcagagagagaaacaccgccggcggcagcaacttcgacggcctgagacccaacggcaagggcgtgcccatggaccagagcagcagaggccaggacaagcccgagagcctgcagcccagacagaacaagagcaagagcgagatcaccgacatggtgagaagcagcaccatcaccgtgagcgacaaggcccacatcctgagcatgcagaagttcggcctgagagacaccatcgtgaagagccacctgctgcagaaggaggaggactacacctacatccagaacttcagattcttcgccggcacctacaacgtgaacggccagagccccaaggagtgcctgagactgtggctgagcaacggcatccaggcccccgacgtgtactgcgtgggcttccaggagctggacctgagcaaggaggccttcttcttccacgacacccccaaggaggaggagtggttcaaggccgtgagcgagggcctgcaccccgacgccaagtacgccaaggtgaagctgatcagactggtgggcatcatgctgctgctgtacgtgaagcaggagcacgccgcctacatcagcgaggtggaggccgagaccgtgggcaccggcatcatgggcagaatgggcaacaagggcggcgtggccatcagattccagttccacaacaccagcatctgcgtggtgaacagccacctggccgcccacatcgaggagtacgagagaagaaaccaggactacaaggacatctgcagcagaatgcagttctgccagcccgaccccagcctgccccccctgaccatcagcaaccacgacgtgatcctgtggctgggcgacctgaactacagaatcgaggagctggacgtggagaaggtgaagaagctgatcgaggagaaggacttccagatgctgtacgcctacgaccagctgaagatccaggtggccgccaagaccgtgttcgagggcttcaccgagggcgagctgaccttccagcccacctacaagtacgacaccggcagcgacgactgggacaccagcgagaagtgcagagcccccgcctggtgcgacagaatcctgtggaagggcaagaacatcacccagctgagctaccagagccacatggccctgaagaccagcgaccacaagcccgtgagcagcgtgttcgacatcggcgtgagagtggtgaacgacgagctgtacagaaagaccctggaggagatcgtgagaagcctggacaagatggagaacgccaacatccccagcgtgagcctgagcaagagagagttctgcttccagaacgtgaagtacatgcagctgaaggtggagagcttcaccatccacaacggccaggtgccctgccacttcgagttcatcaacaagcccgacgaggagagctactgcaagcagtggctgaacgccaaccccagcagaggcttcctgctgcccgacagcgacgtggagatcgacctggagctgttcgtgaacaagatgaccgccaccaagctgaacagcggcgaggacaagatcgaggacatcctggtgctgcacctggacagaggcaaggactacttcctgagcgtgagcggcaactacctgcccagctgcttcggcagccccatccacaccctgtgctacatgagagagcccatcctggacctgcccctggagaccatcagcgagctgctggcctacctggccgcctactgcttcgagacccagctggtgaccaagagcctgatctag

SEQ ID NO: 111831 - protein, 577 aa, Artificial Sequence
  derived and/or modified sequence
MRQDAPKPTPAACRCSGLARRVLTIAFALLILGLMTWAYAAGVPLASDRYGLLAFGLYGAFLSAHLVAQSLFAYLEHRRVAAAARGPLDAATARSVALTISAYQEDPAYLRQCLASARALLYPRARLRVLMVVDGNRAEDLYMVDMFREVFADEDPATYVWDGNYHQPWEPAAAGAVGAGAYREVEAEDPGRLAVEALVRTRRCVCVAQRWGGKREVMYTAFKALGDSVDYVQVCDSDTRLDPMALLELVRVLDEDPRVGAVGGDVRILNPLDSWVSFLSSLRYWVAFNVERACQSYFHCVSCISGPLGLYRNNLLQQFLEAWYNQKFLGTHCTFGDDRHLTNRMLSMGYATKYTSRSRCYSETPSSFLRWLSQQTRWSKSYFREWLYNALWWHRHHAWMTYEAVVSGLFPFFVAATVLRLFYAGRPWALLWVLLCVQGVALAKAAFAAWLRGCLRMVLLSLYAPLYMCGLLPAKFLALVTMNQSGWGTSGRRKLAANYVPLLPLALWALLLLGGLVRSVAHEARADWSGPSRAAEAYHLAAGAGAYVGYWVAMLTLYWVGVRRLCRRRTGGYRVQV

SEQ ID NO: 111832 - DNA, 1734 bp, Artificial Sequence
  derived and/or modified sequence
atgcgtcaggatgccccaaaacccacgccagcagcctgccgttgttctggcctggctcggagagtgctcactatcgcatttgctctcttaatattgggccttatgacttgggcctacgcagctggggtgcctttagcctctgataggtacggtctgttggcatttggcctgtatggcgccttcctcagcgcccacctggtggctcagtcattattcgcttatctggagcaccggagagtcgccgcagctgcgaggggtcctctcgacgccgccactgctcgctccgtcgccctgacgatatccgcttaccaagaggacccagcgtatctgagacaatgtctggcttccgcgcgagccctgctctaccctcgagcaagacttcgcgtgctaatggtggtggacggaaacagagctgaagacttgtatatggtcgatatgtttcgggaagtgttcgctgatgaggatcccgcaacctacgtgtgggatgggaattatcaccagccatgggagccagcagcggccggtgccgttggcgccggggcatacagagaagtggaagcggaggatcctggccgattggctgtcgaagccttggtgcggacccgacggtgcgtgtgcgtggcacaaaggtggggcggcaaacgagaagtgatgtacaccgcttttaaggctctcggagactccgtggactacgtccaggtgtgcgatagcgacacgagattggatcctatggccctgctggaactcgtgcgggtcttggacgaggacccacgagtgggggccgtggggggggatgttagaattctaaatcctcttgattcatgggtgtcattcctgagctcactccggtactgggtggcgttcaatgtggaaagagcttgccagagctactttcactgcgtaagctgcatctccggtcctctcggcttgtaccgtaataatttactgcagcagttccttgaagcctggtataatcaaaaattcctgggaacccactgcactttcggggacgacagacacttgaccaatcggatgctctccatgggttatgcaaccaagtacaccagtagatcccgctgctactccgaaaccccttctagctttctgcggtggttgagccagcagacaagatggtctaagtcctattttagggagtggctgtacaatgccctatggtggcatagacatcatgcctggatgacatatgaggccgttgtttcggggttatttcctttttttgtcgccgccactgtgctccgtctgttctatgccggcagaccatgggcactcctgtgggttctgttgtgcgtgcaaggagttgctctggccaaagcagcattcgccgcgtggctccgcggctgtctgaggatggtcctattgtcattgtatgcacccctatatatgtgcggacttttgcctgccaagtttttagctctagtgacaatgaatcaaagcggttgggggacttccggtcgtcgtaagctggcggctaactacgtgccccttctgcccctggccctctgggccctcctccttctcggtgggctggtacgctctgtggcccacgaagcacgcgctgactggtctggaccatctagagctgctgaggcctatcatttagcagccggagctggagcttatgtggggtattgggtcgcgatgttaaccctgtattgggtcggagtcagacgtttatgccggcggaggaccggaggctatagggtgcaagtttag

SEQ ID NO: 111833 - DNA, 2090 bp, Artificial Sequence
  derived and/or modified sequence
gcaagccggagagaagagagagcccggccagacccactgcgatgagacaggacgcgcccaagcccactcctgcagcctgccgctgctccggcctggcccggagggtgctgaccatcgccttcgccctgctcatcctgggcctcatgacctgggcctacgccgccggggtgccgctggcctccgatcgctacggcctcctggccttcggcctctacggggccttcctttcagcgcacctggtggcgcagagcctcttcgcgtacctggagcaccggcgggtggcggcggcggcgcgggggccgctggatgcagccaccgcgcgcagtgtggcgctgaccatctccgcctaccaggaggaccccgcgtacctgcgccagtgcctggcgtccgcccgcgccctgctgtacccgcgcgcgcggctgcgcgtcctcatggtggtggatggcaaccgcgccgaggacctctacatggtcgacatgttccgcgaggtcttcgctgacgaggaccccgccacgtacgtgtgggacggcaactaccaccagccctgggaacccgcggcggcgggcgcggtgggcgccggagcctatcgggaggtggaggcggaggatcctgggcggctggcagtggaggcgctggtgaggactcgcaggtgcgtgtgcgtggcgcagcgctggggcggcaagcgcgaggtcatgtacacagccttcaaggcgctcggagattcggtggactacgtgcaggtctgtgactcggacacaaggttggaccccatggcactgctggagctcgtgcgggtactggacgaggacccccgggtaggggctgttggtggggacgtgcggatccttaaccctctggactcctgggtcagcttcctaagcagcctgcgatactgggtagccttcaatgtggagcgggcttgtcagagctacttccactgtgtatcctgcatcagcggtcctctaggcctatataggaataacctcttgcagcagtttcttgaggcctggtacaaccagaagttcctgggtacccactgtacttttggggatgaccggcacctcaccaaccgcatgctcagcatgggttatgctaccaagtacacctccaggtcccgctgctactcagagacgccctcgtccttcctgcggtggctgagccagcagacacgctggtccaagtcgtacttccgtgagtggctgtacaacgcgctctggtggcaccggcaccatgcgtggatgacctacgaggcggtggtctccggcctgttccccttcttcgtggcggccactgtgctgcgtctgttctacgcgggccgcccttgggcgctgctgtgggtgctgctgtgcgtgcagggcgtggcactggccaaggcggccttcgcggcctggctgcggggctgcctgcgcatggtgcttctgtcgctctacgcgcccctctacatgtgtggcctcctgcctgccaagttcctggcgctagtcaccatgaaccagagtggctggggcacctcgggccggcggaagctggccgctaactacgtccctctgctgcccctggcgctctgggcgctgctgctgcttgggggcctggtccgcagcgtagcacacgaggccagggccgactggagcggcccttcccgcgcagccgaggcctaccacttggccgcgggggccggcgcctacgtgggctactgggtggccatgttgacgctgtactgggtgggcgtgcggaggctttgccggcggcggaccgggggctaccgcgtccaggtgtgagtccagccacgcggatgccgcctcaagggtcttcaggggaggccagaggagagctgctgggccccgagccacgaacttgctgggtggttctctgggcctcagtttccctcctctgcaaaacgagggggtcagcccaagattcttcagtctggactatattgggactgggacttctgggtctccagggagggtatttattggtcagggtgtgggatctgaggagtggagggaaagggtcctgctttctcctcgttcttatttaatctccatttctactgtgtgatcaggatgtaataaagaattttatttattttc

SEQ ID NO: 111834 - DNA, 1734 bp, Artificial Sequence
  derived and/or modified sequence
atgaggcaggatgcccccaagcccaccccagctgcctgccgctgcagcggcctggcccggcgggtgctgaccatcgcctttgccctgctgatcctgggcctgatgacctgggcctatgctgctggggtgcccctggccagtgacagatatggcctgctggccttcggcctgtatggagccttcctgagcgcccacctggtggcccagagcctgtttgcctacctggagcaccggcgggtggccgctgctgcccggggccccctggatgctgccacagcccggtctgtggccctgaccatcagcgcctaccaggaggaccctgcctacctgcggcagtgcctggccagcgcccgggccctgctgtacccccgggcccggctgcgggtgctgatggtggtggatggcaacagagcagaagatctctacatggtggacatgttccgggaggtgtttgctgatgaggaccctgccacctacgtgtgggatggcaactaccaccagccctgggagcctgctgctgctggagctgtgggcgctggggcctaccgggaggtggaggccgaggaccccggccgcctggccgtggaggccctggtgaggacccggcgctgtgtgtgtgtggcccagcgctggggcggcaagcgggaggtgatgtacacagccttcaaggccctgggggacagcgtggactatgtgcaggtgtgtgacagcgacacccggctggaccccatggccctgctggagctggtgcgggtgctggatgaggacccccgggtgggcgctgtgggcggagatgtgcgcatcctgaaccccctggacagctgggtgtccttcctgagcagcctgcgctactgggtggccttcaacgtggagcgggcctgccagagctacttccactgtgtgtcctgcatcagcggccccctgggcctgtacagaaacaacctgctgcagcagttcctggaggcctggtacaaccagaagttcctgggcacccactgcacctttggagatgacagacacctgaccaacaggatgctgtccatgggctacgccaccaagtacaccagccgcagccgctgctacagcgagacccccagcagcttcctgcgctggctgagccagcagacccgctggagcaagagctacttccgggagtggctgtacaatgccctgtggtggcaccgccaccacgcctggatgacctatgaggccgtggtgtctggcctcttccccttctttgtggccgccaccgtgctgcggctcttctacgccggccggccctgggccctgctgtgggtgctgctgtgtgtgcagggcgtggccctggccaaggccgcctttgctgcctggctgcggggctgcctgaggatggtgctgctgagcctgtatgcccccctgtacatgtgtggcctgctgcctgccaagttcctggccctggtgaccatgaaccagagcggctggggcaccagcggccgcaggaagctggccgccaactacgtgcccctgctgcccctggccctgtgggccctgctgctgctgggcggcctggtgcgctctgtggcccacgaggcccgggctgactggagcggccccagcagagctgctgaggcctaccacctggccgccggggccggggcctacgtgggctactgggtggccatgctgaccctgtactgggtgggcgtgcggcggctgtgcagaagaagaactggaggctacagagtgcaggtgtag

SEQ ID NO: 111835 - DNA, 1734 bp, Artificial Sequence
  derived and/or modified sequence
atgcggcaggacgcccccaagcccacccccgccgcctgccggtgctcagggctagccaggagggtgttaacaatcgcctttgcccttctgatcttagggctcatgacatgggcctatgccgctggggtgccccttgcctcagatcggtacggattacttgcttttggactgtacggcgcgtttctgtcagcacacctggtggcccagtcactgtttgcctatttagagcaccggagggtcgctgccgcggccagggggcccctggatgcagctacagcaaggtctgttgccctgaccatttctgcataccaggaggaccctgcttatttgaggcagtgtcttgcatctgcccgagccctcctctaccctagggctaggctacgagtgttaatggtagttgacggaaaccgagccgaagatctctacatggtagacatgttcagagaggtctttgcagacgaagatcctgccacatatgtatgggatggaaactatcaccaaccttgggaacctgcagccgctggagcagttggagctggggcctaccgcgaggtggaagcagaagatcctggcaggctcgccgtggaggcgctggtgagaacgcggagatgcgtttgtgtggcccagagatggggcggtaagcgagaggtgatgtacacagcattcaaagctttgggggacagcgttgactacgtacaagtgtgcgatagtgacaccaggttggatcctatggcacttctcgagctggtgagagtgctggatgaggacccccgcgtaggtgcagtgggcggagacgtccgaatcctcaaccctctcgactcgtgggtgtcatttctaagcagccttagatactgggtggctttcaatgtggagcgggcttgccaatcctactttcattgcgtttcttgcattagcggccctctaggcttgtacaggaataacctactgcaacagttcctggaagcatggtacaatcagaagttcctagggacccactgtaccttcggagacgaccgccatttgacaaataggatgctgtcaatgggctacgccactaagtacacatctaggagccgctgttactctgaaactccatctagtttcctgaggtggctgtcccagcagaccagatggtccaaatcatatttccgggaatggctgtataacgccctatggtggcaccggcaccatgcctggatgacttatgaggccgtggtatctggtttgtttcctttcttcgtcgccgcaaccgtgctgcgcctgttttatgctgggcggccttgggctctgctttgggtactgttgtgtgtccagggggtggccctggccaaggctgcttttgctgcatggttgcggggctgtctaagaatggtacttctatccctgtacgccccactgtacatgtgcggcctcttgccagctaaattcctggctctagtgacgatgaaccagagcggatgggggacctccgggcgaagaaaattggctgcgaattacgtgccattactccccctagcattgtgggccttgctgctgctgggcggtctggtgaggtccgtcgcacatgaagcccgtgcagattggagcgggccatcccgcgcagccgaagcctatcaccttgccgccggggctggcgcctatgtcggatattgggttgcaatgttaacactatattgggtgggagtcaggagactgtgcagaagaagaacggggggttacagggtgcaagtttag

SEQ ID NO: 111836 - DNA, 1734 bp, Artificial Sequence
  derived and/or modified sequence
atgcggcaggacgctcctaaaccaacgcccgcagcctgtagatgttccgggctcgcacgccgtgtactcacaatcgccttcgctcttctcatcctcggtctcatgacgtgggcgtacgctgcaggcgtgccccttgcctccgatcggtacggcctgctcgcttttggattgtacggggcattcctgtctgctcacctggttgcccagagtcttttcgcatacttggaacacaggcgagtcgcggctgccgcaaggggcccattagacgccgctaccgcacggtccgtagcattaactattagcgcctaccaggaagaccccgcttacctacgccagtgtttggcaagcgcacgtgctttactgtatcccagggcccgtttgagggtcctaatggttgtggacgggaacagagctgaggacttatacatggtcgacatgttcagggaggtgttcgctgatgaagatccagctacatacgtgtgggacggaaattatcaccaaccatgggaacctgccgcagccggagccgtaggagcaggcgcttatcgggaagtggaagcagaagatcctggaagattagccgtggaggccctcgttcggacccgtcggtgtgtgtgcgtggcccagagatggggcggaaagcgcgaagtgatgtacacggcatttaaggccctgggtgattcagtggattatgttcaggtctgcgattccgatacacgcctagaccccatggctctcctggaactcgttcgggtcctagacgaagaccccagggtaggggctgtgggcggagatgtgagaatactaaatccgctggacagttgggtttcttttctgagtagcctgcgttactgggtggctttcaatgtagagagggcgtgccagtcttacttccattgcgtgtcatgtatttccggacctttgggcctctaccgtaacaatctactgcagcagtttctggaagcctggtacaaccaaaagtttctgggtactcactgtacatttggtgatgatcggcatttgaccaacagaatgttgagcatgggttacgccactaaatacacctcccggtcacggtgttactcagaaactcctagctccttcctcaggtggctgtcccagcagacgagatggagcaagtcctattttcgggagtggctgtataacgctttatggtggcaccgccatcacgcttggatgacttacgaggccgttgtctccggactgtttcctttttttgtggccgctaccgtgctaaggttgttctacgcgggaagaccatgggccctcctctgggttctgctctgcgtgcagggggtcgcattggccaaggcagcatttgcggcatggctacggggatgtctgcgaatggtactccttagcctctatgctccattgtacatgtgtgggctacttccagcaaaatttctggccctcgtaactatgaaccagtcgggatggggcacttcagggcgacggaaactcgcagccaactatgtccctcttctccctttggcgctctgggcactcctgctgcttgggggtctggtcagaagtgtcgcacatgaggcaagagctgactggtccggtccctccagggccgcagaggcataccatttagccgctggggctggcgcatacgttggttattgggttgcaatgttaaccctgtactgggtcggcgtgaggagactgtgtaggcggcgtacaggcggataccgcgtccaagtatag

SEQ ID NO: 111837 - DNA, 1734 bp, Artificial Sequence
  derived and/or modified sequence
atgagacaggacgcccccaagcccacccccgccgcctgcagatgcagcggcctggccagaagagtgctgaccatcgccttcgccctgctgatcctgggcctgatgacctgggcctacgccgccggcgtgcccctggccagcgacagatacggcctgctggccttcggcctgtacggcgccttcctgagcgcccacctggtggcccagagcctgttcgcctacctggagcacagaagagtggccgccgccgccagaggccccctggacgccgccaccgccagaagcgtggccctgaccatcagcgcctaccaggaggaccccgcctacctgagacagtgcctggccagcgccagagccctgctgtaccccagagccagactgagagtgctgatggtggtggacggcaacagagccgaggacctgtacatggtggacatgttcagagaggtgttcgccgacgaggaccccgccacctacgtgtgggacggcaactaccaccagccctgggagcccgccgccgccggcgccgtgggcgccggcgcctacagagaggtggaggccgaggaccccggcagactggccgtggaggccctggtgagaaccagaagatgcgtgtgcgtggcccagagatggggcggcaagagagaggtgatgtacaccgccttcaaggccctgggcgacagcgtggactacgtgcaggtgtgcgacagcgacaccagactggaccccatggccctgctggagctggtgagagtgctggacgaggaccccagagtgggcgccgtgggcggcgacgtgagaatcctgaaccccctggacagctgggtgagcttcctgagcagcctgagatactgggtggccttcaacgtggagagagcctgccagagctacttccactgcgtgagctgcatcagcggccccctgggcctgtacagaaacaacctgctgcagcagttcctggaggcctggtacaaccagaagttcctgggcacccactgcaccttcggcgacgacagacacctgaccaacagaatgctgagcatgggctacgccaccaagtacaccagcagaagcagatgctacagcgagacccccagcagcttcctgagatggctgagccagcagaccagatggagcaagagctacttcagagagtggctgtacaacgccctgtggtggcacagacaccacgcctggatgacctacgaggccgtggtgagcggcctgttccccttcttcgtggccgccaccgtgctgagactgttctacgccggcagaccctgggccctgctgtgggtgctgctgtgcgtgcagggcgtggccctggccaaggccgccttcgccgcctggctgagaggctgcctgagaatggtgctgctgagcctgtacgcccccctgtacatgtgcggcctgctgcccgccaagttcctggccctggtgaccatgaaccagagcggctggggcaccagcggcagaagaaagctggccgccaactacgtgcccctgctgcccctggccctgtgggccctgctgctgctgggcggcctggtgagaagcgtggcccacgaggccagagccgactggagcggccccagcagagccgccgaggcctaccacctggccgccggcgccggcgcctacgtgggctactgggtggccatgctgaccctgtactgggtgggcgtgagaagactgtgcagaagaagaaccggcggctacagagtgcaggtgtag

SEQ ID NO: 111838 - DNA, 432 bp, Artificial Sequence
  derived and/or modified sequence
atgagcgcccccgcccagccccccgccgagggcaccgagggcaccgcccccggcggcggcccccccggccccccccccaacatgaccagcaacagaagactgcagcagacccaggcccaggtggaggaggtggtggacatcatcagagtgaacgtggacaaggtgctggagagagaccagaagctgagcgagctggacgacagagccgacgccctgcaggccggcgccagccagttcgagagcagcgccgccaagctgaagagaaagtactggtggaagaactgcaagatgatgatcatgctgggcagatggcagctgacccagtactgcctggtgatgtggagcttccccagctggaccagacccgaggagggccccggcggcggccccaagagcaacctggtgagcgtgcagtaccccttcagaaagtag

SEQ ID NO: 111839 - DNA, 432 bp, Artificial Sequence
  derived and/or modified sequence
atgtcggcccccgcacagcccccagctgagggaaccgagggcacagccccagggggcggccccccgggaccccctcccaatatgacatctaacaggcggttgcagcaaacccaggcgcaagtcgaggaagtggtggacattatacgcgttaatgtggacaaggtattagaaagagaccagaagctatctgagttggacgacagggctgacgcccttcaagccggcgccagccaattcgaaagttctgccgccaagctgaaaagaaagtactggtggaagaattgtaagatgatgatcatgttgggccggtggcaactgacccaatattgtttggtaatgtggagctttcccagctggaccaggcctgaggaagggccaggtgggggccccaagtccaacttagtgtctgtccagtacccatttcggaaatag

SEQ ID NO: 111840 - DNA, 432 bp, Artificial Sequence
  derived and/or modified sequence
atgtctgccccagcccagcccccagctgagggcacagagggcacagcccctgggggcggccccccaggccccccacccaacatgaccagcaacagaaggctgcagcagacccaggcccaggtggaggaggtggtggacatcatccgggtgaatgtggacaaggtgctggagcgggaccagaagctgtctgagctggatgacagagcagatgccctgcaggccggggccagccagtttgagagcagcgctgccaagctgaagaggaagtactggtggaagaactgcaagatgatgatcatgctgggccgctggcagctgacccagtactgcctggtgatgtggagcttccccagctggaccaggcctgaggagggccctgggggcggccccaagagcaacctggtgtctgtgcagtaccccttcaggaagtag

SEQ ID NO: 111841 - DNA, 432 bp, Artificial Sequence
  derived and/or modified sequence
atgagcgcccccgcccagccccccgccgagggcaccgagggcaccgctcccggaggcggccccccagggcccccccctaatatgacaagtaatcggcgtctacagcagacccaagctcaggtggaggaggtggtggacatcatacgcgtcaacgtcgacaaggtgcttgaacgggatcagaagctaagcgaacttgatgacagggctgacgcactgcaggccggcgcctctcaattcgagtcatctgcagccaagttgaagcggaagtactggtggaaaaattgtaaaatgatgatcatgctgggcaggtggcagctaactcagtactgccttgtgatgtggagtttcccttcctggactcggcctgaagagggaccaggaggaggccccaagagcaatttggtatctgttcaatacccattcagaaaatag

SEQ ID NO: 111842 - DNA, 432 bp, Artificial Sequence
  derived and/or modified sequence
atgtcagcaccagctcagcctccggctgagggtactgagggcacagcgccaggcggaggccctcctgggcctccccctaacatgacatctaaccgcagactacaacagacccaggctcaggtggaggaggtcgtcgacatcataagagtcaacgtggacaaggtgctggaaagggaccaaaagctttccgagctagacgacagggccgacgcgttgcaggctggagcttcgcagttcgagagcagcgccgctaagctgaagaggaagtactggtggaagaactgcaaaatgatgatcatgctagggcgttggcagctgacccagtactgtctggtcatgtggtccttcccatcgtggacaagaccagaagaagggcctgggggaggtccgaagagtaatctggtcagtgtccagtaccctttcaggaagtag

SEQ ID NO: 111843 - DNA, 970 bp, Artificial Sequence
  derived and/or modified sequence
agtaagttccagcgcagctagaccgcggggtagtcggcgcgaggcggagcttggcagttccgtccacttcagccgcagcgtccctcaccgggtgtctcgccgcagcctccggagaggaacagaccctcactctctctgtcagaaaaatgtctgctccagctcagccacctgctgaagggacagaagggactgccccaggtgggggtccccctggccctcctcctaacatgaccagtaacagacgactacagcaaacccaggcacaagtggaggaggtggtggacatcatacgtgtgaacgtggacaaggtcctggagagggaccagaagctgtcagagctggatgaccgagctgatgccttgcaggcaggagcatcacaatttgagagcagtgctgccaagctaaagaggaagtattggtggaaaaactgcaagatgatgatcatgctgggaagatggcagctcactcagtactgcctggtcatgtggagctttccttcctggaccaggcctgaagagggtcctgggggtggaccaaagtccaacttggtttcagtgcagtacccttttcgaaagtaaaaacttgttttttgtagttatttctaatctgttcgtccaggattttccgtgtctttggggatcttacaactttactttgttctccagaggcctggagaacacttagggattgtgaaaatagcaggacttgtttccatcctagaagcagtcccatgtgcttctagctggaaggagctttctcttctttacattttctacagcattctgtatgagggcaccaaataaatccatctagctggtagttttatctagccaaataatttaacctagctcccagttaattgttggcataaagagagagattgcctgttagttatagagaaacagtgagtcaagtgcttaatttgaaagtaacaagctcagaggaagccactccttgccctcgttaaaga

SEQ ID NO: 111844 - DNA, 1068 bp, Artificial Sequence
  derived and/or modified sequence
gcggggtagtcggcgcgaggcggagcttggcagttccgtccacttcagccgcagcgtccctcaccgggtgtctcgccgcagcctccggagaggaacagaccctcactctctctgtcagaaaaatgtctgctccagctcagccacctgctgaagggacagaagggactgccccaggtgggggtccccctggccctcctcctaacatgaccagtaacagacgactacagcaaacccaggcacaagtggaggaggtggtggacatcatacgtgtgaacgtggacaaggtcctggagagggaccagaagctgtcagagctggatgaccgagctgatgccttgcaggcaggagcatcacaatttgagagcagtgctgccaagctaaagaggaagtattggtggaaaaactgcaagatgatgatcatgctgggagccatctgtgccatcatcgtggtagttattgtaaggcgggactgaagagctggaagaaagcagtcagtaccctcccaacggcccccctcgaaggtctccactctcctctgggctcctccttgcctaatgcagggggtcaccgctggagaagaaccaccactgtcctcgatgtgtcccaagcctggagcgaatccgtcctcttggctctcccagccctatcacaggaatcattcctgggtttctgtccctctgaggctcaccaggtgtagttggccttgttctttgggggtattagcccttctactttctttctcacccaccctgtaccctcttctgtgtgtctctgctatccccctttcctcccaccacccatgtgcatgagcaaatgtgcaacaaaaccctgggactttgcagtcaaatgaagctgagcttcccacatcccgttcttcggtttgccatgagacgatgtggggtttccactgtgtgtctgtcatcacctctttgtctttttttcctaaccctgatctcatacttgtatagagtaataacaacagttgtacttccaccaaaggcatgtggcatatttaccaatgtcatgtattctgaacaaaggcaaaaaatacaaattcctaccattaaa

SEQ ID NO: 111845 - protein, 623 aa, Artificial Sequence
  derived and/or modified sequence
MEAEETMECLQEFPEHHKMILDRLNEQREQDRFTDITLIVDGHHFKAHKAVLAACSKFFYKFFQEFTQEPLVEIEGVSKMAFRHLIEFTYTAKLMIQGEEEANDVWKAAEFLQMLEAIKALEVRNKENSAPLEENTTGKNEAKKRKIAETSNVITESLPSAESEPVEIEVEIAEGTIEVEDEGIETLEEVASAKQSVKYIQSTGSSDDSALALLADITSKYRQGDRKGQIKEDGCPSDPTSKQVEGIEIVELQLSHVKDLFHCEKCNRSFKLFYHFKEHMKSHSTESFKCEICNKRYLRESAWKQHLNCYHLEEGGVSKKQRTGKKIHVCQYCEKQFDHFGHFKEHLRKHTGEKPFECPNCHERFARNSTLKCHLTACQTGVGAKKGRKKLYECQVCNSVFNSWDQFKDHLVIHTGDKPNHCTLCDLWFMQGNELRRHLSDAHNISERLVTEEVLSVETRVQTEPVTSMTIIEQVGKVHVLPLLQVQVDSAQVTVEQVHPDLLQDSQVHDSHMSELPEQVQVSYLEVGRIQTEEGTEVHVEELHVERVNQMPVEVQTELLEADLDHVTPEIMNQEERESSQADAAEAAREDHEDAEDLETKPTVDSEAEKAENEDRTALPVLE

SEQ ID NO: 111846 - DNA, 1872 bp, Artificial Sequence
  derived and/or modified sequence
atggaggccgaggagaccatggagtgcctgcaggagttccccgagcaccacaagatgatcctggacagactgaacgagcagagagagcaggacagattcaccgacatcaccctgatcgtggacggccaccacttcaaggcccacaaggccgtgctggccgcctgcagcaagttcttctacaagttcttccaggagttcacccaggagcccctggtggagatcgagggcgtgagcaagatggccttcagacacctgatcgagttcacctacaccgccaagctgatgatccagggcgaggaggaggccaacgacgtgtggaaggccgccgagttcctgcagatgctggaggccatcaaggccctggaggtgagaaacaaggagaacagcgcccccctggaggagaacaccaccggcaagaacgaggccaagaagagaaagatcgccgagaccagcaacgtgatcaccgagagcctgcccagcgccgagagcgagcccgtggagatcgaggtggagatcgccgagggcaccatcgaggtggaggacgagggcatcgagaccctggaggaggtggccagcgccaagcagagcgtgaagtacatccagagcaccggcagcagcgacgacagcgccctggccctgctggccgacatcaccagcaagtacagacagggcgacagaaagggccagatcaaggaggacggctgccccagcgaccccaccagcaagcaggtggagggcatcgagatcgtggagctgcagctgagccacgtgaaggacctgttccactgcgagaagtgcaacagaagcttcaagctgttctaccacttcaaggagcacatgaagagccacagcaccgagagcttcaagtgcgagatctgcaacaagagatacctgagagagagcgcctggaagcagcacctgaactgctaccacctggaggagggcggcgtgagcaagaagcagagaaccggcaagaagatccacgtgtgccagtactgcgagaagcagttcgaccacttcggccacttcaaggagcacctgagaaagcacaccggcgagaagcccttcgagtgccccaactgccacgagagattcgccagaaacagcaccctgaagtgccacctgaccgcctgccagaccggcgtgggcgccaagaagggcagaaagaagctgtacgagtgccaggtgtgcaacagcgtgttcaacagctgggaccagttcaaggaccacctggtgatccacaccggcgacaagcccaaccactgcaccctgtgcgacctgtggttcatgcagggcaacgagctgagaagacacctgagcgacgcccacaacatcagcgagagactggtgaccgaggaggtgctgagcgtggagaccagagtgcagaccgagcccgtgaccagcatgaccatcatcgagcaggtgggcaaggtgcacgtgctgcccctgctgcaggtgcaggtggacagcgcccaggtgaccgtggagcaggtgcaccccgacctgctgcaggacagccaggtgcacgacagccacatgagcgagctgcccgagcaggtgcaggtgagctacctggaggtgggcagaatccagaccgaggagggcaccgaggtgcacgtggaggagctgcacgtggagagagtgaaccagatgcccgtggaggtgcagaccgagctgctggaggccgacctggaccacgtgacccccgagatcatgaaccaggaggagagagagagcagccaggccgacgccgccgaggccgccagagaggaccacgaggacgccgaggacctggagaccaagcccaccgtggacagcgaggccgagaaggccgagaacgaggacagaaccgccctgcccgtgctggagtag

SEQ ID NO: 111847 - DNA, 1872 bp, Artificial Sequence
  derived and/or modified sequence
atggaggctgaagaaacgatggagtgcctgcaggagtttcccgaacatcacaagatgatcctggaccggctgaacgaacagagggaacaggataggtttacggacattactcttattgtcgacgggcaccatttcaaggcccataaagctgtgctggcagcttgctccaaattcttttataagttctttcaggagttcactcaggaaccactggtggaaatcgagggtgtcagtaagatggcctttcggcacctcatcgagttcacttacaccgcgaagctgatgattcaaggcgaagaggaggccaacgatgtgtggaaggcggcagagttcttacagatgcttgaggccattaaagccctggaagttaggaacaaggaaaacagtgctccactggaagaaaataccaccggaaagaatgaagctaagaagaggaaaatcgcagagacctctaacgttattacagagagtttgcccagcgcagagtctgaacccgtcgagatcgaggttgagattgcagagggcacaatcgaggttgaggacgaaggaattgagactttggaggaggttgcatccgctaagcagtccgtgaagtatatacagtcgaccggtagcagcgacgacagcgccctcgcactgctggcggatataacatcaaagtaccggcagggagatagaaaagggcagataaaagaggatggctgccccagtgaccccaccagtaaacaggtagagggtatcgaaatcgtggaattacaactctcccacgtgaaagatcttttccattgtgagaagtgcaataggagctttaagctgttttatcacttcaaagagcacatgaagagtcattcaactgaaagttttaagtgcgagatatgcaacaagcgctatcttagagaatcggcgtggaagcagcatctgaattgctaccatctcgaagaaggaggtgtaagcaagaagcaaagaaccgggaagaagattcatgtctgtcagtattgcgaaaagcagtttgatcactttggccattttaaagagcatttgaggaagcataccggggagaagccattcgagtgcccaaactgtcacgagagatttgctcggaacagcaccctgaaatgtcacctcactgcctgtcagacgggagtgggcgctaagaaggggcggaagaaactttacgaatgtcaggtgtgtaactcagtgtttaacagttgggaccagttcaaggaccacttagtgatccatacaggggacaaacccaaccactgcacactgtgtgacctgtggttcatgcaaggcaatgaacttcgacgacatcttagcgacgcccataacattagcgaacgtctggttactgaggaggtgttgagcgtagagacccgtgtgcagacagaacctgtgacaagcatgacaatcatcgaacaggttggcaaagttcacgtgttacctcttcttcaggtgcaggtggatagcgcccaggttaccgtggagcaggtgcacccggatctactgcaagactcacaagtgcacgatagccacatgagcgagctgccagagcaagtgcaggtctcctaccttgaagtcggacgcattcaaacggaggaaggcacagaggtccacgtggaggagctgcacgtcgagagagtgaatcaaatgcccgttgaagtgcagacagagctcctcgaagccgaccttgatcacgtcacaccggaaatcatgaaccaggaagaaagagagagctcccaggcagacgcagcggaagccgcccgggaggatcacgaagatgctgaggatttggagaccaaacctactgtagacagtgaggcggagaaggccgaaaacgaggaccggacagctctgcctgtgctggagtag

SEQ ID NO: 111848 - DNA, 1872 bp, Artificial Sequence
  derived and/or modified sequence
atggaagcagaagagaccatggagtgtttacaggaattccctgaacatcataagatgattcttgacaggctaaacgaacagcgcgaacaggatcgattcaccgatataacacttatcgttgacggacaccatttcaaagctcacaaggctgtgttagcagcttgctctaaatttttctacaaattctttcaggaatttacacaggagccactcgtggagatcgaaggtgtctctaagatggcttttcgccatctgatcgagtttacctacactgcgaagctgatgattcagggcgaagaggaagccaacgatgtttggaaggcggctgaatttctccagatgcttgaagctatcaaagccctcgaggtgcggaacaaggagaactcagcacccctcgaggaaaacacaaccggaaagaacgaggcaaaaaaacgcaaaatagctgagacctccaacgtgataacggaatccctgccctccgctgaatcagaacctgtggaaattgaggtagagatcgccgagggtaccatcgaggtggaggacgagggcatcgagactcttgaggaggtcgcatccgctaagcagtcagtgaaatatatccagtcaaccgggtctagtgacgacagcgcactcgcattgctggccgacattactagtaaatacaggcagggagacagaaagggccagatcaaggaagacggctgtccaagtgaccctactagcaaacaggtggaggggatagagatcgtggaactgcagctgagtcacgtaaaggacttgtttcattgcgagaagtgcaatcgtagcttcaaattattttatcatttcaaggaacacatgaaatcccatagcaccgagtcatttaaatgcgaaatctgtaacaagcggtatctccgcgagagcgcctggaagcagcatcttaactgttaccatttggaagaaggtggggtgagcaaaaagcagcgcactggtaaaaagattcacgtgtgtcagtattgcgaaaagcaatttgaccattttgggcacttcaaggaacacttgcgcaaacacacgggagagaagcctttcgagtgtccgaattgtcatgaacgcttcgctcgaaatagcaccctcaagtgtcatctgacggcatgccagaccggcgtgggggcaaagaaagggcggaagaaactttacgagtgccaggtgtgtaacagcgtcttcaactcgtgggatcagttcaaagaccatttggttattcatactggtgataagcccaatcattgcactctgtgtgacctgtggtttatgcagggcaacgagctgcggcgacacttaagtgatgcccacaatatttctgagagattggtcaccgaagaggtcttatctgtggaaacacgggttcagacagaacctgtgacaagcatgacgatcattgagcaggttggcaaggtgcacgtgctgcccttactccaggtgcaagtcgattcagcgcaagtgacggtggaacaggtgcaccccgacctgttgcaggatagtcaagttcacgacagtcatatgagcgagttacccgagcaggtgcaggtttcttatctggaggtaggccgtattcagactgaggagggaaccgaggtccatgttgaagagctgcatgttgagcgcgtgaaccagatgcctgtggaagtacagaccgagttactggaggccgatctagaccacgtgacaccggagattatgaatcaggaggaaagggaatcttctcaagctgatgcagcagaggctgcaagggaggaccacgaagatgctgaggacttagagacgaaaccaaccgttgattctgaggccgagaaggccgaaaatgaggacagaaccgctttgccagtgctggagtag

SEQ ID NO: 111849 - DNA, 1872 bp, Artificial Sequence
  derived and/or modified sequence
atggaggccgaggagaccatggagtgcctgcaggagttccctgagcaccacaagatgatcctggaccggctgaatgagcagcgggagcaggaccgcttcacagacatcaccctgattgtggatggccaccacttcaaggcccacaaggctgtgctggccgcctgcagcaagttcttctacaagttcttccaggagttcacccaggagcccctggtggagattgagggcgtgtccaagatggccttccgccacctgattgagttcacctacacagccaagctgatgatccagggcgaggaggaggccaatgatgtgtggaaggctgctgagttcctgcagatgctggaggccatcaaggccctggaggtgaggaacaaggaaaattctgcccccctggaggagaacaccaccgggaagaatgaggccaagaagaggaagattgctgagaccagcaatgtcatcacagagagcctgcccagcgctgagagcgagcctgtggagattgaggtggagattgctgagggcaccatcgaggtggaggatgagggcatcgagaccctggaggaggtggccagcgccaagcagagcgtgaagtacatccagagcacaggcagcagtgatgattctgccctggccctgctggccgacatcaccagcaagtaccggcagggcgacaggaagggccagatcaaggaggatggctgccccagcgaccccaccagcaagcaggtggagggcattgaaattgtggagctgcagctgagccacgtgaaggacctcttccactgtgagaagtgcaacagaagcttcaagctgttctaccacttcaaggagcacatgaagagccacagcacagagagcttcaagtgtgagatctgcaacaagcgctacctgcgggagagcgcctggaagcagcacctgaactgctaccacctggaggagggcggcgtgtccaagaagcagaggacaggcaagaagatccacgtgtgccagtactgtgagaagcagtttgaccacttcggccacttcaaggagcacctgaggaagcacactggagagaagccctttgaatgtcccaactgccacgagagatttgccaggaacagcaccctgaagtgccacctgacagcctgccagacaggagtgggcgccaagaagggcaggaagaagctgtatgagtgccaggtgtgcaacagcgtcttcaacagctgggaccagttcaaggaccacctggtgatccacactggagacaagcccaaccactgcaccctgtgtgacctgtggttcatgcagggcaatgagctgcggcggcacctgagtgatgcccacaacatcagcgagcggctggtgacagaggaggtgctgtctgtggagaccagggtgcagacagagcctgtgacctccatgaccatcatcgagcaggtgggcaaggtgcacgtgctgcccctgctgcaggtgcaggtggacagcgcccaggtgacagtggagcaggtgcacccagacctgctgcaggacagccaggtgcatgacagccacatgtctgagctgcctgagcaggtgcaggtgtcctacctggaggtgggccgcatccagacagaggagggcacagaggtgcacgtggaggagctgcacgtggagcgggtgaaccagatgcctgtggaggtgcagacagagctgctggaggccgacctggaccacgtgaccccagagatcatgaaccaggaggagcgggagagcagccaggctgatgctgctgaggccgcccgggaggaccatgaagatgctgaggacctggagaccaagcccaccgtggacagcgaggccgagaaggccgagaatgaagatagaacagccctgcctgtgctggagtag

SEQ ID NO: 111850 - DNA, 1872 bp, Artificial Sequence
  derived and/or modified sequence
atggaggccgaggagaccatggagtgcctgcaggagttccccgagcaccataaaatgatccttgatcgcctgaacgaacagagggaacaggaccgcttcacggatatcactctgattgttgatggacaccatttcaaggcccacaaagcggtgttggccgcctgctcaaagttcttctataagttctttcaggagtttacccaagaacccctcgtggaaattgagggagtttctaaaatggcctttagacatttaattgagttcacctacacggcaaagttgatgatccaaggagaagaagaggccaatgatgtgtggaaggcagcagagtttctccagatgcttgaagccatcaaggccctggaggtgcgcaacaaggagaactccgccccattggaggaaaataccaccgggaaaaacgaagccaaaaaaaggaaaattgcagaaacttctaatgtcataacggagagcctgccatccgcagagtctgagcctgtggagatcgaggtggagattgcagagggcaccattgaagttgaggatgaggggatcgaaactctggaggaagtggcaagcgccaagcagagcgtgaaatacatccagagcacgggcagtagcgatgattcagctttagcgctccttgctgatattacctctaagtaccggcaaggggataggaagggacagatcaaggaggatgggtgtccatctgacccaacctccaagcaagtggaaggtattgagatcgtggagctacagctgagtcatgtcaaggacctgttccactgtgagaaatgcaatcgatcctttaaacttttttaccacttcaaggaacatatgaaaagtcactctacagagagtttcaagtgtgaaatttgcaataaacggtacctaagagaatctgcttggaaacagcatctaaactgctatcacctggaggagggaggcgtcagtaagaagcaacgaactggaaagaagatccacgtgtgccagtactgtgagaagcagtttgaccactttggccatttcaaggaacatttacgaaaacacaccggagagaaacccttcgagtgccctaactgtcacgaacgcttcgctcggaattctaccctgaagtgtcatctcaccgcatgccagacaggcgtcggcgcgaagaagggacgaaagaaactctacgagtgccaagtatgtaactctgtgtttaattcttgggatcagtttaaggaccatctggtcatccatactggagataagccgaatcattgtacactgtgtgatctgtggttcatgcaaggaaacgaactgcggaggcatctcagcgacgcacataacatctccgaaaggctggtcaccgaagaggtgctgagcgtcgaaacccgcgtacagaccgagccggtgacatctatgaccatcatcgaacaagtgggcaaggtgcatgtgctgccactcctccaagtgcaggtggacagtgcacaggtaaccgtggagcaggtgcacccggatctcctgcaagacagccaggtccatgattcccacatgagtgagctaccagaacaggtacaggtgtcttacctggaagtcggtcgcattcaaactgaagagggaactgaagtgcatgtggaagagctgcatgtggagcgtgtcaaccagatgcccgtcgaagtgcagactgaactactggaggcagacttagaccacgtgacacccgagatcatgaaccaggaagagcgcgagtcctcccaggccgatgccgccgaggcagcacgcgaggatcatgaagatgcggaagatctggagacgaaacccaccgtggatagtgaagccgaaaaggccgagaacgaagatagaaccgctctcccggtactggaatag

SEQ ID NO: 111851 - DNA, 1872 bp, Artificial Sequence
  derived and/or modified sequence
atggaggccgaggagaccatggagtgcctgcaggagttccccgagcaccacaaaatgatcctcgaccgcctgaatgagcagcgcgagcaggaccgttttaccgacatcacgctgatcgtcgacggacaccactttaaggcacacaaagccgtgcttgccgcatgttctaaattcttctataaattttttcaagaattcacccaagagcccttagtcgaaatagagggcgtgtctaagatggcctttcgccatcttatcgaatttacctataccgcgaagctgatgattcaaggcgaagaagaagccaatgacgtgtggaaggctgctgaattcttacagatgttggaagcaattaaagcgcttgaggtgaggaacaaggaaaattctgccccgctggaagaaaatacaaccggtaagaatgaggccaagaagagaaagattgctgaaacctctaacgttattactgaatccctgccaagcgccgaatcggagcccgtcgaaatcgaggttgagattgccgagggaacgattgaggttgaggatgaaggcatagaaacactcgaagaagttgcctccgcaaaacagtccgtcaagtacatccagagcaccggctcctccgacgattctgctttagccctgctggctgacattacctctaagtacaggcaaggagatagaaaaggacagatcaaagaggatggttgtccaagcgatccaacaagtaagcaggtggaaggcatagaaatcgtggaactgcagctgtctcacgtcaaagacctattccattgtgaaaaatgtaaccgcagttttaaactattctaccatttcaaagaacatatgaaatcacacagcacagaatcctttaaatgtgagatatgtaataagcgatacttgcgggagtctgcatggaaacaacacttaaactgctatcacctggaagagggaggcgtcagtaaaaagcagcgcaccggcaaaaagatccacgtgtgccagtactgtgagaaacagttcgaccatttcggccatttcaaagaacacctgcggaagcacacgggagaaaagccattcgaatgccccaactgccacgaacggtttgcccgcaattctacactcaagtgtcaccttacagcctgtcagacaggagtcggggcaaagaaaggccggaagaaactgtatgagtgccaggtgtgtaactctgtgtttaattcatgggaccagtttaaagatcacttagtgatacacaccggggacaagcccaaccattgcacgctgtgtgacctctggtttatgcaaggcaatgaactgcgtaggcatctttctgacgctcataacatcagcgagcggctcgtcacagaagaagtgctttccgtggaaacccgggtccagactgaacccgttacgtctatgactataattgagcaggtaggtaaggtccatgtgctacccctgctgcaggtgcaggtggattctgcgcaggttacagtggaacaggtgcacccagatctgctccaggattctcaggtgcatgacagccacatgagcgagctgccagaacaggtgcaggtgagctacttggaagttggaaggattcaaacagaggagggaacagaagttcacgttgaggagctacacgtggagcgagtgaatcaaatgccagtggaagtgcagaccgagctgcttgaggccgatctagaccatgtgacccctgaaattatgaaccaagaggagcgtgagagcagccaagctgatgccgcagaagccgcccgcgaggaccatgaggacgcagaggaccttgaaaccaagccaacagtcgattcagaggcagagaaggccgaaaacgaggaccgtaccgccctccccgttctcgagtag

SEQ ID NO: 111852 - DNA, 1872 bp, Artificial Sequence
  derived and/or modified sequence
atggaggccgaagaaaccatggagtgtttgcaggagttcccagagcatcataaaatgatactcgatagactgaatgagcagagggaacaggatcgattcactgacattaccctcatagtggatggacatcacttcaaagctcataaagccgtcttggcagcttgtagcaaatttttttacaaattctttcaggagttcacacaagaacctctcgtggaaattgaaggcgtgtctaagatggcattcagacacctaatcgaatttacttacactgccaagctgatgattcagggggaagaggaggctaatgatgtatggaaagctgccgaattcctgcaaatgctggaggccataaaggccctcgaagtccgaaataaggaaaattccgcccctttagaggagaatacgaccggcaaaaacgaggcaaagaagagaaaaatcgctgagacctccaacgtaatcacggaatctctaccgagtgccgaatccgagcccgttgagattgaggtggaaatcgctgagggcacaattgaagtggaggatgagggtattgaaaccctggaggaagtggcaagcgctaagcagtccgtgaagtatatccagtctaccgggtcctctgacgatagcgctctcgcgctgttggcagatatcacatccaagtatagacagggcgaccgcaagggccagatcaaggaggacgggtgtccctccgaccctacttccaaacaggtggaaggcattgagatcgttgaactgcaattgtcacatgtgaaagacttattccactgcgagaagtgcaaccgatcctttaagctgttctaccacttcaaggagcatatgaagagccatagcacagagagctttaaatgtgaaatatgcaacaaaaggtatcttagagagagtgcatggaagcagcacctgaattgctaccatctcgaagagggcggagtgtccaaaaagcagcgtacaggcaagaaaatccatgtgtgccagtactgtgagaagcagtttgaccacttcgggcactttaaggagcatctcaggaagcataccggcgaaaagcctttcgagtgtccaaattgccatgagagattcgccaggaattctacacttaagtgtcatctcacagcatgtcaaactggtgttggggcaaaaaagggacggaagaagctgtacgaatgccaggtctgtaattccgtctttaattcttgggatcagtttaaggatcatctggtcatccacaccggtgataaacccaaccattgtactttgtgcgacctttggtttatgcagggaaatgagcttcgtcggcatctgagcgatgctcacaatatttccgagagacttgtcaccgaagaagtcctcagcgtcgaaaccagagtccaaactgaacccgtgacttctatgaccattattgaacaggtcggtaaggtccatgtgctacctttactccaggtgcaggttgacagcgcacaggtgaccgtggaacaggtgcacccagacctcctgcaggattcccaggtgcacgattcacacatgagtgaactgccagaacaggttcaagtgtcttatttagaagttggaagaatccagaccgaagagggtaccgaggtacatgtagaggaactacatgttgagcgcgtaaaccagatgccagtcgaagtccagacagagctgttggaagcggacttagatcacgttacacccgaaatcatgaaccaggaggaaagagagtctagccaagctgatgcagccgaagctgccagggaagaccacgaagacgcagaggatctcgagacgaaacctacagttgacagcgaagccgagaaagccgagaacgaggatcgtaccgccctgccagtgctggagtag

SEQ ID NO: 111853 - DNA, 1872 bp, Artificial Sequence
  derived and/or modified sequence
atggaggccgaagaaaccatggagtgcttgcaagagtttcccgaacaccataaaatgatcttggaccggctgaacgagcaaagagagcaagatagattcactgacataaccttgattgtggacggccaccatttcaaagctcacaaagctgttcttgcggcttgttcaaagtttttctacaagttcttccaggaatttacccaggagcccctggtcgagattgaaggcgtttctaagatggctttccgccacctcattgaattcacctacactgcgaagctcatgatccaaggggaggaggaagccaacgacgtgtggaaagccgctgaatttctgcagatgcttgaagccattaaagcccttgaggtcaggaataaagagaactctgctcccctggaagaaaacactactggcaaaaacgaggcaaagaagagaaaaattgctgagacatcaaatgtaattacagaaagccttccgtcagcagagtccgaacctgttgagattgaggtggagatagctgaaggaactatcgaagtggaagatgagggaattgaaaccctggaggaggtggccagcgccaaacagagtgttaagtatattcagagcactggttcttccgacgactcggccctggccctgctggctgatattacctcgaagtatcgacaaggcgaccggaagggtcagataaaggaagatggatgtccctccgacccaacttccaagcaagtcgaaggaattgaaatagtggaactccagttgagccatgtcaaagatctgttccactgtgaaaaatgcaataggtccttcaagctcttctatcacttcaaagagcacatgaaatctcattccacagagtcgttcaaatgcgagatctgcaacaagaggtatcttcgagagtctgcttggaagcagcacctaaattgttaccacctagaggagggaggggtgagtaaaaaacaacgcacggggaaaaagattcatgtgtgccaatactgtgaaaaacaattcgatcattttggccacttcaaggagcacctccgcaaacacacgggagaaaagcctttcgagtgtccgaactgccacgagagattcgccaggaattcaacattgaaatgccacctcacagcctgtcagactggggtaggtgccaagaaaggcaggaagaaactgtatgaatgccaggtctgcaatagcgtgttcaactcctgggatcagtttaaggaccacttggtgatacatacaggagataaacccaaccactgtactctttgcgatctatggttcatgcagggaaatgaactgcggaggcatctgagcgatgctcacaatatctccgagcggctcgttactgaagaagtactgagcgtggaaactcgcgtgcagaccgagcctgtgaccagtatgaccatcattgaacaggtgggaaaagttcatgtactccccttattacaggttcaggttgatagcgcccaagtcaccgtggaacaggtccacccagatttgctgcaggattcacaggttcacgatagccacatgtccgaactgcctgagcaggtgcaggttagctacttggaagtcggtcgaatccaaacagaagaaggcacggaggtgcatgtagaagaactgcatgtcgagagggtgaaccaaatgccagttgaagttcagacagagttgctagaagctgatctggaccatgttacacccgagattatgaaccaggaggagcgagaatcaagccaggcagatgccgcagaggccgcaagagaagatcatgaggatgctgaggacctggagacaaagccaactgtcgattcagaagctgagaaggccgagaatgaggaccgaacggccttgcccgtgctggagtag

SEQ ID NO: 111854 - DNA, 2502 bp, Artificial Sequence
  derived and/or modified sequence
gcaagcctgggccgctcctccttccctcaagcagcccgacggccatggaggctgaagagacgatggaatgccttcaggagttccctgaacatcataaaatgatcctcgaccgattgaatgaacagcgagagcaggaccggtttactgacatcaccctaattgtcgacggacaccattttaaggctcacaaggctgttttggctgcttgtagtaagttcttctacaaattctttcaggagtttacccaagaaccattggtggagatagaaggtgttagtaaaatggcctttcgccatttaattgagttcacatatacagcaaaattaatgatacaaggagaagaagaagccaatgatgtatggaaagcagcagagtttctacaaatgctagaagctatcaaagcccttgaagtcaggaacaaagaaaactcagctcccttagaggaaaataccacaggaaaaaatgaggccaaaaaaaggaagattgcagaaacttcaaatgttatcactgagtcattgccatctgcagaatcagaacctgttgaaattgaggtagagattgccgaaggcaccattgaagtggaagatgaaggcatcgaaacattagaggaagtggcttctgccaagcagtccgtaaagtacatacagagcacaggttcctctgatgattctgctctagcactgttggcagatattaccagcaagtaccgtcaaggtgacagaaaagggcagattaaagaagatggctgtccatctgaccccacgagcaaacaggtagaaggtattgaaattgtggaacttcagctgtcacatgtgaaggacttgttccattgtgagaaatgtaaccgttcatttaaattgttttaccattttaaggagcacatgaaatcacactccactgagagtttcaagtgtgaaatatgcaataaacgatatcttcgagagagcgcatggaaacagcacctaaattgttaccaccttgaagaaggtggagtcagtaagaagcaaagaactgggaaaaaaattcatgtatgtcagtactgtgagaaacagtttgaccattttggacattttaaagaacatcttcgaaaacatacaggtgaaaaaccttttgaatgtccaaattgtcatgaacgatttgctagaaatagcactctgaaatgtcacctcactgcatgccaaactggagtaggggcaaaaaaaggaaggaagaagctctacgaatgccaggtctgcaacagtgtgtttaacagctgggaccagttcaaagatcacttggtaatacacactggagataaacccaaccattgtactttatgtgatttgtggtttatgcaaggaaatgaattaaggaggcatctcagtgatgctcacaatatttcagagcgtctagtaacggaagaagttctttcagtagaaacacgtgtgcaaactgaacctgtaacatcaatgactattatagaacaagttgggaaggtgcatgtgctaccattgcttcaggttcaggtggattcagcacaagtgactgtggaacaagtccatccagatctgctccaggacagccaggtgcacgattcacacatgagtgagcttccagagcaggtccaagtgagttatctagaagtgggccgaattcagactgaagaaggtactgaagtacatgtagaggagctgcatgttgaacgggtcaatcaaatgccagtggaagtacaaactgaacttctagaagcagatttggaccacgtgaccccagaaatcatgaaccaagaggagagagagtctagccaagcagatgctgctgaggctgccagggaagatcacgaagatgctgaggatttagagaccaagccaacagtggattctgaagcagaaaaggcagagaatgaggacagaacagctctgccagttttagaatgaaattacacatgaatatatttttaaatttacttgttgggtttttgaactgattatgggcagtttgactgtccttaattaagcctaacagacaagtggaccaaagttaagctgtttcctgttgtgctgaactgttgtccgttgaaacacattgattcccctccccctacttattgccacagaggagggatcttttccataactgaaggggagttttgagaagtatatttctggaaacttaaatggattatattcttattatatagttgggtacgaatgtatctattttcattgtggtaaaagttcttccttttctctttcccaggtcatgttcttcctcaaattttttccatattgtaaaatcaaacttaaatcattagaatacaagtttatgtattctaatgcatgttagaaaattgaataatataggaaacacaaggctgcatgatgaaaagtgcattgttactgtgcagttaaattttggcttctggctttctttagtttgaacaaacgttcttgtctaccccagtagtcacagatgccatctttgcaacagaaagagtggtggtggcaaaatttctagaatgtt

SEQ ID NO: 111855 - DNA, 2063 bp, Artificial Sequence
  derived and/or modified sequence
gcggtgacggtgtgcgtcgacagcagcccgacggccatggaggctgaagagacgatggaatgccttcaggagttccctgaacatcataaaatgatcctcgaccgattgaatgaacagcgagagcaggaccggtttactgacatcaccctaattgtcgacggacaccattttaaggctcacaaggctgttttggctgcttgtagtaagttcttctacaaattctttcaggagtttacccaagaaccattggtggagatagaaggtgttagtaaaatggcctttcgccatttaattgagttcacatatacagcaaaattaatgatacaaggagaagaagaagccaatgatgtatggaaagcagcagagtttctacaaatgctagaagctatcaaagcccttgaagtcaggaacaaagaaaactcagctcccttagaggaaaataccacaggaaaaaatgaggccaaaaaaaggaagattgcagaaacttcaaatgttatcactgagtcattgccatctgcagaatcagaacctgttgaaattgaggtagagattgccgaaggcaccattgaagtggaagatgaaggcatcgaaacattagaggaagtggcttctgccaagcagtccgtaaagtacatacagagcacaggttcctctgatgattctgctctagcactgttggcagatattaccagcaagtaccgtcaaggtgacagaaaagggcagattaaagaagatggctgtccatctgaccccacgagcaaacaggtagaaggtattgaaattgtggaacttcagctgtcacatgtgaaggacttgttccattgtgagaaatgtaaccgttcatttaaattgttttaccattttaaggagcacatgaaatcacactccactgagagtttcaagtgtgaaatatgcaataaacgatatcttcgagagagcgcatggaaacagcacctaaattgttaccaccttgaagaaggtggagtcagtaagaagcaaagaactgggaaaaaaattcatgtatgtcagtactgtgagaaacagtttgaccattttggacattttaaagaacatcttcgaaaacatacaggtgaaaaaccttttgaatgtccaaattgtcatgaacgatttgctagaaatagcactctgaaatgtcacctcactgcatgccaaactggagtaggggcaaaaaaaggaaggaagaagctctacgaatgccaggtctgcaacagtgtgtttaacagctgggaccagttcaaagatcacttggtaatacacactggagataaacccaaccattgtactttatgtgatttgtggtttatgcaaggaaatgaattaaggaggcatctcagtgatgctcacaatatttcagagcgtctagtaacggaagaagttctttcagtagaaacacgtgtgcaaactgaacctgtaacatcaatgactattatagaacaagttgggaaggtgcatgtgctaccattgcttcaggttcaggtggattcagcacaagtgactgtggaacaagtccatccagatctgctccaggacagccaggtgcacgattcacacatgagtgagcttccagagcaggtccaagtgagttatctagaagtgggccgaattcagactgaagaaggtactgaagtacatgtagaggagctgcatgttgaacgggtcaatcaaatgccagtggaagtacaaactgaacttctagaagcagatttggaccacgtgaccccagaaatcatgaaccaagaggagagagagtctagccaagcagatgctgctgaggctgccagggaagatcacgaagatgctgaggatttagagaccaagccaacagtggattctgaagcagaaaaggcagagaatgaggacagaacagctctgccagttttagaatgaaattacacatgaatatatttttaaatttacttgttgggtttttgaactgattatgggcagtttgactgtccttaattaagcctaacagacaagtggaccaaagttaagctgtttcctgttgtgctgaactgttgtccgttgaaacacattgattc

SEQ ID NO: 111856 - protein, 165 aa, Artificial Sequence
  derived and/or modified sequence
MDSSRARQQLRRRFLLLPDAEAQLDREGDAGPETSTAVEKKEKPLPRLNIHSGFWILASIVVTYYVDFFKTLKENFHTSSWFLCGSALLLVSLSIAFYCIVYLEWYCGIGEYDVKYPALIPITTASFIAAGICFNIALWHVWSFFTPLLLFTQFMGVVMFITLLG

SEQ ID NO: 111857 - protein, 132 aa, Artificial Sequence
  derived and/or modified sequence
MDSSRARQQLRRRFLLLPDAEAQLDREGDAGPETSTAVEKKEKPLPRLNIHSGFWILASIVVTYYVDFFKTLKENFHTSSWFLCGSALLLVSLSIAFYCIVYLEWYCGIGEYDVKYPALIPITTASFIAAGI

SEQ ID NO: 111858 - DNA, 498 bp, Artificial Sequence
  derived and/or modified sequence
atggacagcagcagagccagacagcagctgagaagaagattcctgctgctgcccgacgccgaggcccagctggacagagagggcgacgccggccccgagaccagcaccgccgtggagaagaaggagaagcccctgcccagactgaacatccacagcggcttctggatcctggccagcatcgtggtgacctactacgtggacttcttcaagaccctgaaggagaacttccacaccagcagctggttcctgtgcggcagcgccctgctgctggtgagcctgagcatcgccttctactgcatcgtgtacctggagtggtactgcggcatcggcgagtacgacgtgaagtaccccgccctgatccccatcaccaccgccagcttcatcgccgccggcatctgcttcaacatcgccctgtggcacgtgtggagcttcttcacccccctgctgctgttcacccagttcatgggcgtggtgatgttcatcaccctgctgggctag

SEQ ID NO: 111859 - DNA, 399 bp, Artificial Sequence
  derived and/or modified sequence
atggacagcagcagagccagacagcagctgagaagaagattcctgctgctgcccgacgccgaggcccagctggacagagagggcgacgccggccccgagaccagcaccgccgtggagaagaaggagaagcccctgcccagactgaacatccacagcggcttctggatcctggccagcatcgtggtgacctactacgtggacttcttcaagaccctgaaggagaacttccacaccagcagctggttcctgtgcggcagcgccctgctgctggtgagcctgagcatcgccttctactgcatcgtgtacctggagtggtactgcggcatcggcgagtacgacgtgaagtaccccgccctgatccccatcaccaccgccagcttcatcgccgccggcatctag

SEQ ID NO: 111860 - DNA, 498 bp, Artificial Sequence
  derived and/or modified sequence
atggactcatcacgggcacggcagcagctaaggcgccgcttcttgctcctgccggatgccgaggcgcaactggatcgcgagggcgacgctggtccggagacatctactgctgtggaaaaaaaagagaagccgcttccaaggttaaacatccattcaggcttctggattctagcttcaattgtcgtaacctattatgtagacttcttcaagacactcaaagaaaactttcacacctcctcgtggtttctgtgcggtagcgcactgctcctcgtaagcctgtctatagcgttctactgcatcgtgtacctggaatggtactgtgggatcggcgagtacgacgtaaagtatcctgcattgatccctattaccacagcctcattcattgccgctggaatctgcttcaacatcgcgctgtggcatgtttggtccttttttacaccactcctgctttttacccaatttatgggtgtggtgatgttcattacactgctggggtag

SEQ ID NO: 111861 - DNA, 399 bp, Artificial Sequence
  derived and/or modified sequence
atggatagcagtcgagctcgacagcaattgagaaggcggttcttactgcttccggatgccgaggcacaattagaccgggagggcgacgctggcccggagaccagtactgcagtggaaaagaaggaaaaacccctgccacgcctgaatatccatagcggattttggatattggcctctattgtggtgacttattatgttgacttttttaagacactgaaagaaaactttcatacttcatcctggtttctctgcgggtctgctctgctgttggtgtctctctcaatcgcattctattgtatcgtctacttggaatggtattgtggtattggtgaatatgacgtcaagtacccggctctcattccaatcacgaccgcctcctttattgccgccggcatctag

SEQ ID NO: 111862 - DNA, 498 bp, Artificial Sequence
  derived and/or modified sequence
atggactctagccgggcccgccaacagcttaggcgtaggtttctgttgctaccggacgctgaggcacagttagatcgcgagggggacgccggacccgagacaagcaccgcagtggagaagaaagagaaacctctcccgcgcctgaatatccacagcggattctggatacttgcatctatcgtcgtgacctactatgtcgacttctttaaaacccttaaggagaacttccatacttccagttggttcctctgtggctcggccctccttctggtctccctgagcatcgccttctattgtatcgtttatttggagtggtactgcggaattggcgagtacgatgtgaaatatcctgccctgatacctattaccaccgcatccttcatcgcggctggaatctgttttaacattgctctgtggcacgtgtggtcattctttactccgctgctgctattcacccaattcatgggagtcgtgatgttcattacactcttgggatag

SEQ ID NO: 111863 - DNA, 498 bp, Artificial Sequence
  derived and/or modified sequence
atggacagcagccgggcccggcagcagctgcggcggcgcttcctgctgctgcctgatgctgaggcccagctggaccgggagggagatgctggccctgagaccagcacagctgtggagaagaaggagaagcccctgccccggctgaacatccacagcggcttctggatcctggccagcatcgtggtgacctactacgtggacttcttcaagaccctgaaggagaacttccacaccagctcctggttcctgtgtggcagcgccctgctgctggtgtccctgagcatcgccttctactgcatcgtgtacctggagtggtactgcggcattggagaatatgatgtgaagtacccagccctgatccccatcaccacagccagcttcatcgccgccggcatctgcttcaacatcgccctgtggcacgtgtggagcttcttcacccccctgctgctcttcacccagttcatgggcgtggtgatgttcatcaccctgctgggctag

SEQ ID NO: 111864 - DNA, 399 bp, Artificial Sequence
  derived and/or modified sequence
atggacagcagccgggcccggcagcagctgcggcggcgcttcctgctgctgcctgatgctgaggcccagctggaccgggagggagatgctggccctgagaccagcacagctgtggagaagaaggagaagcccctgccccggctgaacatccacagcggcttctggatcctggccagcatcgtggtgacctactacgtggacttcttcaagaccctgaaggagaacttccacaccagctcctggttcctgtgtggcagcgccctgctgctggtgtccctgagcatcgccttctactgcatcgtgtacctggagtggtactgcggcattggagaatatgatgtgaagtacccagccctgatccccatcaccacagccagcttcatcgccgccggcatctag

SEQ ID NO: 111865 - DNA, 498 bp, Artificial Sequence
  derived and/or modified sequence
atggacagcagccgggcccggcagcagctgcggcggcggttcctgctgctgccagatgccgaggctcaattggaccgtgagggcgacgccggtcccgagacctccaccgccgtggagaagaaggaaaagcctcttccacggctgaatattcattctgggttttggatcctggcatcaattgtcgttacatactacgtggacttctttaaaacactgaaggagaactttcacacctcaagttggttcttgtgcggctctgccttattgttggtgtctctgagcattgctttttattgtatcgtctacctcgagtggtattgcggcatcggcgaatatgacgtgaagtacccagctctgatcccaatcactactgctagctttatcgctgctgggatctgcttcaacattgcactgtggcacgtttggagttttttcactcctctcctcttgtttacccaatttatgggcgttgttatgtttattacattgctgggctag

SEQ ID NO: 111866 - DNA, 399 bp, Artificial Sequence
  derived and/or modified sequence
atggacagcagccgggcccggcagcagctgcggcggcggttcctgttattgcctgacgctgaggcccagttagaccgcgagggggatgccggacccgaaacctccactgcagtggagaagaaagagaagcctttaccacgactgaatattcacagcggcttctggatccttgcctctattgtggttacgtattacgtggatttttttaaaacgttgaaagaaaattttcacaccagcagctggttcttatgcggttcagcattgctgttggtaagtctgtcaatcgcattctactgtattgtctaccttgagtggtactgcggtatcggtgagtatgatgttaaatatcctgcattgattccaatcacaacagcgtcgtttatcgctgcagggatatag

SEQ ID NO: 111867 - DNA, 498 bp, Artificial Sequence
  derived and/or modified sequence
atggacagcagccgggcccggcagcagctgcggcggcggttcctgttgctgcccgatgctgaagcgcagctggatcgggaaggcgacgccggtcctgagacgagcactgccgtagaaaaaaaagagaagcccttgccgaggctgaacattcattcagggttttggatactggccagcatcgtggtgacatattatgtggattttttcaagacacttaaggaaaacttccacaccagcagttggtttctctgtggctccgccctgctcctggtgtccctgtccatcgccttctactgtatcgtgtaccttgagtggtactgtggtataggcgaatacgatgtgaagtatcctgccctcatccccataacaactgcgtcctttattgccgctggcatttgcttcaacatcgctctttggcatgtctggtctttctttactccgctgctgcttttcacacagttcatgggggtagtaatgtttattactctgctgggctag

SEQ ID NO: 111868 - DNA, 498 bp, Artificial Sequence
  derived and/or modified sequence
atggacagctcgcgggcaaggcagcagctccgcaggcgattcttgcttctgcccgatgcggaggctcagctggatcgtgagggcgacgccggacctgaaaccagtaccgctgtcgaaaaaaaggagaaacctctacctcggcttaatatccattcaggattctggattctggcttctatagtggtaacctactatgtggacttcttcaaaaccctcaaagagaatttccacacgtcctcttggtttctgtgtggtagcgccctgttgctggtctccctctcaatcgctttctattgcatcgtctatctggagtggtactgtggaattggggagtatgatgtgaaatacccagcgctgatacctatcacaactgccagctttatcgccgcaggcatctgttttaacattgccctgtggcatgtatggtctttttttactcccttattgctattcacacagttcatgggagttgtgatgtttatcaccctcctggggtag

SEQ ID NO: 111869 - DNA, 399 bp, Artificial Sequence
  derived and/or modified sequence
atggattcctcccgcgcacggcaacagctgagacgtcgctttctgctcctcccagacgcagaagcacaactggatcgagagggggatgccggtcccgaaacatcaaccgctgtggaaaaaaaagaaaaacctctcccaaggctgaacatacacagtgggttctggatcctcgcttccattgttgtcacatattacgttgacttcttcaagactctaaaagagaattttcataccagtagctggttcctgtgcggctctgcattactccttgtgtccctgtctatagccttttattgcatcgtatatctcgaatggtactgcggaatcggcgaatacgatgtgaaatatccagccctgattccgatcacgactgcttccttcatcgccgctggcatttag

SEQ ID NO: 111870 - DNA, 498 bp, Artificial Sequence
  derived and/or modified sequence
atggatagttctcgggctcgtcagcagctccgcaggaggttcctccttctgccggacgccgaagctcagttagacagggaaggcgatgccggacccgaaacctccaccgctgtggagaagaaagagaaaccactaccacgtctcaacattcactctggcttctggatcctcgcatccatagttgtgacatactacgttgatttttttaagacactgaaagagaacttccatacaagttcgtggtttctgtgtgggtcagctctcctcctggtctcactgtccatcgcattttactgtattgtctatctggagtggtattgcggtatcggggaatatgacgtcaaatacccggcactcattcccattacaaccgcatcctttatcgccgcaggtatctgttttaatattgctctgtggcacgtgtggtctttcttcaccccacttctcctcttcacccagtttatgggtgtagtgatgtttatcacactgcttgggtag

SEQ ID NO: 111871 - DNA, 1221 bp, Artificial Sequence
  derived and/or modified sequence
cggtaccaagatggactcctcgcgggcccggcagcagctccggcggcgattcctcctcctgccggacgccgaggcccagctggaccgcgagggtgacgccgggccggaaacctccacagctgttgagaaaaaggagaaacctcttccaagacttaatatccattctggattctggattttggcatccattgttgtgacctattatgttgacttctttaaaacccttaaagaaaacttccacactagcagctggtttctctgtggcagtgccttgttgcttgtcagtttatcaattgcattttactgcatagtctacctggaatggtattgtggaattggagaatatgatgtcaagtatccagccttgatacccattaccactgcctcctttattgcagcaggaatttgcttcaacattgctttatggcatgtgtggtcgtttttcactccattgttgttgtttacccagtttatgggggttgtcatgtttatcacactccttggatgatttccgaagagacagggtcttctatgttgcccaggctgtctttgaactcctgggatcaagtgatcctcctgcctcagccttcgaagtagttgggactacaggcccacgccaccgtgcctggctggacatgtaaatttgaagtgaatggttaaacatccagctagctgaaagcatggcagaccctaacagaaaagctacagtgtgtttttgcagctatgaagtgaatggtttcctggggaaaattgtgactttgtataactgttgttgaaaccagaataaattatatttcacttgcatatgcataaattattaaaattttcagaagtcagtgatacagaagtactattttgcaatgttaatctgtttgagtctttggagaaagtggtttcattgtaggtacatagtgcactgttaatattttaaacaagtagttcactcttccatttaagggatagcagttccttgtataaaatgactggatgtgtataaaggaattatgttgtcatgtgcctttaaccagctttagtaattactataatctcatatttatgatagttttgttaggtgacaggaccaaatgaaaatattttatgttttctcatcactttagattttatcattatgtacattactgggtttttagcatttcctaatgtgaagttttaatcacttttaagtatacatttttttctgtatcatttaaataaaatatt

SEQ ID NO: 111872 - DNA, 1079 bp, Artificial Sequence
  derived and/or modified sequence
gcatttcggggcggtaccaagatggactcctcgcgggcccggcagcagctccggcggcgattcctcctcctgccggacgccgaggcccagctggaccgcgagggtgacgccgggccggaaacctccacagctgttgagaaaaaggagaaacctcttccaagacttaatatccattctggattctggattttggcatccattgttgtgacctattatgttgacttctttaaaacccttaaagaaaacttccacactagcagctggtttctctgtggcagtgccttgttgcttgtcagtttatcaattgcattttactgcatagtctacctggaatggtattgtggaattggagaatatgatgtcaagtatccagccttgatacccattaccactgcctcctttattgcagcaggaatttgatcaccccatcctgagatctgctgccttacacagtggaggctgttttctgagtgtcggataactctgttattaaataagtgtatattgagaatactcactccagatgcttaggggcatggtgagaaggacaaagatagtgcctcctgtcaggtcacttacatcagaacttgcaggaaacctgctttatacagcagttgacaggtgtggaaactgaagctcatggaaataaaagttaatacgctaaattttcaaggagttaatgaaaactgacatttctgctaaaaacagcatgttctccctgtgggattttaaaggaaggtcagtggtaactgtgtaaagaagaaatggacatactctcattgttagcagtctgaaaatagttgctagcacctccatgcccacgccaatgtctccagcctccttcaggcaccttgctgtgtcttgggaccactgggaaccctcacaggaggcccttcattcctgtacacctgtggtgccacaagcggctttgggcccggaggaatcctacacatctcagaacacttcctcacctgaccctgtcacccatctccccttctcgtgttctcagccccttctttgactcttgaattttgagtttttacagatgtttgggagctcttactctgacatgaagttat

SEQ ID NO: 111873 - DNA, 948 bp, Artificial Sequence
  derived and/or modified sequence
cggggcggtaccaagatggactcctcgcgggcccggcagcagctccggcggcgattcctcctcctgccggacgccgaggcccagctggaccgcgagggtgacgccgggccggaaacctccacagctgttgagaaaaaggagaaacctcttccaagacttaatatccattctggattctggattttggcatccattgttgtgacctattatgttgacttctttaaaacccttaaagaaaacttccacactagcagctggtttctctgtggcagtgccttgttgcttgtcagtttatcaattgcattttactgcatagtctacctggaatggtattgtggaattggagaatatgatgtcaagtatccagccttgatacccattaccactgcctcctttattgcagcaggaatttgcttcaacattgctttatggcatgtgtggtcgtttttcactccattgttgttgtttacccagtttatgggggttgtcatgtttatcacactccttggatgatttccgaagatcaccccatcctgagatctgctgccttacacagtggaggctgttttctgagtgtcggataactctgttattaaataagtgtatattgagaatactcactccagatgcttaggggcatggtgagaaggacaaagatagtgcctcctgtcaggtcacttacatcagaacttgcaggaaacctgctttatacagcagttgacaggtgtggaaactgaagctcatggaaataaaagttaatacgctaaattttcaaggagttaatgaaaactgacatttctgctaaaaacagcatgttctccctgtgggattttaaaggaaggtcagtggtaactgtgtaaagaagaaatggacatactctcattgttagcagtctgaaaatagttgctagcacctccatgcccacgccaatgtctccagcctccttca

SEQ ID NO: 111874 - protein, 1886 aa, Artificial Sequence [sequence omitted]

SEQ ID NO: 111875 - protein, 1905 aa, Artificial Sequence
  derived and/or modified sequence
MASGLGSPSPCSAGSEEEDMDALLNNSLPPPHPENEEDPEEDLSETETPKLKKKKKPKKPRDPKIPKSKRQKKELGDSSGEGPEFVEEEEEVALRSDSEGSDYTPGKKKKKKLGPKKEKKSKSKRKEEEEEEDDDDDSKEPKSSAQLLEDWGMEDIDHVFSEEDYRTLTNYKAFSQFVRPLIAAKNPKIAVSKMMMVLGAKWREFSTNNPFKGSSGASVAAAAAAAVAVVESMVTATEVAPPPPPVEVPIRKAKTKEGKGPNARRKPKGSPRVPDAKKPKPKKVAPLKIKLGGFGSKRKRSSSEDDDLDVESDFDDASINSYSVSDGSTSRSSRSRKKLRTTKKKKKGEEEVTAVDGYETDHQDYCEVCQQGGEIILCDTCPRAYHMVCLDPDMEKAPEGKWSCPHCEKEGIQWEAKEDNSEGEEILEEVGGDLEEEDDHHMEFCRVCKDGGELLCCDTCPSSYHIHCLNPPLPEIPNGEWLCPRCTCPALKGKVQKILIWKWGQPPSPTPVPRPPDADPNTPSPKPLEGRPERQFFVKWQGMSYWHCSWVSELQLELHCQVMFRNYQRKNDMDEPPSGDFGGDEEKSRKRKNKDPKFAEMEERFYRYGIKPEWMMIHRILNHSVDKKGHVHYLIKWRDLPYDQASWESEDVEIQDYDLFKQSYWNHRELMRGEEGRPGKKLKKVKLRKLERPPETPTVDPTVKYERQPEYLDATGGTLHPYQMEGLNWLRFSWAQGTDTILADEMGLGKTVQTAVFLYSLYKEGHSKGPFLVSAPLSTIINWEREFEMWAPDMYVVTYVGDKDSRAIIRENEFSFEDNAIRGGKKASRMKKEASVKFHVLLTSYELITIDMAILGSIDWACLIVDEAHRLKNNQSKFFRVLNGYSLQHKLLLTGTPLQNNLEELFHLLNFLTPERFHNLEGFLEEFADIAKEDQIKKLHDMLGPHMLRRLKADVFKNMPSKTELIVRVELSPMQKKYYKYILTRNFEALNARGGGNQVSLLNVVMDLKKCCNHPYLFPVAAMEAPKMPNGMYDGSALIRASGKLLLLQKMLKNLKEGGHRVLIFSQMTKMLDLLEDFLEHEGYKYERIDGGITGNMRQEAIDRFNAPGAQQFCFLLSTRAGGLGINLATADTVIIYDSDWNPHNDIQAFSRAHRIGQNKKVMIYRFVTRASVEERITQVAKKKMMLTHLVVRPGLGSKTGSMSKQELDDILKFGTEELFKDEATDGGGDNKEGEDSSVIHYDDKAIERLLDRNQDETEDTELQGMNEYLSSFKVAQYVVREEEMGEEEEVEREIIKQEESVDPDYWEKLLRHHYEQQQEDLARNLGKGKRIRKQVNYNDGSQEDRDWQDDQSDNQSDYSVASEEGDEDFDERSEAPRRPSRKGLRNDKDKPLPPLLARVGGNIEVLGFNARQRKAFLNAIMRYGMPPQDAFTTQWLVRDLRGKSEKEFKAYVSLFMRHLCEPGADGAETFADGVPREGLSRQHVLTRIGVMSLIRKKVQEFEHVNGRWSMPELAEVEENKKMSQPGSPSPKTPTPSTPGDTQPNTPAPVPPAEDGIKIEENSLKEEESIEGEKEVKSTAPETAIECTQAPAPASEDEKVVVEPPEGEEKVEKAEVKERTEEPMETEPKGAADVEKVEEKSAIDLTPIVVEDKEEKKEEEEKKEVMLQNGETPKDLNDEKQKKNIKQRFMFNIADGGFTELHSLWQNEERAATVTKKTYEIWHRRHDYWLLAGIINHGYARWQDIQNDPRYAILNEPFKGEMNRGNFLEIKNKFLARRFKLLEQALVIEEQLRRAAYLNMSEDPSHPSMALNTRFAEVECLAESHQHLSKESMAGNKPANAVLHKVLKQLEELLSDMKADVTRLPATIARIPPVAVRLQMSERNILSRLANRAPEPTPQQVAQQQ

SEQ ID NO: 111876 - DNA, 5661 bp, Artificial Sequence
  derived and/or modified sequence
atggacgccctgctgaacaacagcctgccccccccccaccccgagaacgaggaggaccccgaggaggacctgagcgagaccgagacccccaagctgaagaagaagaagaagcccaagaagcccagagaccccaagatccccaagagcaagagacagaagaaggagctgggcgacagcagcggcgagggccccgagttcgtggaggaggaggaggaggtggccctgagaagcgacagcgagggcagcgactacacccccggcaagaagaagaagaagaagctgggccccaagaaggagaagaagagcaagagcaagagaaaggaggaggaggaggaggaggacgacgacgacgacagcaaggagcccaagagcagcgcccagctgctggaggactggggcatggaggacatcgaccacgtgttcagcgaggaggactacagaaccctgaccaactacaaggccttcagccagttcgtgagacccctgatcgccgccaagaaccccaagatcgccgtgagcaagatgatgatggtgctgggcgccaagtggagagagttcagcaccaacaaccccttcaagggcagcagcggcgccagcgtggccgccgccgccgccgccgccgtggccgtggtggagagcatggtgaccgccaccgaggtggcccccccccccccccccgtggaggtgcccatcagaaaggccaagaccaaggagggcaagggccccaacgccagaagaaagcccaagggcagccccagagtgcccgacgccaagaagcccaagcccaagaaggtggcccccctgaagatcaagctgggcggcttcggcagcaagagaaagagaagcagcagcgaggacgacgacctggacgtggagagcgacttcgacgacgccagcatcaacagctacagcgtgagcgacggcagcaccagcagaagcagcagaagcagaaagaagctgagaaccaccaagaagaagaagaagggcgaggaggaggtgaccgccgtggacggctacgagaccgaccaccaggactactgcgaggtgtgccagcagggcggcgagatcatcctgtgcgacacctgccccagagcctaccacatggtgtgcctggaccccgacatggagaaggcccccgagggcaagtggagctgcccccactgcgagaaggagggcatccagtgggaggccaaggaggacaacagcgagggcgaggagatcctggaggaggtgggcggcgacctggaggaggaggacgaccaccacatggagttctgcagagtgtgcaaggacggcggcgagctgctgtgctgcgacacctgccccagcagctaccacatccactgcctgaacccccccctgcccgagatccccaacggcgagtggctgtgccccagatgcacctgccccgccctgaagggcaaggtgcagaagatcctgatctggaagtggggccagccccccagccccacccccgtgcccagaccccccgacgccgaccccaacacccccagccccaagcccctggagggcagacccgagagacagttcttcgtgaagtggcagggcatgagctactggcactgcagctgggtgagcgagctgcagctggagctgcactgccaggtgatgttcagaaactaccagagaaagaacgacatggacgagccccccagcggcgacttcggcggcgacgaggagaagagcagaaagagaaagaacaaggaccccaagttcgccgagatggaggagagattctacagatacggcatcaagcccgagtggatgatgatccacagaatcctgaaccacagcgtggacaagaagggccacgtgcactacctgatcaagtggagagacctgccctacgaccaggccagctgggagagcgaggacgtggagatccaggactacgacctgttcaagcagagctactggaaccacagagagctgatgagaggcgaggagggcagacccggcaagaagctgaagaaggtgaagctgagaaagctggagagaccccccgagacccccaccgtggaccccaccgtgaagtacgagagacagcccgagtacctggacgccaccggcggcaccctgcacccctaccagatggagggcctgaactggctgagattcagctgggcccagggcaccgacaccatcctggccgacgagatgggcctgggcaagaccgtgcagaccgccgtgttcctgtacagcctgtacaaggagggccacagcaagggccccttcctggtgagcgcccccctgagcaccatcatcaactgggagagagagttcgagatgtgggcccccgacatgtacgtggtgacctacgtgggcgacaaggacagcagagccatcatcagagagaacgagttcagcttcgaggacaacgccatcagaggcggcaagaaggccagcagaatgaagaaggaggccagcgtgaagttccacgtgctgctgaccagctacgagctgatcaccatcgacatggccatcctgggcagcatcgactgggcctgcctgatcgtggacgaggcccacagactgaagaacaaccagagcaagttcttcagagtgctgaacggctacagcctgcagcacaagctgctgctgaccggcacccccctgcagaacaacctggaggagctgttccacctgctgaacttcctgacccccgagagattccacaacctggagggcttcctggaggagttcgccgacatcgccaaggaggaccagatcaagaagctgcacgacatgctgggcccccacatgctgagaagactgaaggccgacgtgttcaagaacatgcccagcaagaccgagctgatcgtgagagtggagctgagccccatgcagaagaagtactacaagtacatcctgaccagaaacttcgaggccctgaacgccagaggcggcggcaaccaggtgagcctgctgaacgtggtgatggacctgaagaagtgctgcaaccacccctacctgttccccgtggccgccatggaggcccccaagatgcccaacggcatgtacgacggcagcgccctgatcagagccagcggcaagctgctgctgctgcagaagatgctgaagaacctgaaggagggcggccacagagtgctgatcttcagccagatgaccaagatgctggacctgctggaggacttcctggagcacgagggctacaagtacgagagaatcgacggcggcatcaccggcaacatgagacaggaggccatcgacagattcaacgcccccggcgcccagcagttctgcttcctgctgagcaccagagccggcggcctgggcatcaacctggccaccgccgacaccgtgatcatctacgacagcgactggaacccccacaacgacatccaggccttcagcagagcccacagaatcggccagaacaagaaggtgatgatctacagattcgtgaccagagccagcgtggaggagagaatcacccaggtggccaagaagaagatgatgctgacccacctggtggtgagacccggcctgggcagcaagaccggcagcatgagcaagcaggagctggacgacatcctgaagttcggcaccgaggagctgttcaaggacgaggccaccgacggcggcggcgacaacaaggagggcgaggacagcagcgtgatccactacgacgacaaggccatcgagagactgctggacagaaaccaggacgagaccgaggacaccgagctgcagggcatgaacgagtacctgagcagcttcaaggtggcccagtacgtggtgagagaggaggagatgggcgaggaggaggaggtggagagagagatcatcaagcaggaggagagcgtggaccccgactactgggagaagctgctgagacaccactacgagcagcagcaggaggacctggccagaaacctgggcaagggcaagagaatcagaaagcaggtgaactacaacgacggcagccaggaggacagagactggcaggacgaccagagcgacaaccagagcgactacagcgtggccagcgaggagggcgacgaggacttcgacgagagaagcgaggcccccagaagacccagcagaaagggcctgagaaacgacaaggacaagcccctgccccccctgctggccagagtgggcggcaacatcgaggtgctgggcttcaacgccagacagagaaaggccttcctgaacgccatcatgagatacggcatgcccccccaggacgccttcaccacccagtggctggtgagagacctgagaggcaagagcgagaaggagttcaaggcctacgtgagcctgttcatgagacacctgtgcgagcccggcgccgacggcgccgagaccttcgccgacggcgtgcccagagagggcctgagcagacagcacgtgctgaccagaatcggcgtgatgagcctgatcagaaagaaggtgcaggagttcgagcacgtgaacggcagatggagcatgcccgagctggccgaggtggaggagaacaagaagatgagccagcccggcagccccagccccaagacccccacccccagcacccccggcgacacccagcccaacacccccgcccccgtgccccccgccgaggacggcatcaagatcgaggagaacagcctgaaggaggaggagagcatcgagggcgagaaggaggtgaagagcaccgcccccgagaccgccatcgagtgcacccaggcccccgcccccgccagcgaggacgagaaggtggtggtggagccccccgagggcgaggagaaggtggagaaggccgaggtgaaggagagaaccgaggagcccatggagaccgagcccaagggcgccgccgacgtggagaaggtggaggagaagagcgccatcgacctgacccccatcgtggtggaggacaaggaggagaagaaggaggaggaggagaagaaggaggtgatgctgcagaacggcgagacccccaaggacctgaacgacgagaagcagaagaagaacatcaagcagagattcatgttcaacatcgccgacggcggcttcaccgagctgcacagcctgtggcagaacgaggagagagccgccaccgtgaccaagaagacctacgagatctggcacagaagacacgactactggctgctggccggcatcatcaaccacggctacgccagatggcaggacatccagaacgaccccagatacgccatcctgaacgagcccttcaagggcgagatgaacagaggcaacttcctggagatcaagaacaagttcctggccagaagattcaagctgctggagcaggccctggtgatcgaggagcagctgagaagagccgcctacctgaacatgagcgaggaccccagccaccccagcatggccctgaacaccagattcgccgaggtggagtgcctggccgagagccaccagcacctgagcaaggagagcatggccggcaacaagcccgccaacgccgtgctgcacaaggtgctgaagcagctggaggagctgctgagcgacatgaaggccgacgtgaccagactgcccgccaccatcgccagaatcccccccgtggccgtgagactgcagatgagcgagagaaacatcctgagcagactggccaacagagcccccgagcccaccccccagcaggtggcccagcagcagtag

SEQ ID NO: 111877 - DNA, 5718 bp, Artificial Sequence
  derived and/or modified sequence
atggccagcggcctgggcagccccagcccctgcagcgccggcagcgaggaggaggacatggacgccctgctgaacaacagcctgccccccccccaccccgagaacgaggaggaccccgaggaggacctgagcgagaccgagacccccaagctgaagaagaagaagaagcccaagaagcccagagaccccaagatccccaagagcaagagacagaagaaggagctgggcgacagcagcggcgagggccccgagttcgtggaggaggaggaggaggtggccctgagaagcgacagcgagggcagcgactacacccccggcaagaagaagaagaagaagctgggccccaagaaggagaagaagagcaagagcaagagaaaggaggaggaggaggaggaggacgacgacgacgacagcaaggagcccaagagcagcgcccagctgctggaggactggggcatggaggacatcgaccacgtgttcagcgaggaggactacagaaccctgaccaactacaaggccttcagccagttcgtgagacccctgatcgccgccaagaaccccaagatcgccgtgagcaagatgatgatggtgctgggcgccaagtggagagagttcagcaccaacaaccccttcaagggcagcagcggcgccagcgtggccgccgccgccgccgccgccgtggccgtggtggagagcatggtgaccgccaccgaggtggcccccccccccccccccgtggaggtgcccatcagaaaggccaagaccaaggagggcaagggccccaacgccagaagaaagcccaagggcagccccagagtgcccgacgccaagaagcccaagcccaagaaggtggcccccctgaagatcaagctgggcggcttcggcagcaagagaaagagaagcagcagcgaggacgacgacctggacgtggagagcgacttcgacgacgccagcatcaacagctacagcgtgagcgacggcagcaccagcagaagcagcagaagcagaaagaagctgagaaccaccaagaagaagaagaagggcgaggaggaggtgaccgccgtggacggctacgagaccgaccaccaggactactgcgaggtgtgccagcagggcggcgagatcatcctgtgcgacacctgccccagagcctaccacatggtgtgcctggaccccgacatggagaaggcccccgagggcaagtggagctgcccccactgcgagaaggagggcatccagtgggaggccaaggaggacaacagcgagggcgaggagatcctggaggaggtgggcggcgacctggaggaggaggacgaccaccacatggagttctgcagagtgtgcaaggacggcggcgagctgctgtgctgcgacacctgccccagcagctaccacatccactgcctgaacccccccctgcccgagatccccaacggcgagtggctgtgccccagatgcacctgccccgccctgaagggcaaggtgcagaagatcctgatctggaagtggggccagccccccagccccacccccgtgcccagaccccccgacgccgaccccaacacccccagccccaagcccctggagggcagacccgagagacagttcttcgtgaagtggcagggcatgagctactggcactgcagctgggtgagcgagctgcagctggagctgcactgccaggtgatgttcagaaactaccagagaaagaacgacatggacgagccccccagcggcgacttcggcggcgacgaggagaagagcagaaagagaaagaacaaggaccccaagttcgccgagatggaggagagattctacagatacggcatcaagcccgagtggatgatgatccacagaatcctgaaccacagcgtggacaagaagggccacgtgcactacctgatcaagtggagagacctgccctacgaccaggccagctgggagagcgaggacgtggagatccaggactacgacctgttcaagcagagctactggaaccacagagagctgatgagaggcgaggagggcagacccggcaagaagctgaagaaggtgaagctgagaaagctggagagaccccccgagacccccaccgtggaccccaccgtgaagtacgagagacagcccgagtacctggacgccaccggcggcaccctgcacccctaccagatggagggcctgaactggctgagattcagctgggcccagggcaccgacaccatcctggccgacgagatgggcctgggcaagaccgtgcagaccgccgtgttcctgtacagcctgtacaaggagggccacagcaagggccccttcctggtgagcgcccccctgagcaccatcatcaactgggagagagagttcgagatgtgggcccccgacatgtacgtggtgacctacgtgggcgacaaggacagcagagccatcatcagagagaacgagttcagcttcgaggacaacgccatcagaggcggcaagaaggccagcagaatgaagaaggaggccagcgtgaagttccacgtgctgctgaccagctacgagctgatcaccatcgacatggccatcctgggcagcatcgactgggcctgcctgatcgtggacgaggcccacagactgaagaacaaccagagcaagttcttcagagtgctgaacggctacagcctgcagcacaagctgctgctgaccggcacccccctgcagaacaacctggaggagctgttccacctgctgaacttcctgacccccgagagattccacaacctggagggcttcctggaggagttcgccgacatcgccaaggaggaccagatcaagaagctgcacgacatgctgggcccccacatgctgagaagactgaaggccgacgtgttcaagaacatgcccagcaagaccgagctgatcgtgagagtggagctgagccccatgcagaagaagtactacaagtacatcctgaccagaaacttcgaggccctgaacgccagaggcggcggcaaccaggtgagcctgctgaacgtggtgatggacctgaagaagtgctgcaaccacccctacctgttccccgtggccgccatggaggcccccaagatgcccaacggcatgtacgacggcagcgccctgatcagagccagcggcaagctgctgctgctgcagaagatgctgaagaacctgaaggagggcggccacagagtgctgatcttcagccagatgaccaagatgctggacctgctggaggacttcctggagcacgagggctacaagtacgagagaatcgacggcggcatcaccggcaacatgagacaggaggccatcgacagattcaacgcccccggcgcccagcagttctgcttcctgctgagcaccagagccggcggcctgggcatcaacctggccaccgccgacaccgtgatcatctacgacagcgactggaacccccacaacgacatccaggccttcagcagagcccacagaatcggccagaacaagaaggtgatgatctacagattcgtgaccagagccagcgtggaggagagaatcacccaggtggccaagaagaagatgatgctgacccacctggtggtgagacccggcctgggcagcaagaccggcagcatgagcaagcaggagctggacgacatcctgaagttcggcaccgaggagctgttcaaggacgaggccaccgacggcggcggcgacaacaaggagggcgaggacagcagcgtgatccactacgacgacaaggccatcgagagactgctggacagaaaccaggacgagaccgaggacaccgagctgcagggcatgaacgagtacctgagcagcttcaaggtggcccagtacgtggtgagagaggaggagatgggcgaggaggaggaggtggagagagagatcatcaagcaggaggagagcgtggaccccgactactgggagaagctgctgagacaccactacgagcagcagcaggaggacctggccagaaacctgggcaagggcaagagaatcagaaagcaggtgaactacaacgacggcagccaggaggacagagactggcaggacgaccagagcgacaaccagagcgactacagcgtggccagcgaggagggcgacgaggacttcgacgagagaagcgaggcccccagaagacccagcagaaagggcctgagaaacgacaaggacaagcccctgccccccctgctggccagagtgggcggcaacatcgaggtgctgggcttcaacgccagacagagaaaggccttcctgaacgccatcatgagatacggcatgcccccccaggacgccttcaccacccagtggctggtgagagacctgagaggcaagagcgagaaggagttcaaggcctacgtgagcctgttcatgagacacctgtgcgagcccggcgccgacggcgccgagaccttcgccgacggcgtgcccagagagggcctgagcagacagcacgtgctgaccagaatcggcgtgatgagcctgatcagaaagaaggtgcaggagttcgagcacgtgaacggcagatggagcatgcccgagctggccgaggtggaggagaacaagaagatgagccagcccggcagccccagccccaagacccccacccccagcacccccggcgacacccagcccaacacccccgcccccgtgccccccgccgaggacggcatcaagatcgaggagaacagcctgaaggaggaggagagcatcgagggcgagaaggaggtgaagagcaccgcccccgagaccgccatcgagtgcacccaggcccccgcccccgccagcgaggacgagaaggtggtggtggagccccccgagggcgaggagaaggtggagaaggccgaggtgaaggagagaaccgaggagcccatggagaccgagcccaagggcgccgccgacgtggagaaggtggaggagaagagcgccatcgacctgacccccatcgtggtggaggacaaggaggagaagaaggaggaggaggagaagaaggaggtgatgctgcagaacggcgagacccccaaggacctgaacgacgagaagcagaagaagaacatcaagcagagattcatgttcaacatcgccgacggcggcttcaccgagctgcacagcctgtggcagaacgaggagagagccgccaccgtgaccaagaagacctacgagatctggcacagaagacacgactactggctgctggccggcatcatcaaccacggctacgccagatggcaggacatccagaacgaccccagatacgccatcctgaacgagcccttcaagggcgagatgaacagaggcaacttcctggagatcaagaacaagttcctggccagaagattcaagctgctggagcaggccctggtgatcgaggagcagctgagaagagccgcctacctgaacatgagcgaggaccccagccaccccagcatggccctgaacaccagattcgccgaggtggagtgcctggccgagagccaccagcacctgagcaaggagagcatggccggcaacaagcccgccaacgccgtgctgcacaaggtgctgaagcagctggaggagctgctgagcgacatgaaggccgacgtgaccagactgcccgccaccatcgccagaatcccccccgtggccgtgagactgcagatgagcgagagaaacatcctgagcagactggccaacagagcccccgagcccaccccccagcaggtggcccagcagcagtag

SEQ ID NO: 111878 - DNA, 6434 bp, Artificial Sequence
  derived and/or modified sequence
attttccccccttcggccgcggcgaggaggagccggagcgggagtgacaccgagccggacccagcgcgacctgcggcggctccgggtgactcgggccagtgtagaggtcctcaggccgccggcaggagcagctgggccaattccctggccgggagcggaaggggcagtgaggaggaggatatggatgcacttttgaacaacagcctgcccccaccccacccagaaaatgaagaggacccagaagaggatttgtcagaaacagagactccaaagctcaagaagaagaaaaagcctaagaaacctcgggaccctaaaatccctaagagcaagcgccaaaaaaaggagctgggggacagctctggggaggggccagagtttgtggaggaggaggaagaggtggctctgcgctcagacagtgagggcagcgactatactcctggcaagaagaagaagaagaagcttggacctaagaaagagaagaagagcaaatccaagcggaaggaggaggaggaggaggaggatgatgatgatgattcaaaggagcctaaatcatctgctcagctcctggaagactggggcatggaagacattgaccacgtgttctcagaggaggattatcgaaccctcaccaactacaaggccttcagccagtttgtcagacccctcattgctgccaaaaatcccaagattgctgtctccaagatgatgatggttttgggtgcaaaatggcgggagttcagtaccaataaccccttcaaaggcagttctggggcatcagtggcagctgcggcagcagcagcggtagctgtggtggagagcatggtgacagccactgaggttgcaccaccacctccccctgtggaggtgcctatccgcaaggccaagaccaaggagggcaaaggtcccaatgctcggaggaagcccaagggcagccctcgtgtacctgatgccaagaagcctaaacccaagaaagtagctcccctgaaaatcaagctgggaggttttggttccaagcgtaagagatcctcgagtgaggatgatgacttagatgtggaatctgacttcgatgatgccagtatcaatagctattctgtttctgatggttccaccagccgtagtagccgcagccgcaagaaactccgaaccactaaaaagaaaaagaaaggcgaggaggaggtgactgctgtggatggttatgagacagaccaccaggactattgcgaggtgtgccagcaaggcggtgagatcatcctgtgtgatacctgtccccgtgcttaccacatggtctgcctggatcccgacatggagaaggctcccgagggcaagtggagctgcccacactgcgagaaggaaggcatccagtgggaagctaaagaggacaattcggagggtgaggagatcctggaagaggttgggggagacctcgaagaggaggatgaccaccatatggaattctgtcgggtctgcaaggatggtggggaactgctctgctgtgatacctgtccttcttcctaccacatccactgcctgaatcccccacttccagagatccccaacggtgaatggctctgtccccgttgtacgtgtccagctctgaagggcaaagtgcagaagatcctaatctggaagtggggtcagccaccatctcccacaccagtgcctcggcctccagatgctgatcccaacacgccctccccaaagcccttggaggggcggccagagcggcagttctttgtgaaatggcaaggcatgtcttactggcactgctcctgggtttctgaactgcagctggagctgcactgtcaggtgatgttccgaaactatcagcggaagaatgatatggatgagccaccttctggggactttggtggtgatgaagagaaaagccgaaagcgaaagaacaaggaccctaaatttgcagagatggaggaacgcttctatcgctatgggataaaacccgagtggatgatgatccaccgaatcctcaaccacagtgtggacaagaagggccacgtccactacttgatcaagtggcgggacttaccttacgatcaggcttcttgggagagtgaggatgtggagatccaggattacgacctgttcaagcagagctattggaatcacagggagttaatgaggggtgaggaaggccgaccaggcaagaagctcaagaaggtgaagcttcggaagttggagaggcctccagaaacgccaacagttgatccaacagtgaagtatgagcgacagccagagtacctggatgctacaggtggaaccctgcacccctatcaaatggagggcctgaattggttgcgcttctcctgggctcagggcactgacaccatcttggctgatgagatgggccttgggaaaactgtacagacagcagtcttcctgtattccctttacaaggagggtcattccaaaggccccttcctagtgagcgcccctctttctaccatcatcaactgggagcgggagtttgaaatgtgggctccagacatgtatgtcgtaacctatgtgggtgacaaggacagccgtgccatcatccgagagaatgagttctcctttgaagacaatgccattcgtggtggcaagaaggcctcccgcatgaagaaagaggcatctgtgaaattccatgtgctgctgacatcctatgaattgatcaccattgacatggctattttgggctctattgattgggcctgcctcatcgtggatgaagcccatcggctgaagaacaatcagtctaagttcttccgggtattgaatggttactcactccagcacaagctgttgctgactgggacaccattacaaaacaatctggaagagttgtttcatctgctcaactttctcacccccgagaggttccacaatttggaaggttttttggaggagtttgctgacattgccaaggaggaccagataaaaaaactgcatgacatgctggggccgcacatgttgcggcggctcaaagccgatgtgttcaagaacatgccctccaagacagaactaattgtgcgtgtggagctgagccctatgcagaagaaatactacaagtacatcctcactcgaaattttgaagcactcaatgcccgaggtggtggcaaccaggtgtctctgctgaatgtggtgatggatcttaagaagtgctgcaaccatccatacctcttccctgtggctgcaatggaagctcctaagatgcctaatggcatgtatgatggcagtgccctaatcagagcatctgggaaattattgctgctgcagaaaatgctcaagaaccttaaggagggtgggcatcgtgtactcatcttttcccagatgaccaagatgctagacctgctagaggatttcttggaacatgaaggttataaatacgaacgcatcgatggtggaatcactgggaacatgcggcaagaggccattgaccgcttcaatgcaccgggtgctcagcagttctgcttcttgctttccactcgagctgggggccttggaatcaatctggccactgctgacacagttattatctatgactctgactggaacccccataatgacattcaggcctttagcagagctcaccggattgggcaaaataaaaaggtaatgatctaccggtttgtgacccgtgcgtcagtggaggagcgcatcacgcaggtggcaaagaagaaaatgatgctgacgcatctagtggtgcggcctgggctgggctccaagactggatctatgtccaaacaggagcttgatgatatcctcaaatttggcactgaggaactattcaaggatgaagccactgatggaggaggagacaacaaagagggagaagatagcagtgttatccactacgatgataaggccattgaacggctgctagaccgtaaccaggatgagactgaagacacagaattgcagggcatgaatgaatatttgagctcattcaaagtggcccagtatgtggtacgggaagaagaaatgggggaggaagaggaggtagaacgggaaatcattaaacaggaagaaagtgtggatcctgactactgggagaaattgctgcggcaccattatgagcagcagcaagaagatctagcccgaaatctgggcaaaggaaaaagaatccgtaaacaggtcaactacaatgatggctcccaggaggaccgagattggcaggacgaccagtccgacaaccagtccgattactcagtggcttcagaggaaggtgatgaagactttgatgaacgttcagaagctccccgtaggcccagtcgtaagggcctgcggaatgataaagataagccattgcctcctctgttggcccgtgttggtgggaatattgaagtacttggttttaatgctcgtcagcgaaaagcctttcttaatgcaattatgcgatatggtatgccacctcaggatgcttttactacccagtggcttgtaagagacctgcgaggcaaatcagagaaagagttcaaggcatatgtctctcttttcatgcggcatttatgtgagccgggggcagatggggctgagacctttgctgatggtgtcccccgagaaggcctgtctcgccagcatgtccttactagaattggtgttatgtctttgattcgcaagaaggttcaggagtttgaacatgttaatgggcgctggagcatgcctgaactggctgaggtggaggaaaacaagaagatgtcccagccagggtcaccctccccaaaaactcctacaccctccactccaggggacacgcagcccaacactcctgcacctgtcccacctgctgaagatgggataaaaatagaggaaaatagcctcaaagaagaagagagcatagaaggagaaaaggaggttaaatctacagcccctgagactgccattgagtgtacacaggcccctgcccctgcctcagaggatgaaaaggtcgttgttgaaccccctgagggagaggagaaagtggaaaaggcagaggtgaaggagagaacagaggaacctatggagacagagcccaaaggtgctgctgatgtagagaaggtggaggaaaagtcagcaatagatctgacccctattgtggtagaagacaaagaagagaagaaagaagaagaagagaaaaaagaggtgatgcttcagaatggagagacccccaaggacctgaatgatgagaaacagaagaaaaatattaaacaacgtttcatgtttaacattgcagatggtggttttactgagttgcactccctttggcagaatgaagagcgggcagccacagttaccaagaagacttatgagatctggcatcgacggcatgactactggctgctagccggcattataaaccatggctatgcccggtggcaagacatccagaatgacccacgctatgccatcctcaatgagcctttcaagggtgaaatgaaccgtggcaatttcttagagatcaagaataaatttctagctcgaaggtttaagctcttagaacaagctctggtgattgaggaacagctgcgccgggctgcttacttgaacatgtcagaagacccttctcacccttccatggccctcaacacccgctttgctgaggtggagtgtttggcggaaagtcatcagcacctgtccaaggagtcaatggcaggaaacaagccagccaatgcagtcctgcacaaagttctgaaacagctggaagaactgctgagtgacatgaaagctgatgtgactcgactcccagctaccattgcccgaattcccccagttgctgtgaggttacagatgtcagagcgtaacattctcagccgcctggcaaaccgggcacccgaacctaccccacagcaggtagcccagcagcagtgaagatgcagactgataccacctccaccgctgagcagtgaccttcctcactttctcttgtcccagcttctcccctgggggcctgagagaccctcaccttccttctgcccatcttccatgttgtaaaggaacagccccagtgcactgggggaggggagggagtgaggggcagtggtgcccttcctgcagaagagacatgcagcagtagcgctggcgccatctgcaggagctggcgggctggccttctggaccctggcttctccccactgtaacgcctgttacacacaaactgttgtgggttcctgccaggcttgaagaaaatgatctgaattttttcctccttttggttttattttgttggtttattttgtgttttcttttctcctttttggggggtattcagagtgggctgggcccctgggcgagacacagctacctctgttggcatctttttaataccaggaacccagcggctctagccactgagcggctaaatgaaataaagtggaaaaaaaaaaaaaggaaaaaaccaaaagcataaaaaaccacagcaaatttcttgatgaaaattgaaaataaaagtttccttgtatttt

SEQ ID NO: 111879 - DNA, 6514 bp, Artificial Sequence
  derived and/or modified sequence
gtttcaggccctttaagaggcgacgctggagccggagccattttccccccttcggccgcggcgaggaggagccggagcgggagtgacaccgagccggacccagcgcgacctgcggcggctccgggtgactcgggccagtgtagaggtcctcaggccgccggcaggagcagctgggccaattccctggccgggagcggaaggggatggcgtcgggcctgggctccccgtccccctgctcggcgggcagtgaggaggaggatatggatgcacttttgaacaacagcctgcccccaccccacccagaaaatgaagaggacccagaagaggatttgtcagaaacagagactccaaagctcaagaagaagaaaaagcctaagaaacctcgggaccctaaaatccctaagagcaagcgccaaaaaaaggagctgggggacagctctggggaggggccagagtttgtggaggaggaggaagaggtggctctgcgctcagacagtgagggcagcgactatactcctggcaagaagaagaagaagaagcttggacctaagaaagagaagaagagcaaatccaagcggaaggaggaggaggaggaggaggatgatgatgatgattcaaaggagcctaaatcatctgctcagctcctggaagactggggcatggaagacattgaccacgtgttctcagaggaggattatcgaaccctcaccaactacaaggccttcagccagtttgtcagacccctcattgctgccaaaaatcccaagattgctgtctccaagatgatgatggttttgggtgcaaaatggcgggagttcagtaccaataaccccttcaaaggcagttctggggcatcagtggcagctgcggcagcagcagcggtagctgtggtggagagcatggtgacagccactgaggttgcaccaccacctccccctgtggaggtgcctatccgcaaggccaagaccaaggagggcaaaggtcccaatgctcggaggaagcccaagggcagccctcgtgtacctgatgccaagaagcctaaacccaagaaagtagctcccctgaaaatcaagctgggaggttttggttccaagcgtaagagatcctcgagtgaggatgatgacttagatgtggaatctgacttcgatgatgccagtatcaatagctattctgtttctgatggttccaccagccgtagtagccgcagccgcaagaaactccgaaccactaaaaagaaaaagaaaggcgaggaggaggtgactgctgtggatggttatgagacagaccaccaggactattgcgaggtgtgccagcaaggcggtgagatcatcctgtgtgatacctgtccccgtgcttaccacatggtctgcctggatcccgacatggagaaggctcccgagggcaagtggagctgcccacactgcgagaaggaaggcatccagtgggaagctaaagaggacaattcggagggtgaggagatcctggaagaggttgggggagacctcgaagaggaggatgaccaccatatggaattctgtcgggtctgcaaggatggtggggaactgctctgctgtgatacctgtccttcttcctaccacatccactgcctgaatcccccacttccagagatccccaacggtgaatggctctgtccccgttgtacgtgtccagctctgaagggcaaagtgcagaagatcctaatctggaagtggggtcagccaccatctcccacaccagtgcctcggcctccagatgctgatcccaacacgccctccccaaagcccttggaggggcggccagagcggcagttctttgtgaaatggcaaggcatgtcttactggcactgctcctgggtttctgaactgcagctggagctgcactgtcaggtgatgttccgaaactatcagcggaagaatgatatggatgagccaccttctggggactttggtggtgatgaagagaaaagccgaaagcgaaagaacaaggaccctaaatttgcagagatggaggaacgcttctatcgctatgggataaaacccgagtggatgatgatccaccgaatcctcaaccacagtgtggacaagaagggccacgtccactacttgatcaagtggcgggacttaccttacgatcaggcttcttgggagagtgaggatgtggagatccaggattacgacctgttcaagcagagctattggaatcacagggagttaatgaggggtgaggaaggccgaccaggcaagaagctcaagaaggtgaagcttcggaagttggagaggcctccagaaacgccaacagttgatccaacagtgaagtatgagcgacagccagagtacctggatgctacaggtggaaccctgcacccctatcaaatggagggcctgaattggttgcgcttctcctgggctcagggcactgacaccatcttggctgatgagatgggccttgggaaaactgtacagacagcagtcttcctgtattccctttacaaggagggtcattccaaaggccccttcctagtgagcgcccctctttctaccatcatcaactgggagcgggagtttgaaatgtgggctccagacatgtatgtcgtaacctatgtgggtgacaaggacagccgtgccatcatccgagagaatgagttctcctttgaagacaatgccattcgtggtggcaagaaggcctcccgcatgaagaaagaggcatctgtgaaattccatgtgctgctgacatcctatgaattgatcaccattgacatggctattttgggctctattgattgggcctgcctcatcgtggatgaagcccatcggctgaagaacaatcagtctaagttcttccgggtattgaatggttactcactccagcacaagctgttgctgactgggacaccattacaaaacaatctggaagagttgtttcatctgctcaactttctcacccccgagaggttccacaatttggaaggttttttggaggagtttgctgacattgccaaggaggaccagataaaaaaactgcatgacatgctggggccgcacatgttgcggcggctcaaagccgatgtgttcaagaacatgccctccaagacagaactaattgtgcgtgtggagctgagccctatgcagaagaaatactacaagtacatcctcactcgaaattttgaagcactcaatgcccgaggtggtggcaaccaggtgtctctgctgaatgtggtgatggatcttaagaagtgctgcaaccatccatacctcttccctgtggctgcaatggaagctcctaagatgcctaatggcatgtatgatggcagtgccctaatcagagcatctgggaaattattgctgctgcagaaaatgctcaagaaccttaaggagggtgggcatcgtgtactcatcttttcccagatgaccaagatgctagacctgctagaggatttcttggaacatgaaggttataaatacgaacgcatcgatggtggaatcactgggaacatgcggcaagaggccattgaccgcttcaatgcaccgggtgctcagcagttctgcttcttgctttccactcgagctgggggccttggaatcaatctggccactgctgacacagttattatctatgactctgactggaacccccataatgacattcaggcctttagcagagctcaccggattgggcaaaataaaaaggtaatgatctaccggtttgtgacccgtgcgtcagtggaggagcgcatcacgcaggtggcaaagaagaaaatgatgctgacgcatctagtggtgcggcctgggctgggctccaagactggatctatgtccaaacaggagcttgatgatatcctcaaatttggcactgaggaactattcaaggatgaagccactgatggaggaggagacaacaaagagggagaagatagcagtgttatccactacgatgataaggccattgaacggctgctagaccgtaaccaggatgagactgaagacacagaattgcagggcatgaatgaatatttgagctcattcaaagtggcccagtatgtggtacgggaagaagaaatgggggaggaagaggaggtagaacgggaaatcattaaacaggaagaaagtgtggatcctgactactgggagaaattgctgcggcaccattatgagcagcagcaagaagatctagcccgaaatctgggcaaaggaaaaagaatccgtaaacaggtcaactacaatgatggctcccaggaggaccgagattggcaggacgaccagtccgacaaccagtccgattactcagtggcttcagaggaaggtgatgaagactttgatgaacgttcagaagctccccgtaggcccagtcgtaagggcctgcggaatgataaagataagccattgcctcctctgttggcccgtgttggtgggaatattgaagtacttggttttaatgctcgtcagcgaaaagcctttcttaatgcaattatgcgatatggtatgccacctcaggatgcttttactacccagtggcttgtaagagacctgcgaggcaaatcagagaaagagttcaaggcatatgtctctcttttcatgcggcatttatgtgagccgggggcagatggggctgagacctttgctgatggtgtcccccgagaaggcctgtctcgccagcatgtccttactagaattggtgttatgtctttgattcgcaagaaggttcaggagtttgaacatgttaatgggcgctggagcatgcctgaactggctgaggtggaggaaaacaagaagatgtcccagccagggtcaccctccccaaaaactcctacaccctccactccaggggacacgcagcccaacactcctgcacctgtcccacctgctgaagatgggataaaaatagaggaaaatagcctcaaagaagaagagagcatagaaggagaaaaggaggttaaatctacagcccctgagactgccattgagtgtacacaggcccctgcccctgcctcagaggatgaaaaggtcgttgttgaaccccctgagggagaggagaaagtggaaaaggcagaggtgaaggagagaacagaggaacctatggagacagagcccaaaggtgctgctgatgtagagaaggtggaggaaaagtcagcaatagatctgacccctattgtggtagaagacaaagaagagaagaaagaagaagaagagaaaaaagaggtgatgcttcagaatggagagacccccaaggacctgaatgatgagaaacagaagaaaaatattaaacaacgtttcatgtttaacattgcagatggtggttttactgagttgcactccctttggcagaatgaagagcgggcagccacagttaccaagaagacttatgagatctggcatcgacggcatgactactggctgctagccggcattataaaccatggctatgcccggtggcaagacatccagaatgacccacgctatgccatcctcaatgagcctttcaagggtgaaatgaaccgtggcaatttcttagagatcaagaataaatttctagctcgaaggtttaagctcttagaacaagctctggtgattgaggaacagctgcgccgggctgcttacttgaacatgtcagaagacccttctcacccttccatggccctcaacacccgctttgctgaggtggagtgtttggcggaaagtcatcagcacctgtccaaggagtcaatggcaggaaacaagccagccaatgcagtcctgcacaaagttctgaaacagctggaagaactgctgagtgacatgaaagctgatgtgactcgactcccagctaccattgcccgaattcccccagttgctgtgaggttacagatgtcagagcgtaacattctcagccgcctggcaaaccgggcacccgaacctaccccacagcaggtagcccagcagcagtgaagatgcagactgataccacctccaccgctgagcagtgaccttcctcactttctcttgtcccagcttctcccctgggggcctgagagaccctcaccttccttctgcccatcttccatgttgtaaaggaacagccccagtgcactgggggaggggagggagtgaggggcagtggtgcccttcctgcagaagagacatgcagcagtagcgctggcgccatctgcaggagctggcgggctggccttctggaccctggcttctccccactgtaacgcctgttacacacaaactgttgtgggttcctgccaggcttgaagaaaatgatctgaattttttcctccttttggttttattttgttggtttattttgtgttttcttttctcctttttggggggtattcagagtgggctgggcccctgggcgagacacagctacctctgttggcatctttttaataccaggaacccagcggctctagccactgagcggctaaatgaaataaagtggaaaaaaaaaaaaaggaaaaaaccaaaagcataaaaaaccacagcaaatttcttgatgaaaattgaaaataaaagtttccttgtatttt

SEQ ID NO: 111880 - DNA, 5661 bp, Artificial Sequence
  derived and/or modified sequence
atggacgctctgctcaataactcattacctccaccacacccagagaacgaagaggatcccgaggaggatcttagcgagactgaaactccgaaactgaagaagaaaaagaagcccaagaagcccagagaccccaaaattccaaagtctaaacgacaaaagaaggagcttggagatagcagtggagaagggcccgagttcgtggaagaggaggaagaggtagctctcagaagtgacagcgagggctccgactacacacccggtaaaaaaaagaaaaagaaattgggacccaaaaaggagaagaagtccaaaagtaagcgcaaagaagaagaggaggaggaggatgatgatgacgattcgaaagaacctaagagcagcgcacaattgctggaggattggggtatggaggatatcgaccatgtcttcagtgaggaggactacaggactctcacgaattacaaggcttttagccagtttgtgcgcccactcatagcagccaaaaatcccaagattgcagtatccaaaatgatgatggtcctgggcgccaagtggcgggaattcagtaccaataatcctttcaaaggatctagcggcgctagcgtcgctgctgccgcagctgcagccgtagccgtggtggaatccatggtgacagctacagaagtagcaccaccacctcctccagtcgaagttccaattcgaaaggcgaagaccaaagaagggaagggaccgaacgcaagaaggaagccaaagggtagtccccgggtccctgatgccaagaagcctaaaccaaagaaggtggcgccccttaaaatcaagctgggtggattcggctcaaagcggaaacgcagctcctcagaagacgatgatctggatgtcgagtctgattttgacgacgcgtccataaacagttattcggttagcgacggttctacctctagatcaagccggagcagaaaaaaactgcgcaccactaagaagaagaaaaagggggaagaagaggtgacagccgttgacggctacgagactgatcaccaagactactgcgaggtgtgtcagcaaggtggagagatcatattgtgtgacacttgccccagggcataccatatggtgtgtctcgaccctgacatggaaaaagcgcccgaagggaaatggtcctgcccccactgcgaaaaggagggcatccagtgggaggcaaaggaggacaattctgaaggggaggaaattttggaggaggtggggggagatctcgaggaagaggatgaccaccacatggagttttgtagagtgtgcaaagacggcggggaactgctctgttgtgatacctgtccctcatcttaccatatccattgtctcaaccctccattgcctgagattccaaacggggagtggctgtgcccccgctgtacatgtcccgccctgaaagggaaagtgcagaaaatcttgatttggaaatggggtcagcccccgtccccaacaccagtgcctcgacctcctgatgcagatcccaatactccttccccaaagccactggaaggacgacccgaaaggcaattctttgtaaagtggcaggggatgtcttactggcactgttcatgggtgtcggaactgcaactggaactgcattgtcaagttatgttccgaaactatcaacgcaaaaatgacatggacgagccccctagtggagatttcggaggagacgaagagaagtcacgaaagcgcaaaaataaagatcccaaatttgcggagatggaggagcggttttatcgctatgggatcaaacctgaatggatgatgatacaccgcatactcaaccactctgtggacaagaaaggacacgtacactatctgatcaaatggagggatttgccatacgaccaggcctcatgggagagcgaggacgtcgagattcaggattacgacctgttcaaacagagctactggaatcacagggagcttatgagaggggaagagggccgcccaggcaaaaagctcaagaaggtcaagctgcgcaagctggagaggcctccagaaacaccgaccgttgatccaacggtgaaatatgagagacagccggagtacctcgatgcaaccggcgggacactgcacccataccagatggagggtctgaattggcttcgattttcttgggcccaaggcaccgacacaatcttggccgacgagatgggccttgggaaaactgtgcaaacggctgtattcctctactctttatacaaggagggccactccaaggggcccttcctcgtttcagctcccctgtctaccattattaattgggagcgagagttcgagatgtgggccccagacatgtacgtggttacatacgttggagataaggactctcgcgctattatccgcgaaaacgagttctcctttgaggacaatgccatacgagggggcaagaaggctagccgtatgaagaaagaggctagcgtgaaattccacgttcttctcacgtcatacgagttgattacgatagacatggccattctgggttcgatagattgggcctgtctcatcgtggacgaagcccaccgcctgaaaaacaatcaaagcaaattttttcgggttctcaatggttactcgctgcagcataaactgcttctcacagggacacctctgcagaacaacctcgaggagctgtttcacttgctcaatttcctgacaccagagagatttcacaacttggagggatttttagaagagttcgctgatatcgctaaagaagatcagattaagaaactccacgatatgctgggtccccacatgttgaggaggttaaaagcagatgtgtttaagaatatgccctcaaaaaccgaactgattgtgagagtcgaactttccccgatgcagaaaaaatactacaaatacattctgaccaggaacttcgaagctctgaatgctcgaggcggtggaaatcaagtctctctgctgaacgttgttatggatctgaagaaatgctgcaaccatccatacctgttccctgtggctgcgatggaagcgccaaagatgccaaatggcatgtacgacggatcagcgctaatccgagcatccgggaaactgctcctgctgcagaaaatgttaaagaaccttaaagaaggcggccatagggtgctgattttttctcagatgacgaaaatgctggaccttttggaagacttcctggagcatgaaggctataagtatgaaagaatagatgggggtattacagggaacatgcggcaagaggctatcgaccgcttcaacgccccaggtgctcagcagttctgtttcctgttatcaacacgggccggaggcttgggcattaatttggccaccgcagatactgtgattatatacgattcagattggaatcctcataacgatattcaggcattttccagggcacacagaatcggacagaacaaaaaggtcatgatctatcgattcgttaccagggcctctgtcgaggagaggatcacccaagtcgccaagaaaaagatgatgctaacacatctggtggtgaggccgggcctcggaagtaagactgggtctatgtctaaacaggagctagacgatatcctgaagtttggcaccgaagaactatttaaggatgaggccacagacggtgggggtgataacaaggagggtgaggatagctccgttatccattacgatgacaaggctatcgagcgccttcttgaccgcaaccaggatgagacagaagacaccgaactgcaaggtatgaatgagtatctctcttcgttcaaggttgcacagtacgtcgtgcgcgaggaggaaatgggagaagaggaggaggtcgaacgtgaaataatcaaacaagaagaatccgttgaccccgactattgggaaaagctcctgcgacatcactacgagcagcaacaagaagacttggccagaaacctgggaaaaggcaagagaattcgaaaacaggttaattacaatgatgggagccaggaggaccgggactggcaggatgaccagtctgataatcagtcagattattcggtggccagcgaggagggcgatgaggactttgacgagcggtcggaggcccccaggagaccttcccgcaaagggctgcgaaacgacaaggacaagccgctccctccccttctggcacgggtgggcgggaatatcgaggtgctgggatttaacgccaggcaacgcaaagctttcctgaatgctatcatgaggtacgggatgcccccccaagatgctttcacaacccagtggctcgtgagagatctgaggggtaagtctgaaaaggaatttaaggcctacgtttcattgtttatgcgccacctctgtgaacccggcgccgatggcgctgagacctttgccgacggagtcccccgggaaggattgtctaggcagcatgtgttgactcgaatcggcgtcatgtccctgatccgcaaaaaggtccaggagttcgagcacgtcaatggtagatggtctatgccggagctggctgaagtggaggaaaacaagaaaatgtcgcagcccggttccccctctcccaagactcccacgccctctacgcccggggatacacaacctaacaccccagcccctgttccccccgcggaagacgggataaaaatagaagagaacagcctgaaggaagaggaatccattgagggcgagaaagaggttaaaagcaccgctccagagacagctattgagtgtacccaggcacccgcccccgcctccgaagatgaaaaggtggtggtggagcctccggagggggaagaaaaggttgagaaagcagaggtgaaggagaggacagaggagccgatggaaaccgaacccaagggtgcagcagatgtcgagaaagtcgaagaaaaatctgccatcgaccttactcccatcgttgtggaggacaaggaagaaaaaaaggaggaggaggagaagaaggaggtgatgcttcagaacggcgaaacaccaaaggatctgaacgatgaaaaacagaaaaagaatattaaacagcgcttcatgttcaatattgccgacggaggctttactgagctgcactctctttggcagaatgaggagcgagcagcgacagtcacaaagaagacttatgagatatggcatcggagacacgattattggctcctcgcaggcatcattaaccatgggtacgcgagatggcaagacatccagaatgatcctcgctatgcgattctcaatgaaccatttaaaggtgaaatgaataggggtaatttcctggagatcaagaataaattcttagcaaggcgctttaagctgctggaacaggccctggtcatagaggaacagttacgacgagctgcgtacctaaacatgagcgaggaccctagccacccttcaatggccctcaacaccagatttgccgaggtggaatgcctggcagagtcccatcagcatctgagcaaagagtctatggcgggaaataagccagccaacgccgtgctgcataaagtcctcaaacaactagaggaactcttgagcgatatgaaggccgatgtgacaagactcccagccactattgcccgcatacctcccgtcgccgtccggctgcagatgagcgaaaggaatatcctttcacggctcgccaatcgcgcccccgagcccacgccacagcaggttgcccagcagcagtag

SEQ ID NO: 111881 - DNA, 5718 bp, Artificial Sequence
  derived and/or modified sequence
atggcttcaggactgggtagtccgtcaccatgcagcgccgggagcgaagaagaggacatggacgctctcttgaataattcacttccaccccctcatcctgaaaatgaggaggatcccgaagaggacctgagcgagaccgaaacgcctaagctgaaaaaaaaaaaaaaacctaagaagcccagggatcctaagatcccaaagagcaaacgccagaagaaggagctgggcgactcatccggcgagggtcctgagttcgtcgaagaggaagaggaagttgcgcttcgaagtgactcagagggcagcgactatacccccggcaagaaaaaaaagaaaaaactgggtccaaagaaggagaagaagagtaagtccaagcgcaaagaggaagaagaggaggaagacgacgacgacgacagtaaggaacccaagtcctcagctcagttgctggaggattggggaatggaagatatcgaccatgtgttctcagaggaggactacagaacactgacaaactacaaggccttttctcaatttgtcagaccacttattgcagccaagaacccgaaaatcgccgtctctaaaatgatgatggttttgggggccaagtggcgggaattttccacaaataaccctttcaaggggtcaagcggggcctctgtggcggctgccgctgcagccgcagtggccgttgtagaatctatggtgacggcaacagaggtggccccccccccacctccggtcgaggttcctatcaggaaggcaaagactaaagaggggaagggtcccaatgccaggagaaaacccaagggaagccccagggtgccagatgccaaaaagcccaagcctaaaaaggttgccccgcttaaaatcaagctgggaggctttggcagcaagcggaaacgtagctcttctgaggacgacgacctcgatgttgaaagcgactttgacgacgcatctattaacagctactcggtgagtgacggcagcaccagtcggtcctcccggtcaaggaaaaaactgcgaactaccaaaaagaagaagaagggagaggaggaggtgactgcggtcgatgggtacgaaaccgaccatcaggactactgcgaggtctgtcagcagggaggtgagattattttgtgcgatacctgtccccgggcctaccatatggtatgtctggacccagatatggaaaaagcccctgaagggaagtggtcatgccctcactgcgagaaggaaggaattcagtgggaagccaaagaggataatagcgaaggagaggagattctggaggaggttggaggagacctggaagaagaagacgaccaccatatggaattctgtcgcgtctgcaaggatgggggagaactcctctgctgtgatacatgtccctcgagctatcatatacattgtctgaacccccctctgcctgagattccgaatggtgaatggctctgcccgcggtgcacttgtcctgccttaaagggcaaggtccagaaaatcttaatctggaagtggggccagccaccatcacccacaccagtaccccgccctccggacgccgatcctaacactcccagccccaagcccttggaggggagacccgagcggcagttcttcgtgaagtggcaaggaatgagctactggcattgctcctgggtaagcgagctgcagctggaacttcactgccaggtcatgtttaggaactatcaacggaagaatgacatggacgagcccccatcaggcgatttcggaggcgatgaagagaaatccagaaagcgcaaaaataaagatcccaagttcgccgagatggaggaacgtttttatcgctacggtattaagcccgagtggatgatgattcaccgaatcttgaaccacagcgtggataaaaaaggacacgtccactatcttattaagtggagagacctgccatacgatcaggcctcttgggaatctgaggacgttgaaattcaggactatgacctgttcaagcagtcctactggaatcacagggagctcatgcgcggcgaggagggcagacccggaaaaaaactgaagaaggtaaagctgaggaaactcgaacgacctccagaaacccccactgttgaccccactgtaaagtacgagagacagcctgagtatctggatgccacagggggcactcttcatccgtaccagatggaaggtctaaattggttgagattcagttgggcacagggaacagacactatcctcgccgatgagatgggcttaggcaaaactgtgcaaactgccgtttttctgtacagcctgtacaaggagggtcactccaagggaccgtttctcgtgtctgccccactaagcactatcattaattgggagcgagagtttgagatgtgggcgcccgacatgtatgtcgttacttatgtgggcgacaaagattcgcgcgctatcatcagagagaatgaattttccttcgaagataacgccatacggggtgggaagaaagcgagtcgcatgaaaaaggaagcctctgttaagtttcacgtgctactcaccagctatgaattgatcaccatcgatatggccattcttggatcaatcgactgggcctgcctgatagtggatgaggctcacagattgaagaacaatcaatctaagttcttcagagttcttaacgggtacagtctccagcacaaactgttgctgaccggaactccgttgcagaacaacctcgaagagcttttccatcttctcaactttctgactccagaaaggttccataacctggaaggatttttggaagaattcgccgacatagccaaggaggatcagatcaaaaagctgcacgacatgctaggcccccacatgctgcgtaggctcaaagcagacgtgtttaagaacatgccgtccaagaccgaactcattgtacgcgtggagctgtccccgatgcagaagaaatattataaatacattctcacgcggaatttcgaagcactgaacgcacgaggggggggtaatcaggtttctttgctgaatgtggtcatggacttgaagaaatgttgcaaccacccatatctgtttccagtggccgcaatggaagcaccgaaaatgccgaatgggatgtacgatgggagcgctctgattagggccagcgggaagctgctgctgttacagaagatgttgaagaacctgaaagagggtggacacagggtgctaatcttttcccagatgactaagatgctagatttgttggaggattttctagagcatgaggggtataaatacgagaggatcgatggggggatcactggcaatatgcgacaagaggcaattgaccgtttcaatgccccaggcgctcaacagttttgttttctcctgtctacacgggcgggtggactgggtattaatctggccactgccgatacagtcatcatctacgattccgactggaatccacacaatgatatccaggcattttcacgggcccacagaatcggccaaaataagaaggttatgatctatagatttgtcacccgggcatctgtggaggaacggatcactcaggtggccaagaaaaaaatgatgcttacccacctcgtcgtgaggccgggtttaggttctaaaaccggtagtatgtctaagcaggagctcgacgatatcctgaaatttggaaccgaggagctgttcaaggatgaggccaccgatggggggggggataataaggaaggggaggatagctccgttatccactatgatgataaagccatcgagaggttgcttgatcgtaatcaggatgaaaccgaggataccgaactgcagggtatgaatgaatatctgtcttcgttcaaagtagcccagtatgtggtgcgcgaagaggagatgggtgaagaggaggaggttgaaagggagatcattaagcaggaagagtccgttgatcctgactattgggagaaactgcttcgtcatcactatgagcagcagcaggaggatctggcccgcaatcttggcaagggaaaaagaatccgtaagcaggtaaattacaatgacggtagtcaagaagaccgggactggcaggacgaccagtccgataaccagtccgactatagtgtggcttccgaggagggcgatgaggactttgatgaacgatcagaggccccaaggaggcctagccggaaaggactccggaatgataaggataaaccactaccacccctgttagcccgggtgggagggaacatcgaagtcctgggttttaacgctcgacaaaggaaagcctttctgaatgcaataatgcgctatggcatgcccccacaggacgcttttaccactcagtggctggttagagatctaagaggcaaaagcgagaaagaattcaaggcatacgttagcctgtttatgaggcatctgtgtgaacctggagcagacggcgccgagacctttgccgatggcgttcccagggagggattgagccgccagcatgtcttgacaaggattggcgtgatgtccctcatccgtaagaaggttcaagaatttgagcatgtgaacgggcgatggtctatgccagagctagcagaagtcgaggagaataaaaaaatgtctcaacccgggtcccccagccccaagaccccaacaccaagtacacctggtgatacgcagccgaacacacctgctcccgtgccgcccgcggaggatggtatcaaaatagaagaaaattctctgaaggaggaagagtcgattgagggggaaaaggaggtgaaaagcacggctcctgaaaccgctatcgaatgcacccaggctccagcaccagcctcagaggacgagaaagtggttgtggagccaccggaaggcgaggagaaggtggagaaagctgaagtgaaggagaggacagaagagcccatggaaaccgaacctaaaggtgccgctgatgttgagaaagttgaagagaagagtgcgatcgacttgacgcccattgtagtggaagacaaagaggaaaagaaagaagaagaggagaagaaggaggtgatgttgcagaacggagagacgcccaaagatctcaacgacgagaagcagaagaagaatatcaagcaaagattcatgttcaacatcgctgacggcggatttaccgagttgcatagcttgtggcagaatgaggagcgcgctgcaaccgtgaccaagaagacttacgagatctggcatcgccgccacgactattggcttcttgctgggattataaaccatgggtatgctcgctggcaggacattcagaatgatcctaggtacgctatattgaacgagccattcaagggagagatgaaccgcggcaatttcttggagatcaagaacaaattccttgcaagacggttcaagctccttgagcaggccctggttatcgaggaacagctcagaagggcagcctatttgaacatgagcgaggaccccagccacccttctatggctctgaatacaagatttgccgaagtcgaatgcctggctgagagccaccagcatctgtcaaaggagtccatggcaggtaacaagcccgctaatgccgtactgcacaaggtgctgaagcagctagaggaacttctgtctgatatgaaggcggatgtgacgaggttgcccgccacaatcgcccggattccccctgtagcggtgcgactgcaaatgagtgagaggaatattttgtcacgacttgcgaacagagctcctgagcccaccccccagcaggtggctcagcagcagtag

SEQ ID NO: 111882 - DNA, 5661 bp, Artificial Sequence
  derived and/or modified sequence
atggatgccctgctgaacaacagcctgcccccaccccacccagaaaatgaggaggaccctgaggaggacctgtctgaaacagagacccccaagctgaagaagaagaagaagcccaagaagccccgggaccccaagatccccaagagcaagaggcagaagaaggagctgggggacagcagcggggagggccctgagtttgtggaggaggaggaggaggtggccctgcggagtgacagcgagggcagtgactacacccctgggaagaagaagaagaagaagctgggccccaagaaggagaagaagagcaagagcaagaggaaggaggaggaggaggaggaggatgatgatgatgacagcaaggagcccaagagcagcgcccagctgctggaggactggggcatggaggacatcgaccacgtgttcagcgaggaggactaccgcaccctgaccaactacaaggccttcagccagtttgtgcggcccctgattgctgccaagaaccccaagattgctgtgtccaagatgatgatggtgctgggcgccaagtggagggagttcagcaccaacaaccccttcaagggcagcagcggggcctctgtggccgctgctgctgctgctgctgtggccgtggtggagagcatggtgacagccacagaggtggcccctcctcctcctcctgtggaggtgcccatcaggaaggccaagaccaaggagggcaagggccccaatgcccggaggaagcccaagggcagcccccgggtgcctgatgccaagaagcccaagcccaagaaggtggcccccctgaagatcaagctgggcggcttcggcagcaagaggaagaggagcagcagtgaagatgatgacctggatgtggagagtgactttgatgatgccagcatcaacagctacagcgtgtctgatggcagcaccagccgcagcagccgcagcaggaagaagctgcggaccaccaagaagaagaagaagggggaggaggaggtgacagctgtggatggctatgaaacagaccaccaggactactgtgaggtgtgccagcagggcggggagatcatcctgtgtgacacctgcccccgggcctaccacatggtgtgcctggaccctgacatggagaaggcccctgagggcaagtggagctgcccccactgtgagaaggagggcatccagtgggaggccaaggaggacaacagcgagggggaggagatcctggaggaggtgggcggggacctggaggaggaggatgaccaccacatggagttctgccgggtgtgcaaggatggaggagagctgctgtgctgtgacacctgccccagcagctaccacatccactgcctgaacccccccctgcctgagatccccaatggagagtggctgtgcccccgctgcacctgcccagccctgaagggcaaggtgcagaagatcctgatctggaagtggggccagccccccagccccacccctgtgccccggcccccagatgctgaccccaacacccccagccccaagcccctggagggccggcctgagcggcagttctttgtgaagtggcagggcatgagctactggcactgctcctgggtgtctgagctgcagctggagctgcactgccaggtgatgttcaggaactaccagaggaagaatgacatggatgagcccccatctggggactttggaggagatgaggagaagagcaggaagaggaagaacaaggaccccaagtttgctgagatggaggagcgcttctaccgctatggcatcaagccagagtggatgatgatccaccgcatcctgaaccacagcgtggacaagaagggccacgtgcactacctgatcaagtggagggacctgccctatgaccaggcctcctgggagagtgaagatgtggagatccaggactatgacctcttcaagcagagctactggaaccaccgggagctgatgagaggagaggagggccggcctgggaagaagctgaagaaggtgaagctgaggaagctggagcggcccccagagacccccaccgtggaccccaccgtgaagtatgaaaggcagcctgagtacctggatgccaccggcggcaccctgcacccctaccagatggagggcctgaactggctgcgcttctcctgggcccagggcacagacaccatcctggctgatgagatgggcctgggcaagacagtgcagacagctgtgttcctgtacagcctgtacaaggagggccacagcaagggccccttcctggtgtctgcccccctgagcaccatcatcaactgggagcgggagtttgagatgtgggccccagacatgtatgtggtgacctacgtgggggacaaggacagccgggccatcatccgggagaatgagttctcctttgaggacaatgccatccggggcggcaagaaggccagcaggatgaagaaggaggcctctgtgaagttccacgtgctgctgaccagctatgagctgatcaccatcgacatggccatcctgggcagcattgactgggcctgcctgattgtggatgaggcccaccggctgaagaacaaccagagcaagttcttccgggtgctgaatggctacagcctgcagcacaagctgctgctgaccggcacccccctgcagaacaacctggaggagctgttccacctgctgaacttcctgaccccagagcgcttccacaacctggagggcttcctggaggagtttgctgacatcgccaaggaggaccagatcaagaagctgcatgacatgctgggcccccacatgctgcggcggctgaaggcagatgtgttcaagaacatgcccagcaagacagagctgattgtgcgggtggagctgagccccatgcagaagaagtactacaagtacatcctgaccaggaactttgaggccctgaatgcccggggcggcggcaaccaggtgtccctgctgaatgtggtgatggacctgaagaagtgctgcaaccacccctacctgtttcctgtggccgccatggaggcccccaagatgcccaacggcatgtatgatggcagcgccctgatccgggccagcggcaagctgctgctgctgcagaagatgctgaagaacctgaaggagggcggccaccgggtgctgatcttcagccagatgaccaagatgctggacctgctggaggacttcctggagcacgagggctacaagtatgaaagaattgatggcggcatcactggaaacatgaggcaggaggccatcgaccgcttcaatgcccctggggcccagcagttctgcttcctgctgagcacccgggccggcggcctgggcatcaacctggccacagctgacaccgtcatcatctatgacagcgactggaacccccacaatgacatccaggccttcagccgggcccacagaattggccagaacaagaaggtgatgatctacagatttgtgacccgggcctctgtggaggagcgcatcacccaggtggccaagaagaagatgatgctgacccacctggtggtgcggcccggcctgggcagcaagacaggctccatgagcaagcaggagctggatgacatcctgaagtttggaacagaggagctgttcaaggatgaggccacagatggcggcggggacaacaaggagggggaggacagcagcgtcatccactatgatgacaaggccatcgagcggctgctggacaggaaccaggatgaaacagaggacacagagctgcagggcatgaatgagtacctgagcagcttcaaggtggcccagtatgtggtgcgggaggaggagatgggagaggaggaggaggtggagcgggagatcatcaagcaggaggagagcgtggaccctgactactgggagaagctgctgcggcaccactatgagcagcagcaggaggacctggccaggaacctgggcaagggcaagaggatcaggaagcaggtgaactacaatgatggcagccaggaggaccgggactggcaggatgaccagagcgacaaccagagcgactacagcgtggccagcgaggagggagatgaagattttgatgagaggtctgaggccccccggcggcccagcaggaagggcctgagaaatgacaaggacaagcccctgccccccctgctggcccgggtgggcggcaacatcgaggtgctgggcttcaatgcccggcagaggaaggccttcctgaatgccatcatgagatatggcatgccaccccaggatgccttcaccacccagtggctggtgcgggacctgcggggcaagtctgagaaggagttcaaggcctacgtgtccctcttcatgaggcacctgtgtgagcccggggctgatggagctgagacctttgctgatggagtgccccgggagggcctgagccggcagcacgtgctgacccgcatcggcgtgatgagcctcatcaggaagaaggtgcaggagtttgaacatgtgaatggccgctggagcatgcctgagctggccgaggtggaggagaacaagaagatgagccagcccggcagccccagccccaagacccccacccccagcacccctggggacacccagcccaacaccccagcccctgtgcccccagcagaagatggcatcaagattgaggagaacagcctgaaggaggaggagagcattgaaggagagaaggaggtgaagagcacagcccctgagacagccattgaatgtacccaggccccagccccagcctctgaagatgagaaggtggtggtggagcccccagagggggaggagaaggtggagaaggccgaggtgaaggagaggacagaggagcccatggagacagagcccaagggagctgctgatgtggagaaggtggaggagaagagcgccatcgacctgacccccatcgtggtggaggacaaggaggagaagaaggaggaggaggagaagaaggaggtgatgctgcagaatggagagacccccaaggacctgaatgatgagaagcagaagaagaacatcaagcagcgcttcatgttcaacattgctgatggcggcttcacagagctgcacagcctgtggcagaatgaggagcgggccgccaccgtgaccaagaagacctatgagatctggcacagaagacatgactactggctgctggccggcatcatcaaccacggctacgcccgctggcaggacatccagaatgaccccaggtatgccatcctgaatgagcccttcaagggggagatgaacagaggcaacttcctggagatcaagaacaagttcctggcccggcgcttcaagctgctggagcaggccctggtgattgaggagcagctgcggcgggccgcctacctgaacatgtctgaggaccccagccaccccagcatggccctgaacaccaggtttgctgaggtggagtgcctggccgagagccaccagcacctgagcaaggagagcatggccggcaacaagccagccaatgctgtgctgcacaaggtgctgaagcagctggaggagctgctgagtgacatgaaggcagatgtgacccggctgcctgccaccatcgcccgcatcccccctgtggccgtgcggctgcagatgtctgagaggaacatcctgagccggctggccaacagagcccctgagcccaccccccagcaggtggcccagcagcagtag

SEQ ID NO: 111883 - DNA, 5718 bp, Artificial Sequence
  derived and/or modified sequence
atggccagcggcctgggcagccccagcccctgcagcgctggcagcgaggaggaggacatggatgccctgctgaacaacagcctgcccccaccccacccagaaaatgaagaagatcctgaggaggacctgtctgaaacagagacccccaagctgaagaagaagaagaagcccaagaagccccgggaccccaagatccccaagagcaagaggcagaagaaggagctgggggacagcagtggagagggccctgagtttgtggaggaggaggaggaggtggccctgcggagtgacagcgagggcagtgactacaccccaggcaagaagaagaagaagaagctgggccccaagaaggagaagaagagcaagagcaagaggaaggaggaggaggaggaggaggatgatgatgatgacagcaaggagcccaagagcagcgcccagctgctggaggactggggcatggaggacatcgaccacgtgttttctgaggaggactaccgcaccctgaccaactacaaggccttcagccagtttgtgcggcccctgattgctgccaagaaccccaagattgctgtgtccaagatgatgatggtgctgggcgccaagtggagggagttcagcaccaacaaccccttcaagggcagcagcggggcctctgtggccgctgctgctgctgctgctgtggccgtggtggagagcatggtgacagccacagaggtggcccctcctcctcctcctgtggaggtgcccatcaggaaggccaagaccaaggagggcaagggccccaatgcccggaggaagcccaagggcagcccccgggtgcctgatgccaagaagcccaagcccaagaaggtggcccccctgaagatcaagctgggcggcttcggcagcaagaggaagaggagcagcagtgaagatgatgacctggatgtggagagtgactttgatgatgccagcatcaacagctacagcgtgtctgatggcagcaccagccgcagcagccgcagcaggaagaagctgcggaccaccaagaagaagaagaagggggaggaggaggtgacagctgtggatggctatgaaacagaccaccaggactactgtgaggtgtgccagcagggcggggagatcatcctgtgtgacacctgcccccgggcctaccacatggtgtgcctggaccctgacatggagaaggcccctgagggcaagtggagctgcccccactgtgagaaggagggcatccagtgggaggccaaggaggacaacagcgagggggaggagatcctggaggaggtgggcggggacctggaggaggaggatgaccaccacatggagttctgccgggtgtgcaaggatggaggagagctgctgtgctgtgacacctgccccagcagctaccacatccactgcctgaacccccccctgcctgagatccccaacggggagtggctgtgcccccgctgcacctgcccagccctgaagggcaaggtgcagaagatcctgatctggaagtggggccagccccccagccccacccctgtgccccggcccccagatgctgaccccaacacccccagccccaagcccctggagggccggcctgagcggcagttctttgtgaagtggcagggcatgagctactggcactgctcctgggtgtctgagctgcagctggagctgcactgccaggtgatgttcaggaactaccagaggaagaatgacatggatgagccccccagcggggactttggaggagatgaggagaagagcaggaagaggaagaacaaggaccccaagtttgctgagatggaggagcgcttctaccgctatggcatcaagccagagtggatgatgatccaccgcatcctgaaccacagcgtggacaagaagggccacgtgcactacctgatcaagtggagggacctgccctatgaccaggcctcctgggagagtgaagatgtggagatccaggactatgacctcttcaagcagagctactggaaccaccgggagctgatgagaggagaggagggccggcctgggaagaagctgaagaaggtgaagctgaggaagctggagaggcctcctgagacccccaccgtggaccccaccgtgaagtatgagcggcagcctgagtacctggatgccactggaggcaccctgcacccctaccagatggagggcctgaactggctgcgcttctcctgggcccagggcacagacaccatcctggctgatgagatgggcctgggcaagacagtgcagacagctgtgttcctgtacagcctgtacaaggagggccacagcaagggccccttcctggtgtctgcccccctgagcaccatcatcaactgggagcgggagtttgagatgtgggccccagacatgtatgtggtgacctacgtgggggacaaggacagccgggccatcatcagagaaaatgagttctcctttgaagataatgccatccggggcggcaagaaggccagcaggatgaagaaggaggcctctgtgaagttccacgtgctgctgaccagctatgagctgatcaccatcgacatggccatcctgggcagcattgactgggcctgcctgattgtggatgaggcccaccggctgaagaacaaccagagcaagttcttccgggtgctgaatggctacagcctgcagcacaagctgctgctgaccggcacccccctgcagaacaacctggaggagctgttccacctgctgaacttcctgaccccagagcgcttccacaacctggagggcttcctggaggagtttgctgacatcgccaaggaggaccagatcaagaagctgcatgacatgctgggcccccacatgctgcggcggctgaaggcagatgtgttcaagaacatgcccagcaagacagagctgattgtgcgggtggagctgagccccatgcagaagaagtactacaagtacatcctgaccaggaactttgaggccctgaatgcccggggcggcggcaaccaggtgtccctgctgaatgtggtgatggacctgaagaagtgctgcaaccacccctacctgtttcctgtggccgccatggaggcccccaagatgcccaacggcatgtatgatggcagcgccctgatccgggccagcggcaagctgctgctgctgcagaagatgctgaagaacctgaaggagggcggccaccgggtgctgatcttcagccagatgaccaagatgctggacctgctggaggacttcctggagcacgagggctacaagtatgaaagaattgatggcggcatcaccggcaacatgaggcaggaggccatcgaccgcttcaatgcccctggggcccagcagttctgcttcctgctgagcaccagggctgggggcctgggcatcaacctggccacagctgacaccgtcatcatctatgacagcgactggaacccccacaatgacatccaggccttcagccgggcccaccgcatcggccagaacaagaaggtgatgatctacagatttgtgacccgggcctctgtggaggagcgcatcacccaggtggccaagaagaagatgatgctgacccacctggtggtgcggcccggcctgggcagcaagacaggctccatgagcaagcaggagctggatgacatcctgaagtttggaacagaggagctgttcaaggatgaggccacagatggcggcggggacaacaaggagggggaggacagcagcgtcatccactatgatgacaaggccatcgagcggctgctggacaggaaccaggatgaaacagaggacacagagctgcagggcatgaatgagtacctgagcagcttcaaggtggcccagtatgtggtgcgggaggaggagatgggagaggaggaggaggtggagcgggagatcatcaagcaggaggagagcgtggaccctgactactgggagaagctgctgcggcaccactatgagcagcagcaggaggacctggccaggaacctgggcaagggcaagaggatcaggaagcaggtgaactacaatgatggcagccaggaggaccgggactggcaggatgaccagagcgacaaccagagcgactacagcgtggccagcgaggagggagatgaggactttgatgagaggtctgaggccccccggcggcccagcaggaagggcctgagaaatgacaaggacaagcccctgccccccctgctggcccgggtgggcggcaacatcgaggtgctgggcttcaatgcccggcagaggaaggccttcctgaatgccatcatgagatatggcatgccaccccaggatgccttcaccacccagtggctggtgcgggacctgcggggcaagtctgagaaggagttcaaggcctacgtgtccctcttcatgaggcacctgtgtgagcctggagcagatggagctgagacctttgctgatggagtgccccgggagggcctgagccggcagcacgtgctgaccagaattggagtgatgagcctcatcaggaagaaggtgcaggagtttgagcacgtgaatggccgctggagcatgcctgagctggccgaggtggaggagaacaagaagatgagccagcccggcagccccagccccaagacccccacccccagcacccctggggacacccagcccaacaccccagcccctgtgcccccagcagaagatggcatcaagattgaggagaacagcctgaaggaggaggagagcattgaaggagagaaggaggtgaagagcacagcccctgagacagccatcgagtgcacccaggccccagccccagcctctgaagatgagaaggtggtggtggagcccccagagggggaggagaaggtggagaaggccgaggtgaaggagaggacagaggagcccatggagacagagcccaagggagctgctgatgtggagaaggtggaggagaagagcgccatcgacctgacccccatcgtggtggaggacaaggaggagaagaaggaggaggaggagaagaaggaggtgatgctgcagaatggagagacccccaaggacctgaatgatgagaagcagaagaagaacatcaagcagcgcttcatgttcaacattgctgatggcggcttcacagagctgcacagcctgtggcagaatgaggagagagctgccaccgtgaccaagaagacctatgagatctggcacagaagacatgactactggctgctggccggcatcatcaaccacggctacgcccgctggcaggacatccagaatgaccccaggtatgccatcctgaatgagcccttcaagggggagatgaacagaggcaacttcctggagatcaagaacaagttcctggcccggcgcttcaagctgctggagcaggccctggtgattgaggagcagctgcggcgggccgcctacctgaacatgtctgaggaccccagccaccccagcatggccctgaacaccaggtttgctgaggtggagtgcctggccgagagccaccagcacctgagcaaggagagcatggccggcaacaagccagccaatgctgtgctgcacaaggtgctgaagcagctggaggagctgctgagtgacatgaaggcagatgtgacccggctgcctgccaccatcgcccgcatcccccctgtggccgtgcggctgcagatgtctgaaagaaacatcctgagccggctggccaacagagcccctgagcccaccccccagcaggtggcccagcagcagtag

SEQ ID NO: 111884 - DNA, 5661 bp, Artificial Sequence
  derived and/or modified sequence
atggacgccctgctgaacaacagcctgccccccccccaccccgagaatgaggaagacccagaggaagacctgagcgagactgaaactcctaagctgaaaaagaagaaaaagcctaaaaagccccgagacccaaagataccaaaaagcaaacgccagaagaaagagctgggagatagcagcggagagggacccgagtttgtcgaagaagaggaggaagtggcactgagaagcgatagtgagggaagtgactatactcccgggaagaaaaaaaagaaaaagctgggcccaaagaaagagaagaaaagtaagtccaagagaaaagaggaggaagaagaggaggacgacgacgatgacagtaaggaacctaagtcctctgctcagctgctagaagactgggggatggaagatatcgaccatgtgttcagtgaggaggactatcgcacactaaccaattacaaggcattttctcagtttgtcaggccgttaatcgctgcaaagaaccccaagatcgccgtgagcaaaatgatgatggtcctgggtgccaagtggcgggaatttagcacgaataaccccttcaaaggctcatctggtgcttccgttgcagcagccgccgctgctgcagttgcagtcgtcgagagtatggtgacagccactgaggtggcgcccccacctccccccgtagaggtcccaattaggaaggctaagacgaaagaaggtaagggacccaacgcccgaagaaaaccgaagggtagccctcgtgtgcctgatgccaagaagccaaaacctaagaaggttgcaccactgaagattaagctgggcggctttggttcaaagcgcaagaggtcaagctctgaggacgatgacctggacgtggagagcgatttcgacgatgcatctataaattcctacagtgtcagtgatggctctacctcgcgttctagtcggtcaaggaaaaaacttcggactaccaaaaagaaaaaaaaaggggaagaagaggtgaccgcagttgacggctacgagactgaccaccaagactactgtgaggtctgtcaacaaggcggggagatcatattgtgtgatacgtgtccaagagcttatcacatggtgtgtctcgatccggatatggagaaggcaccagagggcaaatggtcctgtccccattgcgagaaggagggcatccagtgggaggctaaggaagataacagtgaaggagaggaaattctagaagaagtcggtggagacctagaagaagaggacgatcaccatatggaattttgccgcgtgtgcaaagatgggggcgaactcttatgttgtgacacttgccccagtagctaccacattcactgtttaaatcccccattgcctgaaatccctaacggcgaatggctctgccccagatgcacgtgtcctgccctgaagggcaaggtgcaaaaaatcttgatctggaagtggggccagccaccgtcgccgacccctgtcccacgcccccctgatgccgaccccaatactccctcccccaagcccctggagggacgccccgagcgccaattctttgtgaaatggcagggcatgagttactggcattgtagctgggtgagcgaactgcagctcgagctccactgccaagtgatgttccgaaattatcagcgcaagaacgacatggacgaacctccatctggagacttcggcggcgacgaagagaaatccagaaagaggaaaaacaaggatcccaagtttgccgagatggaagagcggttctatcgatacggaatcaagccagaatggatgatgattcacagaatcctgaaccattctgttgacaaaaaaggccacgttcattacctgataaagtggcgtgaccttccttacgaccaagcttcttgggaatctgaggatgtggaaattcaggattacgatttatttaaacaatcatactggaaccatcgcgaattgatgcggggggaggagggccgtccaggaaagaagctgaagaaggtgaaactgcgaaagctcgagaggccccctgagacccctacagtggaccctacggtcaagtatgagcgccagccagagtacctcgatgctaccggggggactctgcatccataccagatggagggactgaattggctcaggttcagctgggcgcagggaacagacaccattcttgccgatgaaatgggactcggcaagactgttcagacggcagtgtttttgtactctctttacaaggagggccattcgaaggggccctttttagtgagtgcgccattgagtacaatcattaattgggaacgggagtttgagatgtgggccccagacatgtacgtggtcacgtatgtcggcgacaaggactctcgggccatcattcgggagaacgagtttagcttcgaggacaacgccatccgcggcggcaagaaggcatcccgcatgaagaaggaggcttcggtaaaatttcatgtcttgctcaccagttatgaattgatcacaatcgatatggcaatcctgggctccattgattgggcatgcctcatcgtcgacgaggcccaccggctgaagaacaaccaatcaaaattctttagagtccttaacgggtacagccttcagcataaattgctcttgaccggaacgcctttacagaacaatctagaggagcttttccacctccttaactttcttacccccgagcggtttcacaatctggagggttttctcgaggagttcgcggatatcgccaaggaggatcagatcaagaagctccacgacatgctaggtcctcatatgctgaggagattaaaagctgacgtgttcaaaaacatgcccagtaaaaccgagcttattgtacgggtggaattatcccctatgcagaagaagtactataagtacatccttactagaaacttcgaagctctgaatgctcgtggagggggtaaccaggtctcactcctgaacgtggtcatggacctgaagaaatgctgcaaccatccgtatttattcccagttgccgcgatggaggcacccaaaatgccaaacggcatgtacgatggtagcgccctgattagggccagtggtaagctcctgctgctccagaagatgctgaaaaatctgaaggagggtggccaccgcgttcttattttctctcaaatgaccaaaatgttggaccttctagaagattttctggagcacgagggctataagtacgagcggatcgacgggggcattacagggaacatgagacaagaggcaatcgacaggttcaacgccccaggggcacagcaattttgcttcctccttagcacacgcgcaggtggcctcggcatcaatctggcaacagcagacactgtaatcatttacgattccgattggaatccgcacaacgatatccaggcgttctccagggcccatagaatcggtcagaataagaaagttatgatttataggttcgtcaccagagcctcagtcgaggagcggattacccaggttgcgaaaaagaagatgatgctgacacacctggtcgtcaggcccggtcttggaagcaaaactggttcaatgtccaagcaggaacttgatgacatcctgaaattcggtaccgaggaattgttcaaggacgaagctactgacgggggcggcgacaataaagagggcgaggattcaagcgtgatacattacgacgacaaagcaatcgaacgtcttctggacaggaatcaggatgaaactgaggacacagagctgcaagggatgaacgaatacctcagctcgttcaaggtggcgcagtacgtggttagagaggaggagatgggtgaggaagaagaagttgagcgcgaaataatcaagcaggaagaatccgtggatcccgattactgggagaagctcctccggcaccattatgagcagcagcaggaagaccttgcccggaacctaggcaaaggtaaaagaattcgcaaacaagttaattataatgacggcagtcaggaggatagagattggcaggatgatcagagcgacaaccagagtgactattccgtagcatccgaagagggcgatgaggattttgatgagcgctccgaggccccccgtcgtccatctcggaagggtctgagaaatgacaaagataagcctctccccccacttctcgctcgcgttggggggaacatcgaggtcttaggatttaatgccaggcagcgaaaagcattcctgaatgccattatgcgctatggaatgcctccccaggacgccttcacgacacagtggctcgtccgggatttgagaggtaaaagcgagaaggaatttaaagcctacgtatcactgtttatgcgccacctctgcgagccaggagccgacggggctgagacctttgccgatggtgtgccacgggagggactcagcaggcagcatgtacttacacgtatcggggtgatgtccctcatccggaaaaaggtccaggagttcgagcacgttaatggaagatggtcaatgcccgagctagctgaggtagaggagaataagaaaatgtctcaaccggggagcccctccccaaaaacacccactccctccactccaggcgacacacagcccaatactcccgcccccgtgccccccgcagaagatgggattaaaatcgaggagaattctctgaaggaagaggaatctatcgagggcgagaaagaggtaaagagtaccgccccggaaacagcaatcgaatgcacccaggccccagctccagctagtgaagacgaaaaagtggtggttgaaccacccgaaggtgaagagaaggttgagaaggcagaagtgaaggagcggactgaagaaccgatggagactgagccgaagggcgccgccgatgttgagaaagtggaggagaaatctgccatagatctaaccccaattgtagttgaagacaaagaggaaaaaaaagaggaagaagaaaagaaggaggtaatgctccagaatggagagaccccaaaggacttgaacgatgaaaagcagaagaaaaacattaagcagaggttcatgttcaacatagccgatggagggtttacggagctgcactctctctggcaaaatgaagagagagcagctactgtgacaaaaaagacctatgaaatatggcatcgcagacatgattattggttactagctgggattataaatcatggctacgctcgttggcaggatatccagaatgaccccagatacgccatccttaacgaaccatttaagggggaaatgaaccgcgggaacttcttggaaattaaaaacaaatttctggctaggcgattcaagcttcttgaacaggcattagttatcgaggagcagctccgcagagccgcatacttaaatatgagcgaggacccatcgcatccgtctatggcccttaacacacgcttcgccgaggtagagtgcctggcagagagccaccagcatctcagcaaggaatctatggcgggaaacaagccagccaacgctgtcctgcataaggtgctgaagcagttggaggagctgctgtctgacatgaaggccgatgtcacaagactgcctgcaacaatagctaggattccacctgtcgccgtaagactccagatgagtgagagaaacatcctgtcaaggctcgcaaaccgcgcccccgagcccactccgcagcaagtcgctcaacaacagtag

SEQ ID NO: 111885 - DNA, 5718 bp, Artificial Sequence
  derived and/or modified sequence
atggccagcggcctgggcagccccagcccctgcagcgccggcagcgaagaggaggatatggacgcactcctaaataattctctccccccaccccatcctgaaaatgaagaagaccccgaggaggacctgagcgaaactgagaccccgaaattaaagaagaagaagaaacccaagaaaccccgcgatcccaagattccaaaatccaagcgccaaaagaaagaacttggagactcctccggagaaggcccagaattcgtggaagaggaagaagaggtcgcattaagatccgacagcgaaggatctgactacacaccaggaaagaaaaagaaaaagaagcttggccccaagaaggaaaaaaagtcaaaatctaaaagaaaggaggaagaggaggaagaggacgatgatgacgacagcaaagagcccaagagctccgcccaactcctggaagattggggcatggaggatattgaccacgtgttttctgaagaagactaccgcaccctgactaattacaaggcttttagccagtttgtccgccccctgattgccgcaaagaaccctaagatagccgtgtcaaaaatgatgatggtgttgggcgccaaatggagagaattctcgacaaataacccgtttaaagggtccagcggtgccagcgtggcggctgccgccgccgctgctgtggctgtcgtggaaagcatggtcaccgctaccgaggtggcccctcccccacctcccgtcgaggttcccatcaggaaggctaaaactaaagaggggaaaggcccgaatgcgagaaggaagcctaaaggaagcccaagagtcccggatgctaagaaacccaagcccaaaaaggtggccccgctgaaaataaaactcgggggtttcggaagcaagaggaagcgatcttcaagcgaagatgacgacctcgacgtggaatccgatttcgacgacgcatccatcaattcctactccgtttctgacggttccacaagtaggtcttcccgttcacgtaaaaagttgagaacaactaagaaaaagaagaaaggcgaagaggaagtcactgctgtcgatggttacgagacggaccatcaggactactgcgaggtctgccagcagggcggtgaaatcatcctgtgcgatacctgccctagggcatatcatatggtgtgtcttgacccagacatggagaaagcccccgaaggtaagtggtcttgtccccactgcgaaaaggaaggtatacagtgggaagccaaagaggacaattccgagggagaggaaatacttgaggaagtgggcggagatctggaggaggaggacgaccaccatatggagttttgtagagtgtgtaaggatgggggcgagttattatgttgtgacacctgtccttcctcctaccacattcactgtctgaacccaccccttccagagatccccaacggagagtggttgtgtcccagatgtacttgccccgctctgaagggcaaggtgcagaagatcctcatttggaaatgggggcagccaccttctcctacaccagtacccagaccaccagacgccgatcctaacaccccatcccctaagcccctggaggggcggcctgaaaggcagttctttgttaagtggcagggcatgtcctattggcactgctcatgggtgagcgaattgcagcttgaactgcattgccaggttatgtttaggaattaccaacggaagaatgatatggatgaaccgccatccggcgactttgggggcgacgaggagaaaagtcggaagcggaagaataaagaccctaaatttgccgagatggaggagaggttctataggtatgggatcaagccggaatggatgatgattcacaggatcctgaaccattcagtagataaaaaaggtcacgtgcattaccttattaaatggagagaccttccctatgaccaggcttcctgggaatcagaggatgttgagatccaggactatgatctcttcaagcagagctactggaaccatcgggagctgatgcggggagaggaagggagacccgggaagaagctgaagaaagtcaaactgaggaagttggagagaccaccagaaaccccgaccgttgatcctacagtgaagtacgaacgacagcccgaatacctagatgctacgggaggcactcttcatccttatcagatggagggcttaaattggctacgcttttcttgggctcaaggaaccgataccatattagccgacgagatgggtctcggcaagacggtacagactgccgtgttcctttattccctctataaagaggggcattccaagggtcccttcctggtgtccgcccccctgagtactatcattaattgggagcgtgagttcgaaatgtgggctcccgatatgtacgtggtcacatatgttggcgataaggattctcgggctatcattagggagaacgagttctctttcgaagataacgccatccgtggggggaaaaaggcttcgaggatgaaaaaggaagcctcggtgaaattccacgtgctgcttactagctacgagctgattactattgacatggctatactgggttccattgattgggcctgcctcatcgtggatgaggcacacaggctgaagaacaaccagtctaaattctttagggtcctgaatggatactctctgcaacacaagttgctcttgactggaacgcctttacagaataatctggaagagttgttccacctgcttaacttcctcacacccgaacgcttccacaatctagagggatttttagaggaatttgctgatatcgccaaggaggaccaaatcaagaagcttcacgatatgctaggccctcacatgctccggcgcctgaaggctgacgtgttcaaaaatatgccttccaagaccgagctcattgtccgggtggagctgagtccgatgcaaaagaagtattataaatacattctcactcgtaacttcgaagcactcaatgctcgcggggggggtaatcaggtctcgctgctgaatgtagtcatggacttaaaaaagtgctgcaaccatccatacctgtttcctgtagcagccatggaggcccccaagatgccaaatggtatgtatgacggttccgcattaatccgcgcttctggaaagctgctgctgctgcagaaaatgctgaagaatcttaaggaggggggacatcgagttctgatcttttcccagatgacgaagatgctcgacctcttagaggattttctggaacatgaaggctacaagtacgagaggattgatggcggaatcaccgggaacatgcgacaggaggcaatcgataggttcaacgctcccggggcgcagcagttttgcttcctcttgagtacacgggctggaggtctcggtattaaccttgccacagcagacaccgtaatcatttatgattcagactggaaccctcacaatgatatccaagctttcagtcgagcccataggattgggcaaaataaaaaggtaatgatttatcgattcgttacgcgggctagcgtggaggaacgcatcacacaggttgcaaaaaaaaaaatgatgctgactcacctagtcgtaagacccggtctcgggtctaaaactgggagcatgtcgaagcaggaacttgacgacatactgaagttcggcacggaagagctattcaaggatgaggctactgacggcggtggagacaacaaagagggggaggattcctccgttatccactacgacgacaaggcaatcgagagactccttgatagaaaccaggacgaaaccgaggacaccgaactacaggggatgaatgaatacctgtcctcttttaaagtggcacaatatgtggtacgcgaagaggagatgggggaggaggaagaagtggagcgtgagattattaagcaggaagaatctgtggatccggattactgggagaagctgcttcggcatcactacgaacagcaacaggaagacctagcacgcaatctgggcaagggcaaacgcattaggaaacaggttaattacaacgatggctctcaggaggaccgggactggcaggatgaccagagcgataaccagagtgactattccgttgccagcgaggaaggagatgaagattttgacgaacggagcgaggccccgcgccggccctctagaaagggccttagaaatgacaaggacaagccacttccgcccttgttagcccgggtgggcggcaatatcgaagtactggggttcaacgcccggcagcgcaaggcatttctgaacgctatcatgcgctacggtatgcccccccaagatgcctttaccacccaatggctggtacgggatctgcgggggaagagcgaaaaagagttcaaggcctatgtttctctcttcatgaggcatctttgtgaacctggtgctgacggagcagaaacctttgccgacggcgtgcccagagaaggtctcagcaggcaacacgtgctgaccagaatcggcgtcatgtccctcattaggaagaaagtgcaggagtttgagcatgtgaatgggcgatggtccatgcctgagctggccgaagtggaagaaaataaaaaaatgtcccaacctggatccccctcaccgaagactcccactccatcaacacccggcgatacccagcctaacacacccgcccctgtgccgcctgctgaggacggcatcaaaattgaggaaaactcgctgaaggaagaggaaagtatcgagggggaaaaggaggtgaagtcaacagctcctgaaactgccatcgaatgcacccaggctcccgcccccgcgtctgaggacgagaaggtggtggtggaaccgcccgagggcgaagagaaagtcgaaaaagctgaagtgaaagagcgcaccgaggaaccgatggaaacagaacccaagggcgctgcggatgtcgaaaaggtggaagaaaagtctgcaatcgacctgactcccatcgtagtcgaggacaaagaagaaaaaaaggaggaggaggaaaagaaggaggtgatgctgcagaatggggaaacaccaaaggacctcaatgacgagaagcaaaaaaaaaacattaagcagcgattcatgttcaatattgccgatggaggatttactgaactccactcactctggcagaacgaggagcgggccgccactgtcactaaaaagacatacgaaatctggcaccggcgccatgactattggctcttagcaggaatcatcaatcatgggtacgccagatggcaggatatccaaaacgacccacgctatgccatacttaatgagccatttaagggcgagatgaaccgcggcaactttctggaaatcaaaaataaattcctggcaagacgttttaaattattagaacaggccctcgtgattgaggaacaactgaggcgcgccgcatatctcaacatgagcgaagacccctcacacccctccatggcccttaacacccggttcgcggaggtcgaatgcctagccgaatctcaccagcatctttcgaaggagagcatggctgggaacaaacccgccaacgcggtgttacacaaggttttgaaacagcttgaagaactgctcagcgacatgaaggcagatgtgactagactgccagcgacaatcgcccggatccctccagtagctgtgcgactgcaaatgtccgagcgaaacattttgtcccgcttagctaaccgggctcccgagcccacaccacaacaggtggctcaacaacaatag

SEQ ID NO: 111886 - DNA, 5660 bp, Artificial Sequence
  derived and/or modified sequence
atggacgcacttctgaacaatagtctaccacccccacatcctgagaatgaggaggaccccgaggaagacctcagcgaaaccgagacaccaaagctgaaaaaaaaaaagaagcctaaaaaacccagagacccaaagattccaaaatctaagcggcagaagaaagagctcggcgactcttcaggggaggggcctgagtttgtggaagaagaggaggaagtagctctacgaagtgattcggaggggtctgactatacgcccggtaagaagaagaagaagaagctggggccaaagaaggaaaaaaagagcaagtccaaacggaaagaggaagaagaggaggaggacgatgatgacgattcaaaggaacctaagtcctctgcacagctactggaggactggggcatggaggatatagaccatgttttctcagaggaggattaccgtacactgaccaattacaaggcattctctcagtttgtccggccacttatagcagccaaaaacccgaaaattgctgtgagcaagatgatgatggtcctgggggcaaagtggagggagtttagcaccaacaatcccttcaaagggtctagcggagcgagcgtagccgcagcagccgctgccgctgtcgccgtggtggagtccatggtgaccgctactgaggttgctccaccacccccacccgtggaggtccccatcaggaaagccaaaacaaaggaaggaaagggccctaatgctagacggaagccaaaggggtcccccagggtgcctgatgccaaaaaaccaaaacctaaaaaagtcgcccctcttaaaattaagctcggcggattcggatctaagaggaagagaagcagctccgaggacgacgacctggatgtcgagagtgattttgacgatgcctccatcaacagctattccgtgtctgatggcagcacgagtcgttcaagtaggtctaggaagaagctgcgaaccaccaaaaagaaaaagaagggtgaggaagaagtcaccgcagttgatgggtacgagaccgaccaccaggattactgtgaggtttgtcagcagggaggtgagatcattctctgcgatacctgtcctcgagcttaccatatggtgtgtctcgatcccgatatggagaaagcacccgagggaaagtggtcctgtcctcattgcgagaaggaaggaatccagtgggaagcaaaagaagataactccgagggtgaggagattctggaagaggtggggggtgacctggaggaggaggacgatcatcacatggagttctgcagggtttgtaaggacgggggagagctgttgtgctgtgacacctgcccttcttcctaccacatccattgcctgaatcctcctttgccagaaattccaaatggagaatggttgtgcccgaggtgtacatgcccagcgttgaagggtaaggttcaaaagatcctcatttggaaatggggacaaccaccctctcccacccccgtacccaggccgcctgatgcagacccaaacactccaagtccgaagcctctcgagggacgtcccgagcggcagttttttgtgaaatggcaggggatgtcttactggcactgttcttgggtctcagaacttcagctcgagctgcattgtcaggtcatgtttcgtaactatcaacgtaagaacgatatggacgagccaccctccggcgattttggcggagatgaagagaagtccagaaaacggaaaaataaggatccgaaatttgcagaaatggaggagcgtttttatcgctatgggatcaaacctgaatggatgatgattcacagaatcctgaaccattccgtggacaagaagggccatgtgcactatctcattaagtggagagatttgccatatgaccaggcctcttgggagtccgaagatgtggagatacaagattacgatctatttaaacagtcctactggaatcaccgggagctcatgaggggggaggaggggagaccaggaaagaagctgaagaaagtcaagttgagaaaattagagcgtccacccgagactccaacagttgaccctaccgtgaagtacgagcgccagcccgagtatcttgacgccaccggagggaccctccacccttaccagatggaaggactaaattggctgcggtttagttgggcacagggtactgatacgattctagcagatgaaatgggcttgggcaagactgtgcagactgctgttttcttatacagtctctacaaggagggtcactcaaaagggcctttccttgtgtcggccccactttcgaccatcataaattgggagagggagttcgaaatgtgggcccctgacatgtatgtggtgacttacgtgggcgataaagacagtagagctataattcgagagaatgagttttcctttgaagataatgctatcaggggaggaaagaaggcctctcgaatgaagaaagaggcaagtgtgaaatttcatgttttgctgaccagctacgagcttattacaatcgatatggctattttgggcagcattgattgggcttgtctgattgtggatgaggctcatcgtttgaagaacaaccagagcaaattttttcgggtgcttaatgggtatagccttcagcataaactgttacttaccgggacaccgctgcagaacaacttggaggagctgtttcatctgctgaactttctgacaccagagagattccataacttagaaggattcctggaagaattcgcagatattgccaaggaggatcagataaaaaaactccatgatatgctaggcccacacatgctgagaagactcaaggctgacgtgtttaagaacatgccatctaaaaccgagctgatcgtaagggttgaactgtcccccatgcaaaaaaaatactacaagtatattttgactagaaacttcgaggctctcaacgcacgcggaggtggaaaccaagtgagcttgctgaacgtggtgatggacctgaaaaaatgctgtaaccacccctatctgtttcccgtggccgcaatggaggccccaaagatgcctaacgggatgtacgacggctctgcgctcattcgcgcttcaggtaaacttctcctgttgcaaaagatgctcaaaaatctgaaggaaggaggccacagggtgctcatttttagccagatgactaagatgctggacctgctagaggattttttggaacacgaagggtataagtacgagcggatcgatggcggaattacagggaatatgagacaggaggcaatcgatcgctttaatgcgccaggcgctcagcagttttgtttccttctgtccactcgggcagggggactcggaattaacctcgccacagccgatacggtgatcatttatgacagcgactggaacccccataatgacatccaggctttctcccgggcacatcgtatcggacagaacaagaaggtgatgatctaccggttcgtgacgcgcgcatctgtggaagaacgaattacacaggttgctaaaaaaaaaatgatgctgactcatttagttgtgaggccaggtctaggaagtaagactggctccatgtcaaaacaggagttggatgacatactgaagttcggcacagaagaactgtttaaggatgaggctactgatgggggaggagacaacaaagagggcgaagatagttctgttatccattacgacgacaaagcaattgaaagactgctggacagaaaccaggatgagacggaggacaccgaactccagggaatgaacgaatatttgtcgagtttcaaagtagctcaatacgtggtgagggaggaggaaatgggggaggaagaggaggtcgagagggagataattaagcaggaggagagtgtggatcctgactattgggagaaactccttagacaccactacgaacagcaacaggaagatcttgcaaggaatctaggaaagggcaaaagaatccgcaagcaggtcaactacaatgacggctcccaggaagaccgcgactggcaggacgaccagtccgataaccagtcggattatagtgtagcttcagaggaaggggatgaggattttgacgagagaagcgaagcccctcggagaccttctaggaagggcctgcgtaatgataaggacaaacccctcccacctttgctagcacgggtcgggggtaacatcgaggtgctgggcttcaatgctcgacaaaggaaagccttcctgaatgccatcatgcggtacggaatgccacctcaggacgcattcacaacgcagtggcttgtcagggacctgcgaggtaaatcagaaaaggaattcaaagcctatgtgtcacttttcatgcggcatctgtgcgagcctggcgcagacggcgcagagacttttgctgatggtgttcccagggagggtctcagccgtcaacatgtcctgactcggatcggcgtgatgtcactcattagaaaaaaagtacaggagtttgagcatgtgaacggccgatggagcatgcccgaactggccgaggttgaagagaacaaaaaaatgtcccagcccggatctccttctccaaaaactcctacccctagcacacctggagatacccagccgaacaccccagcgccagtgcctccagcggaagacggaatcaagatcgaggagaatagtcttaaagaggaagagtctatcgaaggagagaaggaagtcaaaagtacagctcccgagaccgccatcgagtgcactcaggctcctgcccctgcgtccgaagacgagaaagtggtagtcgaaccaccagaaggagaagaaaaagttgaaaaggccgaagtcaaagaacggactgaggaacccatggagacggaacccaagggagcagcagatgtggaaaaggtggaagagaaatcggccattgatctgactccgattgtggtcgaggataaggaggagaagaaggaggaagaagagaagaaggaagtgatgctccagaatggggagacacccaaggatctgaacgacgaaaagcagaagaagaatatcaagcagcgctttatgtttaatattgctgatggtggctttaccgaactgcattccctgtggcagaacgaagaacgtgcggcaactgtcacaaaaaaaacctacgagatatggcatagaaggcatgactattggctgctagctggcatcatcaaccacggctatgcaagatggcaagacatacagaacgatcccagatacgccatcctgaacgaacctttcaaaggcgaaatgaataggggcaatttccttgaaattaaaaataaatttctcgcaagacgcttcaagcttctggaacaggcactggtcattgaagagcagctcaggcgcgctgcctacctcaacatgtctgaagacccctcccatccatccatggccctgaacacacggtttgcggaggtcgagtgtctcgcagaaagccaccagcacctgagcaaggagtctatggcagggaacaaaccagccaacgctgtgctgcataaagttcttaagcagttggaggaactgctgtcagatatgaaggctgacgtaacgagactcccagcaacaatcgcgaggatccctcccgttgccgtgagattgcagatgtcagaacgaaatatactgagccgcttggccaaccgcgcaccagaacccacaccccaacaagtggcgcaacagcaata

SEQ ID NO: 111887 - DNA, 5717 bp, Artificial Sequence
  derived and/or modified sequence
atggcgagtggcctggggagcccatccccctgcagtgccggtagcgaggaggaagatatggacgccctcctcaataattccctcccaccgccacaccctgagaacgaggaagaccccgaggaagatcttagtgagaccgaaacgcctaagctgaaaaaaaagaagaaacccaaaaagccaagagaccctaaaataccaaagtccaagaggcagaagaaggagttgggcgactcctcaggtgagggtcctgagttcgtagaggaagaagaggaggtggccctgaggtcagattctgaggggtccgactatacccccggaaaaaagaagaagaaaaagctcggccctaaaaaggaaaagaaatctaagtccaaacgtaaggaagaggaggaagaggaagatgacgacgatgatagcaaagagcccaaatccagcgcccagctgctggaggattgggggatggaagatatcgaccatgttttttcagaggaagattataggacactgactaattacaaggccttttcccagttcgtgagacctcttatcgccgctaaaaacccaaagatcgccgtgagtaagatgatgatggtgctgggggcaaagtggagggagttttctacaaacaacccattcaagggaagctctggggcttcagtagctgcagccgctgccgctgcagtggctgtggtcgagagcatggtgacggccacagaggtagccccaccccctcctcccgttgaagtgcctattcgcaaggccaaaacaaaggaaggaaagggaccaaacgccagacgcaagcctaaagggtccccaagggtgcccgacgcaaagaagccaaaacccaaaaaggtggccccattgaaaatcaagttaggaggatttggctccaagaggaagcggagttcctctgaggacgacgacctcgacgtcgagtccgactttgatgatgcctctattaatagctacagtgtttccgatgggtctacatccagaagctccaggtcacgtaagaagctgaggaccaccaagaagaagaagaagggggaggaggaggtgacagcagtggacggctacgaaacagatcaccaagactactgtgaagtgtgtcagcaagggggagaaataatcctttgcgacacttgtccacgcgcttatcacatggtctgtctcgaccccgacatggaaaaggctcctgagggaaaatggtcatgccctcattgcgagaaggagggcatacaatgggaggcaaaagaagacaattcagagggcgaggagattctggaagaggttgggggtgatttagaagaggaagacgaccatcatatggagttctgtagggtgtgcaaggatggaggggaactgctgtgctgcgacacctgcccctcatcataccatatccattgcctcaatcccccactccctgagatcccgaacggcgaatggctgtgcccgcgttgtacctgtccagcacttaagggtaaggtgcagaaaattttgatatggaagtgggggcagcctccgtccccaacacccgtgcctagacccccagatgccgacccaaataccccttctcctaagccacttgagggcaggcccgagcgccaattctttgtaaagtggcagggtatgtcttactggcattgctcgtgggtgtctgaactccagctcgagctccactgtcaggtaatgttccggaactaccagagaaagaatgatatggatgagcctccatctggcgacttcgggggtgatgaggaaaagagccgaaagaggaaaaataaggaccctaagtttgcggagatggaggagcgcttttatcggtatggtattaaacctgagtggatgatgatccacagaatccttaaccatagcgtcgataaaaaaggccacgttcattacctgattaagtggagagatttgccttacgatcaggcctcctgggaatctgaagatgtcgagatccaggattatgacctttttaaacagtcctattggaatcatagagaactgatgcgaggcgaagagggcaggcccggtaagaaactgaagaaggttaagctccgcaaattggaacgtccccctgagacaccgactgttgatccgacagtgaaatatgaaaggcagccagagtatttggatgccacaggcggaacactccatccttaccaaatggagggactgaactggctgagattttcgtgggcacaggggactgacaccatcttggcggacgagatgggactgggcaagactgttcaaaccgccgtcttcttatactccttgtacaaagagggtcatagtaagggacccttccttgtgtctgcccctctcagtaccattattaattgggaacgcgagttcgaaatgtgggccccagacatgtacgtggtcacttatgtgggcgataaggatagccgcgctattatccgcgaaaacgaatttagttttgaggataacgccattcggggaggaaaaaaggccagtaggatgaaaaaagaggcaagtgtgaagtttcacgtgctccttacatcatacgagttgattacaattgatatggctatcctcggtagcattgactgggcttgtctcatcgtcgacgaagcgcatcgcttaaaaaacaatcagtctaaattcttccgagtgctcaatggatacagtcttcaacacaaactcctgctcacaggaacgccactccagaacaacttggaggagctcttccatcttctgaatttcttgacacccgaaagattccataatctggaggggtttttagaggagttcgcagatatagcgaaggaggatcaaataaagaaactgcatgacatgctcggtcctcacatgttacggaggctcaaggctgacgttttcaagaacatgcctagtaaaaccgaacttatcgtgagagttgaacttagccctatgcagaagaagtattacaaatacattttgacacgcaacttcgaggcccttaatgcccgaggaggtggcaatcaggtttcgctgctgaatgtcgtgatggaccttaaaaagtgctgcaaccatccttatttgtttcccgtagccgctatggaagccccaaaaatgcctaatggcatgtatgacggatccgcgctgattcgcgcttccggtaagctactgctcctgcagaagatgctgaaaaacctcaaagagggcggtcaccgagtcctgatttttagtcagatgacaaaaatgctggacctgctcgaggatttccttgagcacgaaggttacaaatacgaaagaattgacgggggaataacaggtaacatgcggcaagaggccatcgaccgctttaacgctcccggtgcacagcagttttgttttctgctgtctacccgagctggagggttgggcattaacctagcgaccgccgacactgttatcatttacgactcggactggaacccacataatgacattcaggcattttccagagcccaccgcatcgggcaaaataagaaggtgatgatttatcgttttgttacacgcgcttctgtcgaggaaagaattacacaggtcgccaagaaaaagatgatgttaacccatctagtggtgcgtccaggccttggctccaaaactgggtcaatgtctaagcaggaactcgatgatatactgaaatttggtactgaagagctcttcaaagacgaagccaccgacggcggaggcgacaataaggaaggagaagactcttccgttatccactacgatgataaagcaattgagagactgctcgatagaaaccaggatgagacagaagatacagagctccagggcatgaatgagtatctgtcctcctttaaggtggcgcagtatgtagtgcgcgaggaggagatgggcgaggaagaagaggtggaacgggagatcatcaaacaggaagagtccgtggatcccgactattgggaaaaactccttcgacatcactacgagcagcagcaggaggatctcgccagaaatttgggtaagggaaaacgcatcaggaaacaggtgaactacaatgatggtagccaagaggatcgcgactggcaggatgaccagagtgacaatcagtcagattatagtgtcgcctctgaggaaggcgacgaggatttcgatgaaagaagcgaagcccctagaaggccgtcgaggaagggcctgaggaatgataaggacaaaccgctgccaccgcttctggcgcgtgtgggaggcaacatcgaggtgttagggtttaatgctagacagaggaaggccttcctgaacgctataatgaggtacggaatgccccctcaggacgcgttcaccactcagtggttggtaagggacttgcgcggaaaatcggagaaggagtttaaggcctatgtctcgttattcatgagacatttgtgtgagccgggtgccgatggtgccgagacgttcgccgacggtgtgccaagggaggggttgagccgtcagcacgtcctcacacggattggcgtcatgtccctgatacgcaaaaaggtacaggagttcgagcacgtcaacggcagatggtcaatgcctgagttagctgaggttgaagaaaataagaagatgtctcagccgggatccccgagccccaagacgcccactccgtcaacccctggcgatacacagcccaatactcccgctccagtcccgccagccgaggacggaattaagatcgaggaaaacagcctgaaggaggaggagtcgatcgaaggggagaaggaggtaaaaagcaccgcgcctgagactgctatcgaatgtactcaggccccagcgccagcctctgaggacgagaaagtggtggtggagcctcccgagggcgaggaaaaagtggagaaagcagaagttaaggagaggacagaggagccgatggagaccgaaccaaaaggagctgcagatgtggaaaaagttgaggagaagagtgccatcgacttgacaccaattgtggtcgaggataaggaggagaaaaaagaagaagaagagaagaaggaagtcatgctgcagaacggcgagacccctaaggatttgaatgatgagaagcagaaaaaaaatatcaaacagagatttatgtttaacattgccgacggtggtttcactgagcttcactctctgtggcagaacgaagagcgagccgcaacagtgacaaagaaaacctatgagatttggcatcggagacatgactactggcttcttgcaggaattatcaaccacggctatgcgagatggcaggacatccaaaacgatcccaggtatgctatcttgaatgagccattcaaaggggagatgaatcggggtaattttcttgagattaagaataagtttctggcaagaagatttaaattactggaacaagcactggttattgaggagcagcttcggagggccgcttatttaaatatgtcggaggacccatcccatcccagcatggcccttaacactcggttcgctgaagtggaatgcctcgcagagagccaccagcatttgtctaaggagtctatggcagggaacaagcctgccaacgcagtgctgcacaaagtcttgaaacagctggaagagttactgtccgacatgaaagcggatgtgacaagactcccagcaacgatagctcgaattccccctgtcgcagttcggttgcagatgtccgaaagaaatatccttagcagactggcaaacagagccccagaacctacgccacaacaggtcgcgcaacagcagta

SEQ ID NO: 111888 - protein, 435 aa, Artificial Sequence
  derived and/or modified sequence
MAASSLEQKLSRLEAKLKQENREARRRIDLNLDISPQRPRPIIVITLSPAPAPSQRAALQLPLANDGGSRSPSSESSPQHPTPPARPRHMLGLPSTLFTPRSMESIEIDQKLQEIMKQTGYLTIGGQRYQAEINDLENLGEMGSGTCGQVWKMRFRKTGHVIAVKQMRRSGNKEENKRILMDLDVVLKSHDCPYIVQCFGTFITNTDVFIAMELMGTCAEKLKKRMQGPIPERILGKMTVAIVKALYYLKEKHGVIHRDVKPSNILLDERGQIKLCDFGISGRLVDSKAKTRSAGCAAYMAPERIDPPDPTKPDYDIRADVWSLGISLVELATGQFPYKNCKTDFEVLTKVLQEEPPLLPGHMGFSGDFQSFVKDCLTKDHRKRPKYNKLLEHSFIKRYETLEVDVASWFKDVMAKTESPRTSGVLSQPHLPFFR

SEQ ID NO: 111889 - DNA, 1308 bp, Artificial Sequence
  derived and/or modified sequence
atggccgccagcagcctggagcagaagctgagcagactggaggccaagctgaagcaggagaacagagaggccagaagaagaatcgacctgaacctggacatcagcccccagagacccagacccatcatcgtgatcaccctgagccccgcccccgcccccagccagagagccgccctgcagctgcccctggccaacgacggcggcagcagaagccccagcagcgagagcagcccccagcaccccaccccccccgccagacccagacacatgctgggcctgcccagcaccctgttcacccccagaagcatggagagcatcgagatcgaccagaagctgcaggagatcatgaagcagaccggctacctgaccatcggcggccagagataccaggccgagatcaacgacctggagaacctgggcgagatgggcagcggcacctgcggccaggtgtggaagatgagattcagaaagaccggccacgtgatcgccgtgaagcagatgagaagaagcggcaacaaggaggagaacaagagaatcctgatggacctggacgtggtgctgaagagccacgactgcccctacatcgtgcagtgcttcggcaccttcatcaccaacaccgacgtgttcatcgccatggagctgatgggcacctgcgccgagaagctgaagaagagaatgcagggccccatccccgagagaatcctgggcaagatgaccgtggccatcgtgaaggccctgtactacctgaaggagaagcacggcgtgatccacagagacgtgaagcccagcaacatcctgctggacgagagaggccagatcaagctgtgcgacttcggcatcagcggcagactggtggacagcaaggccaagaccagaagcgccggctgcgccgcctacatggcccccgagagaatcgacccccccgaccccaccaagcccgactacgacatcagagccgacgtgtggagcctgggcatcagcctggtggagctggccaccggccagttcccctacaagaactgcaagaccgacttcgaggtgctgaccaaggtgctgcaggaggagccccccctgctgcccggccacatgggcttcagcggcgacttccagagcttcgtgaaggactgcctgaccaaggaccacagaaagagacccaagtacaacaagctgctggagcacagcttcatcaagagatacgagaccctggaggtggacgtggccagctggttcaaggacgtgatggccaagaccgagagccccagaaccagcggcgtgctgagccagccccacctgcccttcttcagatag

SEQ ID NO: 111890 - DNA, 1308 bp, Artificial Sequence
  derived and/or modified sequence
atggctgcatcctcgctggagcagaaactgagcaggctcgaggccaaattgaaacaagagaaccgggaagctcgcaggaggattgatttaaatttggacatctcaccccagagaccaaggccaattatcgtgatcaccttgagcccagctccagcgccctcccagagagctgcccttcagctgcccctcgccaatgacggaggatcccggagcccctcgtccgagtcttctccacagcatccaacgcctcctgctcgacctagacacatgctgggcttgccctccactcttttcacaccgcgaagcatggaatctattgagattgaccaaaagctccaggagataatgaagcaaacaggctacctgactataggaggccaaaggtaccaagcagagatcaatgacttggagaatttgggagagatgggaagcggaacgtgcggacaggtgtggaagatgcggttccggaagactggacatgtcattgctgtcaaacagatgagacgctctggcaacaaagaggaaaataagcgcatcctgatggatcttgacgtcgtccttaagtctcacgattgcccgtacatcgtccagtgctttggtacatttataactaacactgatgtcttcatcgcgatggaactgatgggtacttgcgcggagaagttaaagaaacgcatgcagggacctataccagagcgcatcctgggcaagatgacagtggccatagtcaaagctttatactatctgaaagagaaacacggcgtcatacaccgggatgtgaaaccttcaaacatcctgctggatgagcgggggcagattaaactctgtgacttcggtatatctggccggctggtggattccaaggcaaaaacacggtctgccgggtgcgcggcctacatggctcctgagcggatcgaccctcccgacccaaccaagccagactatgacattagagctgacgtgtggagccttggcataagcctggttgaattggccaccgggcaatttccttacaaaaactgcaagaccgatttcgaggtcctcaccaaagttctccaggaggagcctccactcttaccgggacatatggggttcagcggcgactttcaatcctttgtcaaagattgtctaacaaaggaccatcgaaaaagacctaagtacaacaagctcctggaacactcatttatcaaaaggtatgaaacactggaagtagatgtagctagctggttcaaggacgtgatggccaaaactgaatcgccgcgaacctccggcgttctgagtcaaccccatctgccattcttcagatag

SEQ ID NO: 111891 - DNA, 1308 bp, Artificial Sequence
  derived and/or modified sequence
atggccgccagcagcctggagcagaagctgagccggctggaggccaagctgaagcaggagaaccgggaggcccggaggagaattgacctgaacctggacatcagcccccagaggccccggcccatcatcgtcatcaccctgagccctgccccagcccccagccagagagctgccctgcagctgcccctggccaatgatggcggcagccgcagccccagcagcgagagcagcccccagcaccccaccccaccagcccggcccaggcacatgctgggcctgcccagcaccctcttcacccccaggtccatggagagcattgaaattgaccagaagctgcaggagatcatgaagcagacaggctacctgaccatcggcggccagcgctaccaggccgagatcaatgacctggagaacctgggggagatgggcagcggcacctgtggccaggtgtggaagatgaggttcaggaagacaggccacgtgattgctgtgaagcagatgaggaggagcggcaacaaggaggagaacaagaggatcctgatggacctggatgtggtgctgaagagccatgactgcccctacatcgtgcagtgcttcggcaccttcatcaccaacacagatgtgttcatcgccatggagctgatgggcacctgtgccgagaagctgaagaagaggatgcagggccccatccctgagcgcatcctgggcaagatgacagtggccatcgtgaaggccctgtactacctgaaggagaagcatggagtcatccacagagatgtgaagcccagcaacatcctgctggatgagcggggccagatcaagctgtgtgactttggcatcagcggccgcctggtggacagcaaggccaagaccaggtctgctggctgtgccgcctacatggcccctgagagaattgatcctccagaccccaccaagccagactatgacatccgggcagatgtgtggagcctgggcatcagcctggtggagctggccaccggccagttcccctacaagaactgcaagacagactttgaggtgctgaccaaggtgctgcaggaggagccccccctgctgcccggccacatgggcttcagcggggacttccagagctttgtgaaggactgcctgaccaaggaccacaggaagaggcccaagtacaacaagctgctggagcacagcttcatcaagagatatgagaccctggaggtggatgtggcctcctggttcaaggatgtgatggccaagacagagagccccaggaccagcggcgtgctgagccagccccacctgcccttcttcagatag

SEQ ID NO: 111892 - DNA, 1308 bp, Artificial Sequence
  derived and/or modified sequence
atggccgccagcagcctggagcagaagctgagccggctggaggccaaactcaaacaggagaatagggaggctaggcgtaggatcgacttaaatctggatatttccccccagcgccctagacctattatcgtaatcacactgagccccgcccctgccccctcccagagggctgctctgcagctgcccctcgctaacgacgggggaagtcgaagcccctctagcgagagcagtccacagcatcctactcccccagcccggcctaggcacatgttagggcttccatcaactctgttcactcccagatcaatggaatccattgagatcgatcagaagcttcaagagataatgaagcagaccggctacctgaccattggaggacagaggtaccaggcagaaattaacgatctggagaacctgggcgaaatgggctccggtacctgcggacaggtgtggaaaatgagatttcgaaaaaccggtcacgtcattgccgtgaaacagatgcggcgctccggtaacaaggaagaaaataaacgaatcctgatggacctggatgttgtccttaaaagtcatgactgtccatacatcgtgcagtgtttcggaacctttataactaataccgatgtgtttattgccatggagcttatggggacgtgtgctgagaagctgaaaaagcgtatgcaagggcccattccagagcgtatattagggaagatgacagtggccatcgtcaaggctctctattacttgaaggaaaagcacggggtcattcatagggacgtcaagcccagcaatatcttgctcgatgaacgtggacagatcaaactttgcgattttggaatcagtggccggttggtagattccaaggccaaaactcgcagcgcaggttgcgccgcttacatggcgccggaaagaattgaccccccagatcccactaagccggactacgatatccgggccgacgtctggagcctcggtattagcctcgttgagctggccaccgggcagttcccctataaaaattgtaagaccgacttcgaagtgctcacaaaggttctgcaggaagagcctcccctgctgcccggccacatgggctttagtggcgattttcagagcttcgtcaaggattgcctcacgaaagaccaccgtaagagacccaagtataataagctcctcgaacactcatttattaaacggtatgaaactctggaggtcgatgtcgcatcctggttcaaggacgttatggctaagacagagtccccccgaacatccggcgtcctatcccaaccacatctgcctttctttagatag

SEQ ID NO: 111893 - DNA, 1638 bp, Artificial Sequence
  derived and/or modified sequence
gtttgtctgccggactgacgggcggccgggcggtgcgcggcggcggtggcggcggggaagatggcggcgtcctccctggaacagaagctgtcccgcctggaagcaaagctgaagcaggagaaccgggaggcccggcggaggatcgacctcaacctggatatcagcccccagcggcccaggcccattattgtgatcactctaagccctgctcctgccccgtcccaacgagcagccctgcagctcccgctggccaacgatgggggcagccgctcgccatcctcagagagctccccgcagcaccccacgccccccgcccggccccgccacatgctggggctcccgtcaaccctgttcacaccccgcagcatggagagcattgagattgaccagaagctgcaggagatcatgaagcagacgggctacctgaccatcgggggccagcgctaccaggcagaaatcaacgacctggagaacttgggcgagatgggcagcggcacctgcggccaggtgtggaagatgcgcttccggaagaccggccacgtcattgccgttaagcaaatgcggcgctccgggaacaaggaggagaacaagcgcatcctcatggacctggatgtggtgctgaagagccacgactgcccctacatcgtgcagtgctttgggacgttcatcaccaacacggacgtcttcatcgccatggagctcatgggcacctgcgctgagaagctcaagaagcggatgcagggccccatccccgagcgcattctgggcaagatgacagtggcgattgtgaaggcgctgtactacctgaaggagaagcacggtgtcatccaccgcgacgtcaagccctccaacatcctgctggacgagcggggccagatcaagctctgcgacttcggcatcagcggccgcctggtggactccaaagccaagacgcggagcgccggctgtgccgcctacatggcacccgagcgcattgaccccccagaccccaccaagccggactatgacatccgggccgacgtatggagcctgggcatctcgttggtggagctggcaacaggacagtttccctacaagaactgcaagacggactttgaggtcctcaccaaagtcctacaggaagagcccccgcttctgcccggacacatgggcttctcgggggacttccagtccttcgtcaaagactgccttactaaagatcacaggaagagaccaaagtataataagctacttgaacacagcttcatcaagcgctacgagacgctggaggtggacgtggcgtcctggttcaaggatgtcatggcgaagactgagtcaccgcggactagcggcgtcctgagccagccccacctgcccttcttcaggtagctgcttggcggcggccagccccacagggggccaggggcatggccacaggcccccctccccacttggccacccagctgcctgccccttggcccctttgtcaggggccaggggtctgccgggtgggggtgccaacaggcctggccctttcctcccctgcatccagccatgggggcctctgcgattgccggaaggttgcatggctggtcccagggccagcacaggcccgaggccgggctgcctggttttatttttatttaactttattttctg

SEQ ID NO: 111894 - DNA, 1308 bp, Artificial Sequence
  derived and/or modified sequence
atggccgcttccagcttggaacagaagttatcacggctcgaagctaaattgaagcaggagaaccgagaagccaggcgcagaatcgacctcaaccttgatatcagtccacagagaccccgaccaataattgtcatcacactgagccccgcaccagccccttctcagagggccgctctccagctcccccttgccaacgacgggggttcacggagtccaagctctgagtcgtcaccgcagcacccaacccccccagctaggccccgtcatatgcttggattacctagtacactgttcacaccgcgatccatggagtcaattgaaatcgaccagaagctgcaggagatcatgaagcaaaccggctatctcactattgggggacagaggtatcaagcggagatcaacgacctggagaacctgggggagatgggttctgggacatgcgggcaggtctggaaaatgcgtttccgcaaaacaggacatgtgatcgccgtgaaacagatgaggcggagcggcaacaaagaggagaacaagagaattctaatggacttggatgttgtgctgaagtcacacgactgcccttatattgtccagtgcttcggaacatttattactaatacagacgtgtttattgccatggaattgatgggaacctgcgctgagaagttgaaaaaaagaatgcagggccctatccccgaacggattttgggaaagatgacagttgctattgtgaaggctctgtattatctcaaggaaaagcacggagtcattcatcgcgatgttaaaccaagcaacatactgctcgacgaaagaggccagattaaactttgcgacttcggcatctctggcaggcttgtcgactcaaaggccaagactcggtctgcaggatgtgcggcatacatggcccctgagagaattgatcccccagacccgacgaaacccgattacgacatcagagcggacgtttggtctctgggcatttcacttgttgagctagcaaccggccagttcccctacaagaactgtaaaacggacttcgaagttctcacaaaggtgcttcaggaagagcctcctctgctgcctggccatatggggttcagtggagatttccagtcttttgtcaaagactgtctcacaaaagatcaccgcaagaggcccaaatacaataaactcctcgaacacagttttattaaaagatatgaaaccctcgaggtggacgtcgctagctggttcaaggacgtgatggcgaaaacagaatcacctcgtacaagcggagtactgagccagccacacttgccctttttcaggtag

SEQ ID NO: 111895 - protein, 358 aa, Artificial Sequence
  derived and/or modified sequence
MWNSNDGGAGWRRKRIAGGFSKRASLGSERRVVAGEEGRERSWGVWGSPAGRRRGRLGRLGQCLKGRSLREPAGFSEAWDVAQALILLFKTGGFESYGSSSYGGAGGYTQSPGGFGSPAPSQAEKKSRARAQHIVPCTISQLLSATLVDEVFRIGNVEISQVTIVGIIRHAEKAPTNIVYKIDDMTAAPMDVRQWVDTDDTSSENTVVPPETYVKVAGHLRSFQNKKSLVAFKIMPLEDMNEFTTHILEVINAHMVLSKANSQPSAGRAPISNPGMSEAGNFGGNSFMPANGLTVAQNQVLNLIKACPRPEGLNFQDLKNQLKHMSVSSIKQAVDFLSNEGHIYSTVDDDHFKSTDAE

SEQ ID NO: 111896 - protein, 278 aa, Artificial Sequence
  derived and/or modified sequence
MGRGDRNKRSIRGFESYGSSSYGGAGGYTQSPGGFGSPAPSQAEKKSRARAQHIVPCTISQLLSATLVDEVFRIGNVEISQVTIVGIIRHAEKAPTNIVYKIDDMTAAPMDVRQWVDTDDTSSENTVVPPETYVKVAGHLRSFQNKKSLVAFKIMPLEDMNEFTTHILEVINAHMVLSKANSQPSAGRAPISNPGMSEAGNFGGNSFMPANGLTVAQNQVLNLIKACPRPEGLNFQDLKNQLKHMSVSSIKQAVDFLSNEGHIYSTVDDDHFKSTDAE

SEQ ID NO: 111897 - protein, 122 aa, Artificial Sequence
  derived and/or modified sequence
LEDMNEFTTHILEVINAHMVLSKANSQPSAGRAPISNPGMSEAGNFGGNSFMPANGLTVAQNQVLNLIKACPRPEGLNFQDLKNQLKHMSVSSIKQAVDFLSNEGHIYSTVDDDHFKSTDAE

SEQ ID NO: 111898 - protein, 179 aa, Artificial Sequence
  derived and/or modified sequence
MWNSNDGGGFESYGSSSYGGAGGYTQSPGGFGSPAPSQAEKKSRARAQHIVPCTISQLLSATLVDEVFRIGNVEISQVTIVGIIRHAEKAPTNIVYKIDDMTAAPMDVRQWVDTDDTSSENTVVPPETYVKVAGHLRSFQNKKSLVAFKIMPLEDMNEFTTHILEVINAHMVLSKANSQ

SEQ ID NO: 111899 - DNA, 837 bp, Artificial Sequence
  derived and/or modified sequence
atgggaaggggtgacaggaataagagaagcattcgcggctttgaatcttacggctcatccagctacggaggtgccggtggatacactcaatcacccggcgggtttggttccccggcaccatcacaggccgagaagaagtccagagcccgcgctcagcacattgtgccttgcactatttcccagctcctgagcgccactctcgtggatgaagtgttcaggatagggaacgtagagatatcacaagtgaccatcgtgggtatcatccgccacgctgagaaggcacccactaacattgtgtacaaaatcgacgacatgaccgcagcccctatggatgtgcgacaatgggtggacacagatgacaccagcagcgagaatacagtggtgcccccggaaacctatgtcaaggtggccggacatcttagatcattccagaataaaaaaagcttggtggccttcaagattatgcccttggaggacatgaatgagttcaccactcatattttggaggttatcaatgcccacatggtgcttagcaaagcaaacagtcagccctccgccggtagggctcctatcagtaacccgggcatgagcgaggctggaaacttcggtggcaactcatttatgcctgcaaacggcttaacagttgctcagaaccaggtgttaaatcttatcaaggcatgccctagacccgaggggctgaattttcaggacctcaagaatcagttaaaacacatgagcgtgtcttcaattaaacaggccgtggattttctgtccaatgaggggcacatttattctaccgtggacgatgaccactttaagagcacggacgctgagtag

SEQ ID NO: 111900 - DNA, 837 bp, Artificial Sequence
  derived and/or modified sequence
atgggccgcggggacaggaacaagaggagcatccggggctttgagagctatggcagcagcagctatggaggagctgggggctacacccagagccctgggggcttcggcagccctgcccccagccaggccgagaagaagagccgggcccgggcccagcacatcgtgccctgcaccatcagccagctgctgagcgccaccctggtggatgaggtgttcagaattggaaatgtggagatcagccaggtgaccatcgtgggcatcatcagacatgctgagaaggcccccaccaacatcgtgtacaagattgatgacatgacagctgcccccatggatgtgcggcagtgggtggacacagatgacaccagcagcgagaacacagtggtgcccccagagacctacgtgaaggtggccggccacctgcggagcttccagaacaagaagagcctggtggccttcaagatcatgcccctggaggacatgaatgagttcaccacccacatcctggaggtgatcaatgcccacatggtgctgagcaaggccaacagccagcccagcgctggccgggcccccatcagcaaccctggcatgtctgaggccggcaactttggaggcaacagcttcatgcctgccaacggcctgactgtggcccagaaccaggtgctgaacctgatcaaggcctgccccaggcctgagggcctgaacttccaggacctgaagaaccagctgaagcacatgtctgtgagcagcatcaagcaggccgtggacttcctgagcaatgaaggccacatctacagcacagtggatgatgaccacttcaagagcacagatgctgagtag

SEQ ID NO: 111901 - DNA, 837 bp, Artificial Sequence
  derived and/or modified sequence
atgggccggggcgaccggaacaagcggagcatccggggcttcgagtcatatgggtcttcgtcttacggtggtgccggcggctacacgcagagtcctgggggttttggaagtcccgctccctcacaggccgagaagaaatccagagcgcgagcccagcatatagttccctgtactatctcccaactcctatcggccacacttgttgacgaggtatttaggatcgggaacgtggagatatctcaagtcactattgttggaatcatacggcatgcagagaaggctcccaccaacattgtctacaagatagatgatatgacagcagcccctatggatgtgcgacagtgggtggacactgatgacaccagctctgagaacacagtggtgcccccagaaacttatgttaaggttgcgggccatctgcgctctttccagaacaagaaaagtcttgtggcttttaaaatcatgccactcgaagatatgaacgagtttacaacccatatcctcgaggtaatcaatgcccacatggtattgagtaaagcaaatagtcagccttccgccggacgggctcccatcagcaacccaggcatgagtgaggctggaaacttcggcggtaatagctttatgcccgccaatggcctcacagtcgctcagaaccaagtcttaaacttgattaaagcctgtccccggcctgaaggcctaaatttccaggatctgaagaatcagctgaaacatatgtcagtctcctccataaagcaggccgtagactttttgagcaacgagggccatatttatagcacagtcgatgatgatcatttcaaaagtaccgacgccgagtag

SEQ ID NO: 111902 - DNA, 837 bp, Artificial Sequence
  derived and/or modified sequence
atgggacgcggtgatcggaataagcggtcaattcgcggattcgagagctacggtagctcgagctacgggggagccggtggctacacacaaagcccgggagggttcggctcgcccgctccatctcaagccgagaagaagtctagggcccgagctcaacatatcgtcccttgtactatcagtcaacttttgtccgccacccttgtggatgaggtgtttaggatcggcaacgtggagatatcacaggtgactattgttggcattatcagacacgcagagaaggcccctactaacatagtgtataaaatagatgacatgaccgccgctcccatggacgtgcgacagtgggtggatacagacgacaccagttctgaaaatacagtagtcccgccagaaacatatgtgaaagtcgccggacatctccgctctttccagaataagaaatccctggtcgcatttaagatcatgccattggaggatatgaacgagtttaccacccacattttggaggtgataaatgcccacatggtgctgtctaaagctaactctcaaccctcagccggacgagccccaatatcaaatccagggatgtccgaggcaggtaatttcggcggaaatagtttcatgcccgctaatggactgaccgtggcacagaatcaagtgctcaacctcattaaggcctgtccgaggccggagggtctgaattttcaagatttgaaaaatcagctaaagcatatgtccgtgagctccatcaagcaggctgtcgactttctgtctaacgaagggcacatctattcaacggttgacgacgaccacttcaagtctaccgacgcagagtag

SEQ ID NO: 111903 - DNA, 1162 bp, Artificial Sequence
  derived and/or modified sequence
gctagtgcggagggttttgcccttcgtaaagatggccgcggaggcttttggagccaactgggagcgcagtacgcgttttctggagcatgggcagaggagacaggaacaagcgtagcatccgtggattcgaaagctatggcagctcctcatacgggggagccggcggctacacgcagtccccggggggctttggatcgcccgcaccttctcaagccgaaaagaaatcaagagcccgagcccagcacattgtgccctgtactatatctcagctgctttctgccactttggttgatgaagtgttcagaattgggaatgttgagatttcacaggtcactattgtggggatcatcagacatgcagagaaggctccaaccaacattgtttacaaaatagatgacatgacagctgcacccatggacgttcgccagtgggttgacacagatgacaccagcagtgaaaacactgtggttcctccagaaacatatgtgaaagtggcaggccacctgagatcttttcagaacaaaaagagcctggtagcctttaagatcatgcccctggaggatatgaatgagttcaccacacatattctggaagtgatcaatgcacacatggtactaagcaaagccaacagccagccctcagcagggagagcacctatcagcaatccaggaatgagtgaagcagggaactttggtgggaatagcttcatgccagcaaatggcctcactgtggcccaaaaccaggtgttgaatttgattaaggcttgtccaagacctgaagggttgaactttcaggatctcaagaaccagctgaaacacatgtctgtatcctcaatcaagcaagctgtggattttctgagcaatgaggggcacatctattctactgtggatgatgaccattttaaatccacagatgcagaataactggatctaactgggtacctgagatattttacagctggacctagtttcacaatctgttgtctccagctctgcatatgtctggccagggggcttctaggaagtaggtttcatctatcaaatgtctcctctgacttccttttgaaacttactgctcttctgttttattttgttttgtttgaagctcagagggagatgggcaattgacagggatgcaatccagggtgggatttcttgaggaa

SEQ ID NO: 111904 - DNA, 837 bp, Artificial Sequence
  derived and/or modified sequence
atgggcagaggcgacagaaacaagagaagcatcagaggcttcgagagctacggcagcagcagctacggcggcgccggcggctacacccagagccccggcggcttcggcagccccgcccccagccaggccgagaagaagagcagagccagagcccagcacatcgtgccctgcaccatcagccagctgctgagcgccaccctggtggacgaggtgttcagaatcggcaacgtggagatcagccaggtgaccatcgtgggcatcatcagacacgccgagaaggcccccaccaacatcgtgtacaagatcgacgacatgaccgccgcccccatggacgtgagacagtgggtggacaccgacgacaccagcagcgagaacaccgtggtgccccccgagacctacgtgaaggtggccggccacctgagaagcttccagaacaagaagagcctggtggccttcaagatcatgcccctggaggacatgaacgagttcaccacccacatcctggaggtgatcaacgcccacatggtgctgagcaaggccaacagccagcccagcgccggcagagcccccatcagcaaccccggcatgagcgaggccggcaacttcggcggcaacagcttcatgcccgccaacggcctgaccgtggcccagaaccaggtgctgaacctgatcaaggcctgccccagacccgagggcctgaacttccaggacctgaagaaccagctgaagcacatgagcgtgagcagcatcaagcaggccgtggacttcctgagcaacgagggccacatctacagcaccgtggacgacgaccacttcaagagcaccgacgccgagtag

SEQ ID NO: 111905 - protein, 357 aa, Artificial Sequence
  derived and/or modified sequence
MQARALLLAALAALALAREPPAAPCPARCDVSRCPSPRCPGGYVPDLCNCCLVCAASEGEPCGGPLDSPCGESLECVRGLCRCRWSHAVCGTDGHTYANVCALQAASRRALQLSGTPVRQLQKGACPLGLHQLSSPRYKFNFIADVVEKIAPAVVHIELFLRHPLFGRNVPLSSGSGFIMSEAGLIITNAHVVSSNSAAPGRQQLKVQLQNGDSYEATIKDIDKKSDIATIKIHPKKKLPVLLLGHSADLRPGEFVVAIGSPFALQNTVTTGIVSTAQREGRELGLRDSDMDYIQTDAIINYGNSGGPLVNLDGEVIGINTLKVTAGISFAIPSDRITRFLTEFQDKQIKAPSLAVH

SEQ ID NO: 111906 - DNA, 1074 bp, Artificial Sequence
  derived and/or modified sequence
atgcaggcacgcgctcttctgctggctgccctggctgccctggccctggctcgcgagccaccagccgccccatgtcctgcccgatgtgacgtttctagatgcccttctccacggtgtccaggtggttacgtgcccgatctctgcaattgctgcctggtgtgcgccgcgtcggagggggaaccatgcggcggcccccttgattctccgtgtggagagtcgctggagtgcgtcaggggtctgtgccggtgtcggtggtcacacgcagtctgtggcacagacggtcatacctacgcgaatgtctgcgcattgcaagcagccagcaggcgagcgctgcaactgagcgggaccccagtgcggcaactgcagaagggcgcatgccctctcggactgcatcagctgagcagccccagatacaaattcaatttcattgcggacgtagtggaaaagatcgcgcccgctgtcgtgcacatcgagcttttccttcgtcatccgctgtttggacgcaatgtccccctatccagtggctctgggtttatcatgtccgaagccggactgattataaccaatgcccacgtggtttctagtaactccgccgcacccggaaggcagcaacttaaagtccagctccagaatggcgactcctacgaggctacaatcaaggacattgacaaaaaaagcgatatcgccaccattaaaatacatcccaagaaaaaactgcctgtgctcctgctgggacactccgcagacctcagaccaggtgaatttgtggtcgccattggctcaccctttgctctccagaacacagtgacgaccggtatcgtaagtaccgcacagagggagggccgggaactcggattacgggactcggacatggactatatccagaccgacgcgatcatcaactatgggaactcgggaggcccactggtcaacctggacggggaggtgatcggaattaacaccttgaaggtcaccgccggcattagcttcgcaattccttcggaccgcatcactcgatttctgaccgagtttcaggacaaacagattaaagcaccctctctggctgttcactag

SEQ ID NO: 111907 - DNA, 1074 bp, Artificial Sequence
  derived and/or modified sequence
atgcaggcccgggccctgctgctggccgccctggccgccctggccctggcccgggagcccccagctgccccctgcccagcccgctgtgatgtgagccgctgccccagcccccgctgccctgggggctacgtgcctgacctgtgcaactgctgcctggtgtgtgccgccagcgagggggagccctgtggcggccccctggacagcccctgtggggagagcctggagtgtgtgcggggcctgtgccgctgccgctggagccatgctgtgtgtggcacagatggccacacctacgccaacgtgtgtgccctgcaggccgccagccggcgggccctgcagctgagcggcacccctgtgcggcagctgcagaagggggcctgccccctgggcctgcaccagctgagcagcccccgctacaagttcaacttcatcgcagatgtggtggagaagatcgccccagctgtggtgcacatcgagctgttcctgcggcaccccctgtttggaagaaatgtgcccctgagcagcggcagcggcttcatcatgtctgaggccggcctcatcatcaccaatgcccacgtggtgagcagcaacagcgctgcccctggccggcagcagctgaaggtgcagctgcagaatggagacagctatgaggccaccatcaaggacatcgacaagaagagtgacatcgccaccatcaagatccaccccaagaagaagctgcctgtgctgctgctgggccacagcgctgacctgcggcctggagaatttgtggtggccatcggcagcccctttgccctgcagaacacagtgaccactggaattgtgtccacagcccagcgggagggccgggagctgggcctgcgggacagcgacatggactacatccagacagatgccatcatcaactacggcaacagcggcggccccctggtgaacctggatggagaggtgattggcatcaacaccctgaaggtgacagctggcatcagctttgccatccccagcgaccgcatcacccgcttcctgacagagttccaggacaagcagatcaaggcccccagcctggccgtgcactag

SEQ ID NO: 111908 - DNA, 1074 bp, Artificial Sequence
  derived and/or modified sequence
atgcaggcccgggccctgctgctggccgccctggccgccctggccctggccagagagcccccagctgccccctgccccgccagatgcgatgtgtcccgatgcccctcccctagatgccccggcggctacgtgcctgacttgtgcaattgctgcctggtctgtgccgctagcgaaggggaaccatgcggcggtccgctcgactccccctgcggggaaagccttgaatgtgttagaggcctgtgtcggtgtcgatggtctcacgctgtgtgcggaaccgacggacatacgtacgctaatgtttgtgctttgcaggcggccagccggagagccctgcagctgagtggcactcccgttagacagctccagaagggggcatgtcctctgggcctgcatcagctgagcagcccgcggtataaatttaactttatcgccgatgtcgtcgaaaaaatcgccccagcggttgtgcatatcgagctatttctgcgacacccactgttcggaaggaatgtgcccctgagctccggcagcggcttcattatgagtgaggctggactgattatcactaacgctcatgttgtcagctcaaacagcgctgcacccggtcggcagcagttgaaagtacagttacagaacggagacagctatgaggctacaataaaggatatcgacaagaaatctgatatcgcaactatcaagatccaccctaaaaaaaaattgccggtgctgttacttggacatagtgccgatctgcggccaggggaatttgtggtcgccattggctccccgtttgctttgcagaacactgttacaacagggattgtgagcactgctcagcgcgaaggaagagagctgggcttaagggactcggacatggactacatccagaccgacgctattatcaattacggtaactccggcggaccactggttaacctggacggtgaggtgataggcattaataccttgaaagtcactgctgggattagtttcgcaatccccagcgaccgcataacaagattcctgaccgagtttcaggataaacagatcaaggcacccagccttgcagtccactag

SEQ ID NO: 111909 - DNA, 1074 bp, Artificial Sequence
  derived and/or modified sequence
atgcaggccagagccctgctgttggctgcactggcggcactggcccttgccagagagccaccagccgctccttgccctgctcggtgcgacgtgtcgcggtgcccgtccccgaggtgccccggaggatacgtgccagatttgtgcaattgttgtctagtgtgcgccgcaagcgagggcgagccctgtgggggacccctggactccccctgcggcgaatcactcgagtgtgtccgtggcctgtgccgatgtcggtggtcccacgccgtctgcgggaccgacggccacacgtacgccaatgtctgtgccctgcaagcagcctccaggagggccctgcagttgtcagggacaccggtgcggcagctgcagaaaggagcctgcccactcgggctgcatcagctgtcttcacctaggtataaattcaatttcatcgcagatgttgtagagaagatagcgccagctgtcgtgcacattgaactctttttacggcatcctctgttcggacgcaacgtccccctgtcttcaggaagcggcttcataatgagtgaggcgggtttaatcattacgaacgcccatgtcgtgagctctaacagcgccgcaccaggtcgccagcagttgaaggtgcagctccagaacggagactcctacgaagccacaatcaaagatatcgacaagaagtctgacatcgctacaattaaaatccaccccaagaaaaagttaccggtcttgctccttggccactccgcggacctgcggccaggagaatttgtcgtcgctatcggctccccttttgccttgcagaacacggtcaccacgggaattgtgagcacagcacagcgggaaggtcgggagctcggtttgagagatagtgatatggattatatccaaacagatgcgattatcaactacggaaactctgggggtcccctggttaacctggatggcgaagtgatcggcattaacacattaaaggtcacggccggaataagtttcgcaattccaagcgaccgcatcacccggtttctgaccgagtttcaggataaacagattaaggcgccttctcttgccgtgcattag

SEQ ID NO: 111910 - DNA, 1074 bp, Artificial Sequence
  derived and/or modified sequence
atgcaggccagagccctgctgctggccgccctggccgccctggccctggccagagagccccccgccgccccctgccccgccagatgcgacgtgagcagatgccccagccccagatgccccggcggctacgtgcccgacctgtgcaactgctgcctggtgtgcgccgccagcgagggcgagccctgcggcggccccctggacagcccctgcggcgagagcctggagtgcgtgagaggcctgtgcagatgcagatggagccacgccgtgtgcggcaccgacggccacacctacgccaacgtgtgcgccctgcaggccgccagcagaagagccctgcagctgagcggcacccccgtgagacagctgcagaagggcgcctgccccctgggcctgcaccagctgagcagccccagatacaagttcaacttcatcgccgacgtggtggagaagatcgcccccgccgtggtgcacatcgagctgttcctgagacaccccctgttcggcagaaacgtgcccctgagcagcggcagcggcttcatcatgagcgaggccggcctgatcatcaccaacgcccacgtggtgagcagcaacagcgccgcccccggcagacagcagctgaaggtgcagctgcagaacggcgacagctacgaggccaccatcaaggacatcgacaagaagagcgacatcgccaccatcaagatccaccccaagaagaagctgcccgtgctgctgctgggccacagcgccgacctgagacccggcgagttcgtggtggccatcggcagccccttcgccctgcagaacaccgtgaccaccggcatcgtgagcaccgcccagagagagggcagagagctgggcctgagagacagcgacatggactacatccagaccgacgccatcatcaactacggcaacagcggcggccccctggtgaacctggacggcgaggtgatcggcatcaacaccctgaaggtgaccgccggcatcagcttcgccatccccagcgacagaatcaccagattcctgaccgagttccaggacaagcagatcaaggcccccagcctggccgtgcactag

SEQ ID NO: 111911 - DNA, 2023 bp, Artificial Sequence
  derived and/or modified sequence
ctgcgctccctgcgccctggggatgcccctgccgccctgacgcccgccagcctgagccaccggcgcatgtgaccgcgcgtccgccccagtcccatccgtaggcgcccggcgcccggccccgcagcggcctcgttgtccccgccggcccccgcccggtctcccgcgctgccacccgccgccggccctgccgccatgcaggcgcgagcgctgctcctggccgcgttggccgcgctggcgctggcccgggagccccctgcggcgccgtgtcccgcgcgctgcgacgtgtcgcggtgtcccagcccccgctgccccggcggctacgtgcccgacctctgcaactgctgcctggtgtgcgccgccagcgagggcgagccctgtggcggccctctggactcgccttgcggcgagagcctggagtgcgtgcgcggcctatgccgctgccgctggtcgcacgccgtgtgtggcaccgacgggcacacctatgccaacgtgtgcgcgctgcaggcggccagccgccgcgcgctgcagctctccgggacgcccgtgcgccagctgcagaagggcgcctgcccgttgggtctccaccagctgagcagcccgcgctacaagttcaacttcattgctgacgtggtggagaagatcgcaccagccgtggtccacatagagctcttcctgagacacccgctgtttggccgcaacgtgcccctgtccagcggttctggcttcatcatgtcagaggccggcctgatcatcaccaatgcccacgtggtgtccagcaacagtgctgccccgggcaggcagcagctcaaggtgcagctacagaatggggactcctatgaggccaccatcaaagacatcgacaagaagtcggacattgccaccatcaagatccatcccaagaaaaagctccctgtgttgttgctgggtcactcggccgacctgcggcctggggagtttgtggtggccatcggcagtcccttcgccctacagaacacagtgacaacgggcatcgtcagcactgcccagcgggagggcagggagctgggcctccgggactccgacatggactacatccagacggatgccatcatcaactacgggaactccgggggaccactggtgaacctggatggcgaggtcattggcatcaacacgctcaaggtcacggctggcatctcctttgccatcccctcagaccgcatcacacggttcctcacagagttccaagacaagcagatcaaagccccctcactggcagttcattgagagcagggggcttcctcacgtttccccctcctccatgaccccgtcagccaagcacatggaccccagtgcagccaaggctggtgccatgagggctggtcacatgaagagctgctgttgaggatgccgccattgttcttctgtgtccattatgggaagacaatctggagccaggcagagcctgtctttcccaaagaagctgaagtcttcttctcttgaacagtggggaccatctaatctcttgagcccttttcctgttggcttctaggaagctcagagctagattcaggggtgcacccagacctgtcctagcatgctcctttccctaatgaccgagtctttcctgttgaattatcccattctccatgggtgcctttgactttggcctccttactggaaattagcggagctgctgtttgcacacactgagctgtgaggtggctttccttggaagtggatgatagtgtcctcttcccttcttgcctctctctttctcctgagacaggatccccctggggcctaggtttgctcctttgttgtacaggggctgtcccagttagtgctgacctcatcccagaaccccctgggaaatatcccctgtcctcagagctgtgtcccctccccaaggacagtgcagactaactgaggagcctgataaaccttagctgcatggcacacttgcaattttaaaatccttctgaagttgactggtgtttgtacttgcttctcttttttatttaataaaatccaatgatccaaa

SEQ ID NO: 111912 - protein, 133 aa, Artificial Sequence
  derived and/or modified sequence
MVSHRYPRIQSIKVQFTEYKKEKGFILTSQKEDEIMKVQNNSVIINCDGFYLISLKGYFSQEVNISLHYQKDEEPLFQLKKVRSVNSLMVASLTYKDKVYLNVTTDNTSLDDFHVNGGELILIHQNPGEFCVL

SEQ ID NO: 111913 - DNA, 402 bp, Artificial Sequence
  derived and/or modified sequence
atggtgagccacagataccccagaatccagagcatcaaggtgcagttcaccgagtacaagaaggagaagggcttcatcctgaccagccagaaggaggacgagatcatgaaggtgcagaacaacagcgtgatcatcaactgcgacggcttctacctgatcagcctgaagggctacttcagccaggaggtgaacatcagcctgcactaccagaaggacgaggagcccctgttccagctgaagaaggtgagaagcgtgaacagcctgatggtggccagcctgacctacaaggacaaggtgtacctgaacgtgaccaccgacaacaccagcctggacgacttccacgtgaacggcggcgagctgatcctgatccaccagaaccccggcgagttctgcgtgctgtag

SEQ ID NO: 111914 - DNA, 402 bp, Artificial Sequence
  derived and/or modified sequence
atggtttctcaccgttacccacggatccagtctatcaaggttcagtttaccgagtacaaaaaggaaaaagggttcatcctcacctctcagaaagaggacgaaatcatgaaggtgcagaataactctgtaatcattaattgcgacggtttttatctgatttcactgaagggctactttagtcaggaagttaatattagtttgcactaccaaaaggacgaggagcctctcttccaactaaaaaaggtaagatccgttaattcccttatggtggcctccttaacttataaggacaaggtgtatctgaatgtgaccacagataacacatccctggacgactttcatgtaaatggcggcgagttaattctgatacaccagaaccctggcgagttctgcgtgctgtag

SEQ ID NO: 111915 - DNA, 402 bp, Artificial Sequence
  derived and/or modified sequence
atggtgtcacaccggtaccctcggatccagtctattaaagttcaatttacggagtacaagaaagaaaaaggctttatccttacaagccaaaaggaagacgagatcatgaaagtgcaaaacaacagtgtgattataaattgtgatggcttctaccttattagtctgaagggctactttagtcaggaagtcaatattagcctacactaccagaaagacgaggagcccctctttcaactgaaaaaggtgcgctccgtgaattcgttgatggtcgcctctctgacctacaaagataaggtgtatcttaacgttactaccgacaatactagtctggacgactttcacgtcaacggaggcgaacttattctgatccaccagaaccccggcgaattctgcgtgctgtag

SEQ ID NO: 111916 - DNA, 402 bp, Artificial Sequence
  derived and/or modified sequence
atggtgagccaccgctacccccgcatccagagcatcaaggtgcagttcacagagtacaagaaggagaagggcttcatcctgaccagccagaaggaggatgagatcatgaaggtgcagaacaacagcgtcatcatcaactgtgatggcttctacctgatcagcctgaagggctacttcagccaggaggtgaacatcagcctgcactaccagaaggatgaggagcccctcttccagctgaagaaggtgcgctctgtgaacagcctgatggtggccagcctgacctacaaggacaaggtgtacctgaatgtgaccacagacaacaccagcctggatgacttccacgtgaatggaggagagctgatcctgatccaccagaaccctggagagttctgtgtgctgtag

SEQ ID NO: 111917 - DNA, 402 bp, Artificial Sequence
  derived and/or modified sequence
atggtgagccaccggtacccccggatccagagcatcaaggtgcagttcaccgaatacaagaaggagaagggttttatcctgacgagccagaaggaagacgagattatgaaggtccaaaacaactcagtcatcataaactgcgatggattttacctgatctctctgaaagggtacttctcccaggaagtgaatattagcttgcactatcaaaaagatgaggagcctctattccagctcaagaaggtcagaagcgtcaatagtctgatggtcgcatcattaacctataaagacaaagtatatctaaatgtgacgacagacaatacatccctcgatgattttcacgtcaacggaggcgaactcattctgatccaccagaatccaggggaattttgcgtgctgtag

SEQ ID NO: 111918 - DNA, 402 bp, Artificial Sequence
  derived and/or modified sequence
atggtgagccaccggtacccccggatccagagcatcaaggtgcagttcacagagtacaagaaggagaagggatttattctcacaagtcagaaagaagatgagatcatgaaggttcagaacaactcagtcattattaattgcgacggattctatctcattagcctcaaaggctatttcagccaggaggtcaatatcagcctgcactaccagaaggatgaggaacctctctttcagctgaaaaaagtccgctctgtgaattccctcatggtcgcttccctgacctacaaggataaagtttatttgaacgttacaacagataatacatcgctggacgacttccatgtgaatggtggcgaactaattctaatacaccaaaatccaggcgaattttgtgtcctttag

SEQ ID NO: 111919 - DNA, 402 bp, Artificial Sequence
  derived and/or modified sequence
atggtctcacaccggtacccccgtatccagagtattaaggtgcaattcacggagtataaaaaagaaaagggattcattctgacgtctcagaaggaagatgagatcatgaaggtccagaacaattctgtgatcattaattgcgatggattttatctgatttcacttaaaggatatttttcccaggaggttaatatcagtttgcactatcagaaagacgaggagccattattccagctgaagaaggtgagatcagtgaatagcctgatggttgcgtcactgacgtataaagacaaagtttatctaaacgttaccactgataatacatcccttgatgattttcatgtgaacgggggtgaactgatccttatacaccagaaccccggagagttctgtgtgttgtag

SEQ ID NO: 111920 - DNA, 402 bp, Artificial Sequence
  derived and/or modified sequence
atggtatcccatagatacccacgtattcaaagcattaaggtgcagttcacagagtacaaaaaggagaagggtttcatactgacgtcacagaaggaggacgagataatgaaggtgcagaataatagtgtgatcatcaattgtgatggattctatttgatcagcctcaaaggttatttctcacaggaagtcaacatttccctgcactaccagaaggacgaagagcctttgtttcagctgaagaaggtgcgctcagtgaacagtttgatggtagcctccctaacttataaagataaagtttatctgaacgtgacaaccgataacacatccctggacgactttcacgtcaatggaggtgagttaatcctgatccatcagaatcccggagaattctgcgttctttag

SEQ ID NO: 111921 - DNA, 3429 bp, Artificial Sequence
  derived and/or modified sequence
aaaacacaggacacatggctccattcaaggctaactgattgcacaacggctctgagcaggagagagcaaaaggtgaaccacagttgtacagcttgctggtggttggggtcacattggactatcaatatccaggagatgttgagaaaaagaggggatcctttccaacaagtcatccagcaactctgggacagaaggaaagctgtgggaagaaaagcagggtgctggtttctaggacactaaacctcatggtatcacatcggtatcctcgaattcaaagtatcaaagtacaatttaccgaatataagaaggagaaaggtttcatcctcacttcccaaaaggaggatgaaatcatgaaggtgcagaacaactcagtcatcatcaactgtgatgggttttatctcatctccctgaagggctacttctcccaggaagtcaacattagccttcattaccagaaggatgaggagcccctcttccaactgaagaaggtcaggtctgtcaactccttgatggtggcctctctgacttacaaagacaaagtctacttgaatgtgaccactgacaatacctccctggatgacttccatgtgaatggcggagaactgattcttatccatcaaaatcctggtgaattctgtgtcctttgaggggctgatggcaatatctaaaaccaggcaccagcatgaacaccaagctgggggtggacagggcatggattcttcattgcaagtgaaggagcctcccagctcagccacgtgggatgtgacaagaagcagatcctggccctcccgcccccacccctcagggatatttaaaacttattttatataccagttaatcttatttatccttatattttctaaattgcctagccgtcacaccccaagattgccttgagcctactaggcacctttgtgagaaagaaaaaatagatgcctcttcttcaagatgcattgtttctattggtcaggcaattgtcataataaacttatgtcattgaaaacggtacctgactaccatttgctggaaatttgacatgtgtgtggcattatcaaaatgaagaggagcaaggagtgaaggagtggggttatgaatctgccaaaggtggtatgaaccaacccctggaagccaaagcggcctctccaaggttaaattgattgcagtttgcatattgcctaaatttaaactttctcatttggtgggggttcaaaagaagaatcagcttgtgaaaaatcaggacttgaagagagccgtctaagaaataccacgtgctttttttctttaccattttgctttcccagcctccaaacatagttaatagaaatttcccttcaaagaactgtctggggatgtgatgctttgaaaaatctaatcagtgacttaagagagattttcttgtatacagggagagtgagataacttattgtgaagggttagctttactgtacaggatagcagggaactggacatctcagggtaaaagtcagtacggattttaatagcctggggaggaaaacacattctttgccacagacaggcaaagcaacacatgctcatcctcctgcctatgctgagatacgcactcagctccatgtcttgtacacacagaaacattgctggtttcaagaaatgaggtgatcctattatcaaattcaatctgatgtcaaatagcactaagaagttattgtgccttatgaaaaataatgatctctgtctagaaataccatagaccatatatagtctcacattgataattgaaactagaagggtctataatcagcctatgccagggcttcaatggaatagtatccccttatgtttagttgaaatgtccccttaacttgatataatgtgttatgcttatggcgctgtggacaatctgatttttcatgtcaactttccagatgatttgtaacttctctgtgccaaaccttttataaacataaatttttgagatatgtattttaaaattgtagcacatgtttccctgacattttcaatagaggatacaacatcacagaatctttctggatgattctgtgttatcaaggaattgtactgtgctacaattatctctagaatctccagaaaggtggagggctgttcgcccttacactaaatggtctcagttggatttttttttcctgttttctatttcctcttaagtacaccttcaactatattcccatccctctattttaatctgttatgaaggaaggtaaataaaaatgctaaatagaagaaattgtaggtaaggtaagaggaatcaagttctgagtggctgccaaggcactcacagaatcataatcatggctaaatatttatggagggcctactgtggaccaggcactgggctaaatacttacatttacaagaatcattctgagacagatattcaatgatatctggcttcactactcagaagattgtgtgtgtgtttgtgtgtgtgtgtgtgtgtgtatttcactttttgttattgaccatgttctgcaaaattgcagttactcagtgagtgatatccgaaaaagtaaacgtttatgactataggtaatatttaagaaaatgcatggttcatttttaagtttggaatttttatctatatttctcacagatgtgcagtgcacatgcaggcctaagtatatgttgtgtgtgttgtttgtctttgatgtcatggtcccctctcttaggtgctcactcgctttgggtgcacctggcctgctcttcccatgttggcctctgcaaccacacagggatatttctgctatgcaccagcctcactccaccttccttccatcaaaaatatgtgtgtgtgtctcagtccctgtaagtcatgtccttcacagggagaattaacccttcgatatacatggcagagttttgtgggaaaagaattgaatgaaaagtcaggagatcagaattttaaatttgacttagccactaactagccatgtaaccttgggaaagtcatttcccatttctgggtcttgcttttctttctgttaaatgagaggaatgttaaatatctaacagtttagaatcttatgcttacagtgttatctgtgaatgcacatattaaatgtctatgttcttgttgctatgagtcaaggagtgtaaccttctcctttactatgttgaatgtatttttttctggacaagcttacatcttcctcagccatctttgtgagtccttcaagagcagttatcaattgttagttagatattttctatttagagaatgcttaagggattccaatcccgatccaaatcataatttgttcttaagtatactgggcaggtcccctattttaagtcataattttgtatttagtgctttcctggctctcagagagtattaatattgatattaataatatagttaatagtaatattgctatttacatggaaacaaataaaagatctcagaattca

SEQ ID NO: 111922 - DNA, 1240 bp, Artificial Sequence
  derived and/or modified sequence
gtacagcttgctggtggttggggtcacattggactatcaatatccaggagatgttgagaaaaagaggggatcctttccaacaagtcatccagcaactctgggacagaaggaaagctgtgggaagaaaagcagggtgctggtttctaggacactaaacctcatggtatcacatcggtatcctcgaattcaaagtatcaaagtacaatttaccgaatataagaaggagaaaggtttcatcctcacttcccaaaaggaggatgaaatcatgaaggtgcagaacaactcagtcatcatcaactgtgatgggttttatctcatctccctgaagggctacttctcccaggaagtcaacattagccttcattaccagaaggatgaggagcccctcttccaactgaagaaggtcaggtctgtcaactccttgatggtggcctctctgacttacaaagacaaagtctacttgaatgtgaccactgacaatacctccctggatgacttccatgtgaatggcggagaactgattcttatccatcaaaatcctggtgaattctgtgtcctttgaggggctgatggcaatatctaaaaccaggcaccagcatgaacaccaagctgggggtggacagggcatggattcttcattgcaagtgaaggagcctcccagctcagccacgtgggatgtgacaagaagcagatcctggccctcccgcccccacccctcagggatatttaaaacttattttatataccagttaatcttatttatccttatattttctaaattgcctagccgtcacaccccaagattgccttgagcctactaggcacctttgtgagaaagaaaaaatagatgcctcttcttcaagatgcattgtttctattggtcaggcaattgtcataataaacttatgtcattgaaaacggtacctgactaccatttgctggaaatttgacatgtgtgtggcattatcaaaatgaagaggagcaaggagtgaaggagtggggttatgaatctgccaaaggtggtatgaaccaacccctggaagccaaagcggcctctccaaggttaaattgattgcagtttgcatattgcctaaatttaaactttctcatttggtgggggttcaaaagaagaatcagcttgtgaaaaatcagtgacttaagagagattttcttgtatacagggagagtgagataacttattgtgaagggttagctttactgtacaggatagcagggaact

SEQ ID NO: 111923 - protein, 440 aa, Artificial Sequence
  derived and/or modified sequence
MTYWRLENIAKTEPPKIFRVKPVLGIKRMIQIEWIKPELAPVSSDLKYTLRFRTVNSTSWMEVNFAKNRKDKNQTYNLTGLQPFTEYVIALRCAVKESKFWSDWSQEKMGMTEEEAPCGLELWRVLKPAEADGRRPVRLLWKKARGAPVLEKTLGYNIWYYPESNTNLTETMNTTNQQLELHLGGESFWVSMISYNSLGKSPVATLRIPAIQEKSFQCIEVMQACVAEDQLVVKWQSSALDVNTWMIEWFPDVDSEPTTLSWESVSQATNWTIQQDKLKPFWCYNISVYPMLHDKVGEPYSIQAYAKEGVPSEGPETKVENIGVKTVTITWKEIPKSERKGIICNYTIFYQAEGGKGFCKHAHSEVEKNPKPQIDAMDRPVVGMAPPSHCDLQPGMNHLASLNLSENGAKSTHLLGFWGLNESEVTVPERRVLRKWKELL

SEQ ID NO: 111924 - protein, 582 aa, Artificial Sequence
  derived and/or modified sequence
MCIRQLKFFTTACVCECPQNILSPQPSCVNLGMMWTWALWMLPSLCKFSLAALPAKPENISCVYYYRKNLTCTWSPGKETSYTQYTVKRTYAFGEKHDNCTTNSSTSENRASCSFFLPRITIPDNYTIEVEAENGDGVIKSHMTYWRLENIAKTEPPKIFRVKPVLGIKRMIQIEWIKPELAPVSSDLKYTLRFRTVNSTSWMEVNFAKNRKDKNQTYNLTGLQPFTEYVIALRCAVKESKFWSDWSQEKMGMTEEEAPCGLELWRVLKPAEADGRRPVRLLWKKARGAPVLEKTLGYNIWYYPESNTNLTETMNTTNQQLELHLGGESFWVSMISYNSLGKSPVATLRIPAIQEKSFQCIEVMQACVAEDQLVVKWQSSALDVNTWMIEWFPDVDSEPTTLSWESVSQATNWTIQQDKLKPFWCYNISVYPMLHDKVGEPYSIQAYAKEGVPSEGPETKVENIGVKTVTITWKEIPKSERKGIICNYTIFYQAEGGKGFCKHAHSEVEKNPKPQIDAMDRPVVGMAPPSHCDLQPGMNHLASLNLSENGAKSTHLLGFWGLNESEVTVPERRVLRKWKELL

SEQ ID NO: 111925 - DNA, 1749 bp, Artificial Sequence
  derived and/or modified sequence
atgtgcattcggcagctgaagttcttcacaaccgcatgcgtatgcgagtgcccacagaacatcctcagcccccagccatcttgcgtgaaccttggaatgatgtggacctgggccttgtggatgctgccctcgctgtgcaagttctcactggcggctcttcctgcaaaaccagaaaatatcagctgcgtgtactattatcgcaagaacctgacttgcacctggtcccctggcaaggaaacttcctatacacagtatactgtgaaaaggacatacgccttcggtgaaaagcatgataattgcactaccaacagtagcacatctgagaaccgcgcctcttgttccttctttctgcccagaataactattccagataattacaccatagaggtcgaggcagaaaatggagacggggtaatcaaatcacacatgacatactggaggctggaaaacatcgctaagaccgaacctcctaagattttccgcgtgaaaccagttctgggcattaaacggatgattcaaatagagtggattaaaccagagttggcacccgtgtccagcgacctgaaatacactctgcgtttcaggaccgtaaacagtactagctggatggaggtcaattttgcaaaaaaccggaaggacaaaaaccaaacatacaatctgacaggcctccaacccttcaccgaatacgtgattgccttacggtgcgcagtaaaggagtcaaaattttggtccgactggtcccaagagaagatgggaatgacagaggaagaggccccatgcggactagaactatggcgcgttttgaaaccggccgaagctgacggcaggcggccggtgaggttgttgtggaagaaggcgaggggtgcccccgtacttgagaagaccctgggctacaatatctggtactatccagagtcaaacactaatctgactgaaacaatgaataccacaaatcaacagctggagcttcacctcgggggtgagtctttctgggtgtcaatgatcagctataactctttaggtaagagtccggttgccacactccgaatcccggccatccaggagaagtcgttccagtgcatcgaggttatgcaggcctgcgtggcggaggaccaattggtcgtgaagtggcagagctcagcccttgacgtgaatacttggatgatcgaatggttcccagatgtcgactctgaaccgactacactctcatgggaaagtgtctcgcaggctaccaactggacaattcagcaggacaagttgaagccattttggtgctataatatcagcgtatatccaatgttgcacgacaaagtcggtgaaccctactcaatacaggcctacgcgaaggagggggtgccctccgaaggcccagaaacaaaggtggagaacatcggtgtgaaaaccgtcaccattacttggaaagaaatccctaagtcagagcgcaagggcatcatttgcaattatactatcttttatcaggctgagggcgggaagggcttttgtaagcacgcacatagcgaggtggagaaaaaccccaagcctcagatcgacgcgatggacagaccagttgtggggatggcgccaccttctcattgtgatctgcagccaggtatgaaccacctggcatcactcaaccttagcgagaacggggcgaagagcacacatctgctgggtttttggggtctcaacgaatcagaggtcaccgtccctgaacgccgcgtgctacgcaaatggaaggagctcttgtag

SEQ ID NO: 111926 - DNA, 2212 bp, Artificial Sequence
  derived and/or modified sequence
ttaacaataatgcaatccatttcccagcataagtgggtaagtgccactttgacttgggctgggcttaaaagcacaagaaaagctcgcagacaatcagagtggaaacactcccacatcttagtgtggataaattaaagtccagattgttcttcctgtcctgacttgtgctgtgggaggtggagttgcctttgatgcaaatcctttgagccagcagaacatctgtggaacatcccctgatacatgaagctctctccccagccttcatgtgttaacctggggatgatgtggacctgggcactgtggatgctcccctcactctgcaaattcagcctggcagcgcttttggagaaaaacatgataattgtacaaccaatagttctacaagtgaaaatcgtgcttcgtgctcttttttccttccaagaataacgatcccagataattataccattgaggtggaagctgaaaatggagatggtgtaattaaatctcatatgacatactggagattagagaacatagcgaaaactgaaccacctaagattttccgtgtgaaaccagttttgggcatcaaacgaatgattcaaattgaatggataaagcctgagttggcgcctgtttcatctgatttaaaatacacacttcgattcaggacagtcaacagtaccagctggatggaagtcaacttcgctaagaaccgtaaggataaaaaccaaacgtacaacctcacggggctgcagccttttacagaatatgtcatagctctgcgatgtgcggtcaaggagtcaaagttctggagtgactggagccaagaaaaaatgggaatgactgaggaagaagctccatgtggcctggaactgtggagagtcctgaaaccagctgaggcggatggaagaaggccagtgcggttgttatggaagaaggcaagaggagccccagtcctagagaaaacacttggctacaacatatggtactatccagaaagcaacactaacctcacagaaacaatgaacactactaaccagcagcttgaactgcatctgggaggcgagagcttttgggtgtctatgatttcttataattctcttgggaagtctccagtggccaccctgaggattccagctattcaagaaaaatcatttcagtgcattgaggtcatgcaggcctgcgttgctgaggaccagctagtggtgaagtggcaaagctctgctctagacgtgaacacttggatgattgaatggtttccggatgtggactcagagcccaccaccctttcctgggaatctgtgtctcaggccacgaactggacgatccagcaagataaattaaaacctttctggtgctataacatctctgtgtatccaatgttgcatgacaaagttggcgagccatattccatccaggcttatgccaaagaaggcgttccatcagaaggtcctgagaccaaggtggagaacattggcgtgaagacggtcacgatcacatggaaagagattcccaagagtgagagaaagggtatcatctgcaactacaccatcttttaccaagctgaaggtggaaaaggattctgtaagcacgcccatagcgaagtggaaaaaaaccccaagccccagatagatgctatggatagacctgttgtaggcatggctcccccatctcattgtgacttgcaacctggcatgaatcacttagcttctttaaatctctctgaaaatggggccaagagcacccaccttttggggttttgggggttaaatgagagtgaagtgacagtacctgagaggagagtcctgaggaaatggaaggagttgttataatttgtcctggttaggccctgaattgacctcccgggagctccccgaccatcattcccaggaatggcgtgcctggcttaaagagtgaggaggaacagaccctgtcaccatgacttctactgcccctgccaaatcatgcttttgtttttcagtccaccttatctcctgacatcttaaatactgggcaaggcttggattcttgcttaggctaaataattttttcttatggtaaaatacacgtaaaatatttttccagtttaaacatttgaaagtgtacaatttagtggcattagaagcattcacaatattgtgcaaccatcaccactatttccagaactcttctatttctgcccaaatagaagccctatacccattcattagtcactccccattcctctcct

SEQ ID NO: 111927 - DNA, 2426 bp, Artificial Sequence
  derived and/or modified sequence
caccagacagcactccagcactctgcttggggggcattcgaaacagcaaaatcactcataaaaggcaaaaaattgcaaaaaaaaatagtaataaccagcatggcactaaatagaccatgaaaagacatgtgtgtgcagtatgaaaattgagacaggaaggcagagtgtcagcttgttccacctcagctgggaatgtgcatcaggcaactcaagtttttcaccacggcatgtgtctgtgaatgtccgcaaaacattctctctccccagccttcatgtgttaacctggggatgatgtggacctgggcactgtggatgctcccctcactctgcaaattcagcctggcagctctgccagctaagcctgagaacatttcctgtgtctactactataggaaaaatttaacctgcacttggagtccaggaaaggaaaccagttatacccagtacacagttaagagaacttacgcttttggagaaaaacatgataattgtacaaccaatagttctacaagtgaaaatcgtgcttcgtgctcttttttccttccaagaataacgatcccagataattataccattgaggtggaagctgaaaatggagatggtgtaattaaatctcatatgacatactggagattagagaacatagcgaaaactgaaccacctaagattttccgtgtgaaaccagttttgggcatcaaacgaatgattcaaattgaatggataaagcctgagttggcgcctgtttcatctgatttaaaatacacacttcgattcaggacagtcaacagtaccagctggatggaagtcaacttcgctaagaaccgtaaggataaaaaccaaacgtacaacctcacggggctgcagccttttacagaatatgtcatagctctgcgatgtgcggtcaaggagtcaaagttctggagtgactggagccaagaaaaaatgggaatgactgaggaagaagctccatgtggcctggaactgtggagagtcctgaaaccagctgaggcggatggaagaaggccagtgcggttgttatggaagaaggcaagaggagccccagtcctagagaaaacacttggctacaacatatggtactatccagaaagcaacactaacctcacagaaacaatgaacactactaaccagcagcttgaactgcatctgggaggcgagagcttttgggtgtctatgatttcttataattctcttgggaagtctccagtggccaccctgaggattccagctattcaagaaaaatcatttcagtgcattgaggtcatgcaggcctgcgttgctgaggaccagctagtggtgaagtggcaaagctctgctctagacgtgaacacttggatgattgaatggtttccggatgtggactcagagcccaccaccctttcctgggaatctgtgtctcaggccacgaactggacgatccagcaagataaattaaaacctttctggtgctataacatctctgtgtatccaatgttgcatgacaaagttggcgagccatattccatccaggcttatgccaaagaaggcgttccatcagaaggtcctgagaccaaggtggagaacattggcgtgaagacggtcacgatcacatggaaagagattcccaagagtgagagaaagggtatcatctgcaactacaccatcttttaccaagctgaaggtggaaaaggattctgtaagcacgcccatagcgaagtggaaaaaaaccccaagccccagatagatgctatggatagacctgttgtaggcatggctcccccatctcattgtgacttgcaacctggcatgaatcacttagcttctttaaatctctctgaaaatggggccaagagcacccaccttttggggttttgggggttaaatgagagtgaagtgacagtacctgagaggagagtcctgaggaaatggaaggagttgttataatttgtcctggttaggccctgaattgacctcccgggagctccccgaccatcattcccaggaatggcgtgcctggcttaaagagtgaggaggaacagaccctgtcaccatgacttctactgcccctgccaaatcatgcttttgtttttcagtccaccttatctcctgacatcttaaatactgggcaaggcttggattcttgcttaggctaaataattttttcttatggtaaaatacacgtaaaatatttttccagtttaaacatttgaaagtgtacaatttagtggcattagaagcattcacaatattgtgcaaccatcaccactatttccagaactcttctatttctgcccaaatagaagccctatacccattcattagtcactccccattcctctcctcccacagcccctggcaactaccaaactgctttgtgtctctatggattgcctattttggatatttcatatacatagaatcataaaata

SEQ ID NO: 111928 - DNA, 1749 bp, Artificial Sequence
  derived and/or modified sequence
atgtgcatccggcagctgaagttcttcaccacagcctgtgtgtgtgagtgcccccagaacatcctgagcccccagcccagctgtgtgaacctgggcatgatgtggacctgggccctgtggatgctgcccagcctgtgcaagttcagcctggccgccctgcctgccaagccagagaacatcagctgtgtgtactactacaggaagaacctgacctgcacctggagccctgggaaggagaccagctacacccagtacacagtgaagaggacctacgcctttggagagaagcatgacaactgcaccaccaacagcagcaccagcgagaacagagccagctgcagcttcttcctgccccgcatcaccatcccagacaactacaccatcgaggtggaggctgaaaatggagatggagtcatcaagagccacatgacctactggaggctggagaacatcgccaagacagagccccccaagatcttccgggtgaagcctgtgctgggcatcaagaggatgatccagatcgagtggatcaagccagagctggcccctgtgtccagtgacctgaagtacaccctgcgcttcagaacagtgaacagcacctcctggatggaggtgaactttgccaagaacaggaaggacaagaaccagacctacaacctgaccggcctgcagcccttcacagaatatgtgattgccctgcgctgtgctgtgaaggagagcaagttctggagcgactggagccaggagaagatgggcatgacagaggaggaggccccctgtggcctggagctgtggagggtgctgaagccagctgaggctgatggccggcggcctgtgcggctgctgtggaagaaggcccggggggcccctgtgctggagaagaccctgggctacaacatctggtactacccagagagcaacaccaacctgacagagaccatgaacaccaccaaccagcagctggagctgcacctgggcggggagagcttctgggtgtccatgatctcctacaacagcctgggcaagagccctgtggccaccctgcgcatcccagccatccaggagaagagcttccagtgcatcgaggtgatgcaggcctgtgtggccgaggaccagctggtggtgaagtggcagagcagcgccctggatgtgaacacctggatgattgagtggttcccagatgtggacagcgagcccaccaccctgtcctgggagagcgtgtcccaggccaccaactggaccatccagcaggacaagctgaagcccttctggtgctacaacatctctgtgtaccccatgctgcatgacaaggtgggggagccctacagcatccaggcctatgccaaggagggcgtgcccagcgagggccctgagaccaaggtggagaacatcggcgtgaagacagtgaccatcacctggaaggagatccccaagtctgagaggaagggcatcatctgcaactacaccatcttctaccaggccgagggcggcaagggcttctgcaagcacgcccacagcgaggtggagaagaaccccaagccccagattgatgccatggacaggcctgtggtgggcatggccccacccagccactgtgacctgcagcccggcatgaaccacctggccagcctgaacctgtctgaaaatggagccaagagcacccacctgctgggcttctggggcctgaatgaaagtgaggtgacagtgcctgagcggcgggtgctgaggaagtggaaggagctgctgtag

SEQ ID NO: 111929 - DNA, 1749 bp, Artificial Sequence
  derived and/or modified sequence
atgtgcatccggcagctgaagttcttcaccaccgcctgcgtgtgcgagtgcccacaaaacattctgtcacctcaacctagctgcgttaacctggggatgatgtggacatgggctttatggatgctgccctcgctctgtaaattttcccttgcggcgctcccagcgaagcctgaaaatatctcttgtgtatactactatcgaaagaatttgacatgcacttggtcgccaggcaaggaaactagctacacccaatacactgtcaagagaacctacgcttttggagagaagcatgacaactgcaccactaattcaagcacaagcgaaaaccgcgccagttgcagcttcttcttgcctagaattactatacccgataattatacgattgaagtggaagccgagaacggtgacggcgttatcaaatcccatatgacatattggcggcttgaaaacatagcgaagaccgaaccccccaagattttccgagtcaaacctgttctgggcattaaacgcatgattcagattgagtggattaaacctgagctggcacctgtgtcttcagacttgaaatacactttgaggtttaggactgtcaacagcacctcttggatggaagtgaattttgccaagaacaggaaagacaaaaatcagacgtataatctcacagggctacagccattcacagagtatgtgatcgctctgcggtgtgctgtgaaggaatctaaattttggtcagattggtcacaagagaaaatgggaatgactgaggaagaggccccatgcggcctcgaactgtggagagttctgaagccagccgaggcagacggccgcagacccgttagactgctgtggaagaaggcccggggagctccagtgctggaaaaaacactgggctacaacatctggtactatccagagtcaaacactaatctgacggaaaccatgaataccactaaccagcaactggagctgcacctcggcggggaatccttctgggtgagcatgatcagctacaattctttgggcaaaagcccggtggcgaccctacggattccagctatccaggaaaagtcgttccagtgcatcgaggtcatgcaggcttgtgtcgcggaggaccagctcgtagtgaaatggcaatccagtgcgcttgatgttaacacatggatgatagagtggtttccagacgtagactctgaacccacaaccctgagttgggagtccgtgtcccaggctaccaattggactatccaacaggacaaattgaaacccttctggtgctataacatttccgtctatccaatgttacatgacaaagtcggcgaaccatactcaattcaagcctacgctaaggaaggcgtgcctagcgagggccccgaaaccaaagtggagaatattggcgtcaaaacagtgacaattacctggaaagaaatacccaaatccgaacgaaaaggaattatctgcaactacaccattttttaccaggctgagggtggtaagggcttttgtaaacatgctcattccgaggtagagaagaaccctaaaccacaaatagacgcaatggacaggcccgtggtgggtatggccccgccctcccactgcgacctgcagcccgggatgaatcacctggcatcactcaatctgagcgaaaacggcgctaaatctacccatctgttaggcttctgggggcttaatgaaagtgaggtcaccgtccccgaacggcgggtgctgagaaagtggaaagaactgctctag

SEQ ID NO: 111930 - DNA, 1749 bp, Artificial Sequence
  derived and/or modified sequence
atgtgtatacgacagctgaagttctttacaactgcatgcgtgtgcgaatgtccacagaatattctaagcccacagccatcatgcgtgaacttggggatgatgtggacttgggcactttggatgctgccctccttgtgcaaatttagcttagctgctttgcccgcaaagccagaaaacatctcttgcgtgtattactataggaaaaacctgacatgcacctggagtccagggaaggagacgagttatactcagtataccgttaagaggacttatgcttttggcgaaaagcatgacaactgtactaccaactctagtacctctgagaacagggcatcttgctcgttcttcctccctcgcatcaccatcccggataactacacgattgaggttgaggctgagaacggagacggtgtcataaagtctcacatgacatactggcgcttagaaaatatcgcaaagactgaacccccaaagatttttcgtgtcaagcccgtgctcgggatcaagcggatgatacagatcgaatggattaagcctgaactggcccctgtgtctagtgacctgaagtacaccttgaggttcagaacggtcaattccaccagttggatggaagtcaacttcgccaaaaacagaaaagataagaatcaaacttacaatctcaccggtctgcagccattcaccgagtatgtgattgcgttacgctgtgcagttaaggaaagcaaattctggagtgactggagtcaggaaaaaatgggaatgacagaggaagaagcaccttgtggcctggagctgtggcgggtcctaaaaccggctgaagctgacggtcggagacccgtacgcctgctgtggaagaaagccaggggagcgccagttctagagaagaccttaggttataacatctggtattatccggagtctaacaccaacttgactgagacgatgaatacaacaaaccagcagttggagctccacctgggtggcgaatcattctgggtgtcaatgatttcttacaactcccttggcaaatcccctgtcgctacactgcgcattccagcaattcaggagaaatcattccaatgtatagaggtgatgcaggcctgcgtcgctgaagatcagctggtggtgaagtggcagtccagtgccctggacgttaatacttggatgatcgaatggttccccgatgtagattctgaacctaccactctgagctgggagtcggtgagtcaagctaccaattggactatccagcaggacaagctgaagcctttctggtgctacaatatttccgtatacccaatgctgcatgacaaagttggcgagccttattccatccaagcctacgccaaggagggagtgccctcagagggacctgaaaccaaagtagagaacatcggagtcaaaaccgttactatcacatggaaggagatacccaaaagcgagcggaagggcattatctgcaattacactattttctaccaggcagaaggtggcaaaggattctgtaaacacgctcattcagaggtggagaagaatcctaagccgcagatagatgccatggacagacctgtcgtgggtatggctccaccttcacactgcgacctgcagccaggtatgaatcacctggctagtctgaacctgtccgagaatggggctaagagcactcacttgctcggtttctgggggttgaacgagagcgaggttaccgtgccggagcgcagggtgctccgcaagtggaaagagctgctgtag

SEQ ID NO: 111931 - DNA, 1749 bp, Artificial Sequence
  derived and/or modified sequence
atgtgcatcagacagctgaagttcttcaccaccgcctgcgtgtgcgagtgcccccagaacatcctgagcccccagcccagctgcgtgaacctgggcatgatgtggacctgggccctgtggatgctgcccagcctgtgcaagttcagcctggccgccctgcccgccaagcccgagaacatcagctgcgtgtactactacagaaagaacctgacctgcacctggagccccggcaaggagaccagctacacccagtacaccgtgaagagaacctacgccttcggcgagaagcacgacaactgcaccaccaacagcagcaccagcgagaacagagccagctgcagcttcttcctgcccagaatcaccatccccgacaactacaccatcgaggtggaggccgagaacggcgacggcgtgatcaagagccacatgacctactggagactggagaacatcgccaagaccgagccccccaagatcttcagagtgaagcccgtgctgggcatcaagagaatgatccagatcgagtggatcaagcccgagctggcccccgtgagcagcgacctgaagtacaccctgagattcagaaccgtgaacagcaccagctggatggaggtgaacttcgccaagaacagaaaggacaagaaccagacctacaacctgaccggcctgcagcccttcaccgagtacgtgatcgccctgagatgcgccgtgaaggagagcaagttctggagcgactggagccaggagaagatgggcatgaccgaggaggaggccccctgcggcctggagctgtggagagtgctgaagcccgccgaggccgacggcagaagacccgtgagactgctgtggaagaaggccagaggcgcccccgtgctggagaagaccctgggctacaacatctggtactaccccgagagcaacaccaacctgaccgagaccatgaacaccaccaaccagcagctggagctgcacctgggcggcgagagcttctgggtgagcatgatcagctacaacagcctgggcaagagccccgtggccaccctgagaatccccgccatccaggagaagagcttccagtgcatcgaggtgatgcaggcctgcgtggccgaggaccagctggtggtgaagtggcagagcagcgccctggacgtgaacacctggatgatcgagtggttccccgacgtggacagcgagcccaccaccctgagctgggagagcgtgagccaggccaccaactggaccatccagcaggacaagctgaagcccttctggtgctacaacatcagcgtgtaccccatgctgcacgacaaggtgggcgagccctacagcatccaggcctacgccaaggagggcgtgcccagcgagggccccgagaccaaggtggagaacatcggcgtgaagaccgtgaccatcacctggaaggagatccccaagagcgagagaaagggcatcatctgcaactacaccatcttctaccaggccgagggcggcaagggcttctgcaagcacgcccacagcgaggtggagaagaaccccaagccccagatcgacgccatggacagacccgtggtgggcatggccccccccagccactgcgacctgcagcccggcatgaaccacctggccagcctgaacctgagcgagaacggcgccaagagcacccacctgctgggcttctggggcctgaacgagagcgaggtgaccgtgcccgagagaagagtgctgagaaagtggaaggagctgctgtag

SEQ ID NO: 111932 - DNA, 1323 bp, Artificial Sequence
  derived and/or modified sequence
atgacatattggcggctggaaaatatcgctaaaaccgaacctccgaaaatattccgcgtcaaacccgtgcttgggataaagagaatgatccagattgaatggatcaaaccagaactggctcccgtctcatctgacttaaaatacacactgcgctttcgtacggttaattcaaccagctggatggaagttaacttcgccaaaaataggaaagacaaaaaccaaacttataatctgacagggctccagcccttcacagaatacgtgatagccctgagatgcgccgttaaagagtctaagttctggtctgactggtcccaagagaaaatgggaatgacagaggaagaggcaccttgcgggttggaactgtggcgcgtcctgaagcccgctgaggcagacggtaggagacctgtccgcctattatggaaaaaagctagaggagccccagtccttgaaaaaacactaggctataatatctggtactaccccgagagcaacacaaatctcacggaaaccatgaacacgactaaccaacagctagagctgcacctcggtggcgagtctttctgggtaagcatgatatcatataactcactgggaaaaagtcccgtggcaaccttacggattcctgccatccaagaaaaaagcttccaatgcattgaagttatgcaagcatgcgtggctgaggatcagttggtggtcaaatggcagagttcagccctagacgtcaacacctggatgattgaatggtttccggacgtggattctgagcctactacactcagctgggagtcagtgagtcaggccaccaattggaccatacagcaggacaagctgaagcccttctggtgttacaacattagcgtgtatccgatgctgcacgacaaggtaggagaaccctactccatccaggcatacgctaaggagggggtcccctccgaggggccagaaacaaaggtcgagaacataggtgtgaagaccgttactattacatggaaggagattcctaagagtgagaggaagggaatcatttgcaactacacaatattctaccaggctgaaggcggtaaagggttctgcaaacacgctcactccgaggtggaaaagaatcctaaaccccaaattgacgccatggatcggccggtggtgggtatggcccccccatcacattgcgacctgcagccagggatgaaccacctggcgtcactgaatttaagcgaaaacggagcaaagtccactcatctcctcggattctggggcctgaatgaatctgaggtgaccgtcccggagcggcgagttctgaggaagtggaaggagctgctgtag

SEQ ID NO: 111933 - DNA, 1323 bp, Artificial Sequence
  derived and/or modified sequence
atgacctactggaggctggagaacatcgccaagacagagccccccaagatcttccgggtgaagcctgtgctgggcatcaagaggatgatccagatcgagtggatcaagccagagctggcccctgtgtccagtgacctgaagtacaccctgcgcttcagaacagtgaacagcacctcctggatggaggtgaactttgccaagaacaggaaggacaagaaccagacctacaacctgaccggcctgcagcccttcacagaatatgtgattgccctgcgctgtgctgtgaaggagagcaagttctggagcgactggagccaggagaagatgggcatgacagaggaggaggccccctgtggcctggagctgtggagggtgctgaagccagctgaggctgatggccggcggcctgtgcggctgctgtggaagaaggcccggggggcccctgtgctggagaagaccctgggctacaacatctggtactacccagagagcaacaccaacctgacagagaccatgaacaccaccaaccagcagctggagctgcacctgggcggggagagcttctgggtgtccatgatctcctacaacagcctgggcaagagccctgtggccaccctgcgcatcccagccatccaggagaagagcttccagtgcatcgaggtgatgcaggcctgtgtggccgaggaccagctggtggtgaagtggcagagcagcgccctggatgtgaacacctggatgattgagtggttcccagatgtggacagcgagcccaccaccctgtcctgggagagcgtgtcccaggccaccaactggaccatccagcaggacaagctgaagcccttctggtgctacaacatctctgtgtaccccatgctgcatgacaaggtgggggagccctacagcatccaggcctatgccaaggagggcgtgcccagcgagggccctgagaccaaggtggagaacatcggcgtgaagacagtgaccatcacctggaaggagatccccaagtctgagaggaagggcatcatctgcaactacaccatcttctaccaggccgagggcggcaagggcttctgcaagcacgcccacagcgaggtggagaagaaccccaagccccagattgatgccatggacaggcctgtggtgggcatggccccacccagccactgtgacctgcagcccggcatgaaccacctggccagcctgaacctgtctgaaaatggagccaagagcacccacctgctgggcttctggggcctgaatgaaagtgaggtgacagtgcctgagcggcgggtgctgaggaagtggaaggagctgctgtag

SEQ ID NO: 111934 - DNA, 1323 bp, Artificial Sequence
  derived and/or modified sequence
atgacctactggcggctggagaacatcgccaagaccgagccccccaaaatttttcgcgtgaagccggtgctgggcatcaagcggatgatacaaatcgaatggattaaacctgagctggccccggtgtcttctgatctgaagtacaccttgcgctttcgaaccgtgaactccacgagctggatggaagtgaactttgccaagaatagaaaagacaaaaatcagacgtacaacctgacagggctccagccttttactgagtacgtgatcgccctacgatgcgctgttaaagaaagcaagttctggagtgactggtcccaggaaaagatgggcatgaccgaggaagaagctccgtgcggattagaattatggagagtgctaaagccagccgaggccgacgggcgcaggccagtaaggcttctctggaagaaagcaagaggggcccccgtgttagagaaaactcttggatataatatttggtactaccccgaatctaacacaaatttgaccgagaccatgaatactacaaatcagcagttagagctgcatcttggtggagaaagtttttgggtatcaatgatttcttataattcactaggtaagagcccagttgcaacattgcgaattcccgccatccaggaaaagtcgttccaatgcattgaggtgatgcaggcctgtgttgctgaggatcagcttgtggtcaagtggcagtccagtgcccttgatgttaacacttggatgatagagtggtttcctgacgtcgattctgagccgactaccctgagctgggaaagtgtatcccaagccacgaactggacaatccagcaggataagctcaaacctttctggtgctataatatatcagtgtaccccatgctccacgacaaagtcggggaaccatattccatacaggcttacgccaaggaaggggtgccaagcgagggcccagaaacaaaagtggagaacatcggggtaaaaacagtaactatcacctggaaggagatccctaagtcagagcgcaagggcattatttgcaactacaccatattctaccaagccgagggaggcaagggattttgtaagcacgcccatagtgaagttgaaaagaaccccaaaccccagatcgacgctatggaccgccccgtggtgggaatggcaccaccgagtcactgcgacttgcagcccggcatgaatcacctggcttccctgaacctgtcagaaaacggtgctaaatcaacccatctgttaggcttttgggggctgaatgagtccgaggtgaccgtgcctgaacgcagagtactgcggaagtggaaagaacttctttag

SEQ ID NO: 111935 - DNA, 1323 bp, Artificial Sequence
  derived and/or modified sequence
atgacttattggcgtctagaaaacatcgctaagaccgaaccacccaagatttttagggtgaagcctgtgctcggaattaagcggatgatccaaatcgaatggattaagcccgaactcgcacccgtgtccagtgacctcaagtacaccctacgctttcgaaccgtaaactcgaccagctggatggaggtcaacttcgcaaagaacagaaaggacaaaaaccagacatataatctcactggactgcagcctttcaccgaatatgtgattgcattgagatgtgcagtgaaagagagtaaattctggagtgattggtcccaagagaagatgggcatgactgaggaagaggcaccttgtggcctggagctttggcgggtactcaaaccagccgaggctgatgggcgaagaccagtacggctgctttggaaaaaggcaaggggtgctcctgtgctggaaaagacactgggatacaacatatggtactaccctgagtcaaacacgaatctgactgaaacgatgaacaccaccaaccagcaactggaactgcacttaggtggcgaatcgttttgggtgagcatgatcagctacaattcattaggcaagagtcctgtcgccactttgaggattcccgcaatccaagaaaagtccttccagtgtatcgaagtaatgcaggcatgcgtcgccgaggatcagctggtagtgaagtggcagtcctctgccttggacgttaatacatggatgattgaatggttcccagacgtcgactccgagcctaccaccctgagctgggagtccgtctcccaggctaccaattggaccattcagcaggataagcttaaaccattctggtgttataacatctcagtgtaccctatgttacatgacaaggtcggtgaaccttacagtatacaggcttatgcaaaagagggggtccccagtgagggccctgaaaccaaagtcgagaacatcggagtgaagactgtcacgattacgtggaaagaaattccaaaaagcgaacgaaagggaattatctgcaattacactatcttctatcaggccgaagggggtaagggcttttgcaagcacgcccatagcgaggtggagaagaatccgaagcctcagatcgacgccatggacaggcccgtggtcggaatggcacccccttcacattgtgatctgcagccaggaatgaaccacctggcaagcctgaatctgtcagagaacggtgctaagtccacacacctgcttggattctggggcctcaatgagagcgaagtgaccgtccccgagcgccgagtcctgagaaagtggaaggaactgctgtag

SEQ ID NO: 111936 - DNA, 1323 bp, Artificial Sequence
  derived and/or modified sequence
atgacctactggagactggagaacatcgccaagaccgagccccccaagatcttcagagtgaagcccgtgctgggcatcaagagaatgatccagatcgagtggatcaagcccgagctggcccccgtgagcagcgacctgaagtacaccctgagattcagaaccgtgaacagcaccagctggatggaggtgaacttcgccaagaacagaaaggacaagaaccagacctacaacctgaccggcctgcagcccttcaccgagtacgtgatcgccctgagatgcgccgtgaaggagagcaagttctggagcgactggagccaggagaagatgggcatgaccgaggaggaggccccctgcggcctggagctgtggagagtgctgaagcccgccgaggccgacggcagaagacccgtgagactgctgtggaagaaggccagaggcgcccccgtgctggagaagaccctgggctacaacatctggtactaccccgagagcaacaccaacctgaccgagaccatgaacaccaccaaccagcagctggagctgcacctgggcggcgagagcttctgggtgagcatgatcagctacaacagcctgggcaagagccccgtggccaccctgagaatccccgccatccaggagaagagcttccagtgcatcgaggtgatgcaggcctgcgtggccgaggaccagctggtggtgaagtggcagagcagcgccctggacgtgaacacctggatgatcgagtggttccccgacgtggacagcgagcccaccaccctgagctgggagagcgtgagccaggccaccaactggaccatccagcaggacaagctgaagcccttctggtgctacaacatcagcgtgtaccccatgctgcacgacaaggtgggcgagccctacagcatccaggcctacgccaaggagggcgtgcccagcgagggccccgagaccaaggtggagaacatcggcgtgaagaccgtgaccatcacctggaaggagatccccaagagcgagagaaagggcatcatctgcaactacaccatcttctaccaggccgagggcggcaagggcttctgcaagcacgcccacagcgaggtggagaagaaccccaagccccagatcgacgccatggacagacccgtggtgggcatggccccccccagccactgcgacctgcagcccggcatgaaccacctggccagcctgaacctgagcgagaacggcgccaagagcacccacctgctgggcttctggggcctgaacgagagcgaggtgaccgtgcccgagagaagagtgctgagaaagtggaaggagctgctgtag

SEQ ID NO: 111937 - protein, 315 aa, Artificial Sequence
  derived and/or modified sequence
MERRARSSSRESRGRGGRTPHKENKRAKAERSGGGRGRQEAGPEPSGSGRAGTPGEPRAPAATVVDVDEVRGSGEEGTEVVALLESERPEEGTKSSGLGACEWLLVLISLLFIIMTFPFSIWFCVKVVQEYERVIIFRLGHLLPGRAKGPGLFFFLPCLDTYHKVDLRLQTLEIPFHEVALDSVTCIWGIKVERIEIKDVRLPAGLQHSLAVEAEAQRQAKVRMIAAEAEKAASESLRMAAEILSGTPAAVQLRYLHTLQSLSTEKPSTVVLPLPFDLLNCLSSPSNRTQGSLPFPSPSKPVEPLNPKKKDSPML

SEQ ID NO: 111938 - DNA, 948 bp, Artificial Sequence
  derived and/or modified sequence
atggagcgccgggcccggtctagtagcagggagagtcgcgggagaggcggtcgcacacctcataaagagaacaaacgcgcaaaggccgagcggagtgggggaggcagaggacgccaggaggctggccctgaacctagtggcagcgggagggctggcacacccggagagcctcgggcccccgcggccaccgttgttgatgttgacgaagttcgagggtccggcgaagagggtaccgaagttgtagctttgttggagtctgaacgcccagaagaggggacaaaatcaagtggcctaggcgcatgcgagtggctcctcgttctgatcagtctgttgttcattatcatgaccttccccttcagtatctggttttgcgtgaaggtggtgcaagaatacgagcgagtgattatttttagactgggacatctgcttcctggaagggcaaagggtccaggcctcttcttcttcctgccatgcttagacacataccataaagtggatctcaggctgcagaccctggagattccattccatgaggtggcactggattccgtgacttgcatctgggggattaaagtggagagaatcgagatcaaggatgttcgtctccctgccggacttcagcacagcttggcagtggaagccgaggctcagcgccaggccaaagttcgtatgatcgctgctgaggccgagaaggctgccagcgagtccctgcgtatggcagccgagatcctgtccggcactccagctgctgtgcagctgcggtacctccatacattgcaatcgttgtctacagagaagcctagcactgttgtgctccccttacctttcgatctcctaaactgtctcagctcacccagcaaccgaacccaaggtagcctgcctttcccttcccctagtaagcccgtggaaccactgaaccccaaaaaaaaggacagcccaatgctgtag

SEQ ID NO: 111939 - DNA, 948 bp, Artificial Sequence
  derived and/or modified sequence
atggagcggcgggcccggagcagcagccgggagagccggggccggggcggccgcaccccccacaaggagaacaagagggccaaggccgagaggtctgggggcggccggggccggcaggaggccggccctgagcccagcggcagcggccgggccggcaccccaggagagccccgggccccagctgccaccgtggtggatgtggatgaggtgcggggcagcggggaggagggcacagaggtggtggccctgctggagagcgagaggcctgaggagggcaccaagagcagcggcctgggcgcctgtgagtggctgctggtgctgatcagcctgctcttcatcatcatgaccttccccttcagcatctggttctgtgtgaaggtggtgcaggagtatgaaagagtcatcatcttccggctgggccacctgctgcccggccgggccaagggccctggcctcttcttcttcctgccctgcctggacacctaccacaaggtggacctgcggctgcagaccctggagatccccttccacgaggtggccctggacagcgtgacctgcatctggggcatcaaggtggagagaattgagatcaaggatgtgcggctgcctgctggcctgcagcacagcctggccgtggaggccgaggcccagaggcaggccaaggtgaggatgattgctgctgaggccgagaaggccgccagcgagagcctgaggatggctgctgagatcctgagcggcaccccagctgctgtgcagctgcgctacctgcacaccctgcagagcctgagcacagagaagcccagcacagtggtgctgcccctgccctttgacctgctgaactgcctgagcagccccagcaacagaacccagggcagcctgcccttccccagccccagcaagcctgtggagcccctgaaccccaagaagaaggacagccccatgctgtag

SEQ ID NO: 111940 - DNA, 948 bp, Artificial Sequence
  derived and/or modified sequence
atggagcggcgggcccggagcagcagccgggagagccggggccggggcgggagaactcctcacaaggagaataaacgagcaaaggcagaaaggtctggagggggacgcggccggcaggaggccggacccgagccttctggatctggcagagcagggactcccggtgaacctcgtgcgccagccgcaaccgttgtggacgtggatgaggtgcgcggatccggcgaggagggtaccgaggttgtcgcactcctggagagcgaacgccccgaggaaggaaccaaaagcagtgggttgggagcttgcgagtggcttctcgtgctgatcagcctgctcttcattatcatgacttttcctttttcaatctggttttgcgtgaaagtagtccaagagtatgaacgcgtcatcatcttccgcctgggacacctgttgcctggaagagccaagggccctgggttgttcttttttctcccctgtctcgacacgtaccataaagtggacctacggctccagacattagagattccatttcacgaggtagcacttgactccgtgacctgcatttgggggatcaaagttgagaggatcgaaatcaaggacgtgagactgcctgccggcttgcagcattcactcgccgtggaggcggaggcccagcggcaggctaaagtgcgcatgattgcagccgaggccgagaaggctgcaagtgagtccctgcgcatggccgccgaaatcctctcgggaacgcccgcagcagtccagctgcgctacctacataccctgcagtctctcagtaccgaaaagccaagcaccgtcgtactgcctctgccattcgacctcttgaactgcctgagctcaccatccaaccgtacacagggcagtctgcctttcccaagccctagtaaaccagtagagccattgaaccccaagaaaaaggatagtcctatgttgtag

SEQ ID NO: 111941 - DNA, 1670 bp, Artificial Sequence
  derived and/or modified sequence
cgcggacccgcagcgactccacagggactgcgctcccgtgcccctagcgctcccgcgctgctgctccagccgcccggcagctctgaggatggagaggagggcgcggagctcctccagggagtcccgcgggcgaggcggcaggactccgcacaaggagaacaagagggcaaaggccgagaggagcggcggaggccgcgggcgccaggaggctgggcccgagccgtcgggctccggacgggcggggaccccgggggagccccgagcgcccgccgccacggtggtggacgtggatgaggtccgaggctccggcgaggagggcaccgaggtggtggcgctgttggagagcgagcggcccgaggaaggtaccaaatcctccggcttaggggcctgtgagtggcttcttgtcctcatttccctgctcttcatcatcatgaccttccctttttccatctggttctgcgtaaaggttgtacaagagtatgaaagagtaattatattccgactgggacatctgcttcctggaagagccaaaggccctggtcttttcttttttttgccctgcctggatacctaccacaaggttgaccttcgtctccaaactctggagataccttttcatgaggttgccttggattcagtgacctgtatttggggaatcaaagtggagagaatagaaattaaagatgtgaggttgccagctgggcttcagcactcactggctgtggaggctgaagcgcaaagacaagccaaagtgcggatgattgctgcagaagcggaaaaggctgcttctgagtccctgaggatggcagctgagattctgtcaggcacccctgctgccgttcagcttcgatacctccacacccttcagtctctgtccacagagaagccttccactgtggttttacctttgccatttgacctactgaattgcctgtcttctcccagcaacagaactcagggaagcctccccttcccaagtccttccaaacctgttgagccactaaatcctaaaaagaaagactctcccatgttataggaaggatggggcataatgtgactgtaaaggggcctgccatagaaaagtcacatgcctgagggagacactctgtcctcattccctgcccttcctttggttgccatatggaatggccatggaatgcacgaagtcacaatgcaccatccatgagaagacggtgaaatgatgtaatgacagagaaggcagacaacatgtttccgtgactcatctagtcagagcaattatgggaaacagctttggtcaacattctactttggaaagaattttgagtctagatgtggttaaattttgacttctgggaacttggttcagatgtccctttcactgtatgtcctctgacccctttggcaaggttgccacagctcccacagcccttcctacaagcacctatcattgggcttgtcacactctattgctcttctgtcccaaagatgcagtcttctctccaatgatactaccaagtcttagttttcctcaaccacactcaatctttttgctccaccctgaattcctcacacctaaccctgatagttacctaaagtgacacttaaatgtttcagagtgaatgcaaaaaagagagatgtacttggagtcggatatacaatttatccctaattaaagcatttaaaaggaa

SEQ ID NO: 111942 - DNA, 948 bp, Artificial Sequence
  derived and/or modified sequence
atggagcgacgagcaaggagcagctccagagagagtcggggtcgcggagggaggacgccacacaaggaaaataagagagcgaaagctgagagatctggtgggggtagaggcagacaggaagccggaccagagccgagcgggtcaggccgagccggaactcccggtgagcctcgggctcctgcggctaccgttgtcgatgtggacgaggtccggggaagtggtgaagagggcaccgaggtcgttgccctgttagagtctgagagacccgaggagggcactaaaagctctggattgggcgcatgcgagtggctgctcgttcttatctcgttgctgtttatcataatgacatttccattttctatctggttttgtgtgaaagtggtccaggaatacgagcgagttatcattttccgcctcggccacctactgccagggcgagccaaagggccaggcctgttcttctttctaccttgcttggacacctatcacaaagtcgatctacgacttcagaccctggaaattcccttccacgaggtggcccttgacagcgtcacttgcatttggggcatcaaagttgagagaatcgaaatcaaagacgtgcggctacccgcaggtctccaacatagcctcgcagttgaggctgaggcgcagagacaagccaaagttcgcatgatcgccgctgaagccgaaaaagccgcttccgaaagcctacgtatggccgcagaaattctttctgggacccctgccgctgtccagctcaggtatcttcatactttacagtcgctctccaccgagaagccgtccacagtcgtcttgcccctgccgtttgatctcctcaattgcctgagctctcctagcaatcggacccaaggatccctgccattccctagtccctctaagcccgtggagcccctgaaccccaaaaagaaggactcacctatgttgtag

SEQ ID NO: 111943 - DNA, 948 bp, Artificial Sequence
  derived and/or modified sequence
atggagagaagagccagaagcagcagcagagagagcagaggcagaggcggcagaaccccccacaaggagaacaagagagccaaggccgagagaagcggcggcggcagaggcagacaggaggccggccccgagcccagcggcagcggcagagccggcacccccggcgagcccagagcccccgccgccaccgtggtggacgtggacgaggtgagaggcagcggcgaggagggcaccgaggtggtggccctgctggagagcgagagacccgaggagggcaccaagagcagcggcctgggcgcctgcgagtggctgctggtgctgatcagcctgctgttcatcatcatgaccttccccttcagcatctggttctgcgtgaaggtggtgcaggagtacgagagagtgatcatcttcagactgggccacctgctgcccggcagagccaagggccccggcctgttcttcttcctgccctgcctggacacctaccacaaggtggacctgagactgcagaccctggagatccccttccacgaggtggccctggacagcgtgacctgcatctggggcatcaaggtggagagaatcgagatcaaggacgtgagactgcccgccggcctgcagcacagcctggccgtggaggccgaggcccagagacaggccaaggtgagaatgatcgccgccgaggccgagaaggccgccagcgagagcctgagaatggccgccgagatcctgagcggcacccccgccgccgtgcagctgagatacctgcacaccctgcagagcctgagcaccgagaagcccagcaccgtggtgctgcccctgcccttcgacctgctgaactgcctgagcagccccagcaacagaacccagggcagcctgcccttccccagccccagcaagcccgtggagcccctgaaccccaagaagaaggacagccccatgctgtag

SEQ ID NO: 111944 - protein, 151 aa, Artificial Sequence
  derived and/or modified sequence
MEDEGNKLCQAPPWPGQTSPVMAEYGTLLQDLTNNITLEDLEQLKSACKEDIPSEKSEEITTGSAWFSFLESHNKLDKDNLSYIEHIFEISRRPDLLTMVVDYRTRVLKISEEDELDTKLTRIPSAKKYKDIIRQPSEEEIIKLAPPPKKA

SEQ ID NO: 111945 - DNA, 456 bp, Artificial Sequence
  derived and/or modified sequence
atggaagatgagggcaacaaactttgccaagctcccccctggcccggacaaacgtctccagttatggctgagtacggtaccctgcttcaggatctcactaacaacatcactctcgaggacctggagcagttgaagtccgcttgtaaagaggacattcctagtgaaaaaagtgaagagatcaccacgggatcagcctggttcagtttccttgagtcacacaataagttggacaaggataacctgtcatatatcgaacacatctttgagatcagtcggcggcccgatctgctcaccatggtggtggactaccggaccagggttctaaaaattagcgaagaagatgagctcgacacaaagctcacacggatcccctccgccaagaagtacaaggatattattcgtcagcctagcgaagaggagattattaagctggccccaccacccaagaaggcttag

SEQ ID NO: 111946 - DNA, 456 bp, Artificial Sequence
  derived and/or modified sequence
atggaggatgagggcaacaagctgtgccaggccccaccctggccaggccagaccagccctgtgatggccgagtatggcaccctgctgcaggacctgaccaacaacatcaccctggaggacctggagcagctgaagagcgcctgcaaggaggacatccccagcgagaagtctgaggagatcaccaccggcagcgcctggttctccttcctggagagccacaacaagctggacaaggacaacctgagctacatcgagcacatctttgagatcagccggcggccagacctgctgaccatggtggtggactaccgcaccagggtgctgaagatcagtgaagaagatgagctggacaccaagctgacccgcatccccagcgccaagaagtacaaggacatcatccggcagcccagcgaggaggagatcatcaagctggcccccccacccaagaaggcctag

SEQ ID NO: 111947 - DNA, 456 bp, Artificial Sequence
  derived and/or modified sequence
atggaggacgagggcaacaagctgtgccaggcccccccctggcccggtcaaactagtccagtgatggcagaatacgggaccctgctgcaggacctgactaacaatatcaccctggaagacctggagcaactgaaatcagcatgtaaggaggatatcccgtcagagaagtccgaggagatcaccactgggagcgcctggttttctttcctcgaatcacataataaattggataaagataatctgtcctacatagaacatatcttcgagatctcacgccgcccagatttgcttaccatggtggttgactatagaacccgggtcctgaagatctctgaggaagatgagctggacacgaaactgacaagaattcccagtgctaagaaatacaaagatattatcaggcagcccagcgaggaggagatcatcaagctggcccctcctcctaagaaagcctag

SEQ ID NO: 111948 - DNA, 2471 bp, Artificial Sequence
  derived and/or modified sequence
catcaccggccagccgggtggagtgagcggcgctgggctcgggctccggctccgcgggcggaagaggcggcggcggcggcagaagcggcggcggcggcggcgggagccgaggaggaggttccggacgctgcttaggaaccggggactcaggagtgcccgcgccctgagcgctcagctccagaggcgtcatggctgagtacgggaccctcctgcaagacctgaccaacaacatcacccttgaagatctagaacagctcaagtcggcctgcaaggaagacatccccagcgaaaagagtgaggagatcactactggcagtgcctggtttagcttcctggagagccacaacaagctggacaaagacaacctctcctacattgagcacatctttgagatctcccgccgtcctgacctactcactatggtggttgactacagaacccgtgtgctgaagatctctgaggaggatgagctggacaccaagctaacccgtatccccagtgccaagaagtacaaagacattatccggcagccctctgaggaagagatcatcaaattggctcccccaccgaagaaggcctgagcaagggggaggaagaggaggaaggttggaccttcatcagaccactcccttcccccatcctccaggagagggggcaagggcaacccaccatctacccacttactaacctggtcctaacccccttactgtgcgcgtgtgtgtgcgtgtgcgcacgctctggctgtttgtctatatgtctagctcatctagttcctcttcttaaggggatgggggtcaggggctaggggagggggctgagtttccccactttaggaggaggtgggggctatttctatgcaaatagaaatcagcacattcctcctacttccctttcctccactccccccatatctttaaagtgtggaagcagaaaggacctgcattttcctacattgaggagctgacataggggtaaggtatgggagaggtaggtggatccagggaaaagcagtggggacggaaggcaaagagaccactcaacccccacctggaaggggcaaagaaaagccagagttccatgtttgtactcctgtgctggactgtttcctgagtaccagcaggtccctttttgtctctcatgggcctagcataggtatgagccagggatcctttcctggtccctaagatcaaaccccatggagcagccagcgttagatgcccccacccacctgtactctggagagactgtgctgggaacatgtaccactgagcctgagatggggatgagggcagagagaggggagccccctcttccactcagttgttcctactcagactgttgcactctaaacctagggaggttgaagaatgagacccttaggttttaacacgaatcctgacaccaccatctatagggtcccaacttggttattgtaggcaaccttccctctctccttggtgaagaacatcccaagccagaaagaagttaactacagtgttttcctttgcaccgatccccaccccaattcaatcccggaagggacttacttaggaaacccttctttactagatatcctggccccctgggcttgtgaacacctcctagccacatcactacagtacagtgagtgaccccagcctcctgcctaccccaagatgcccctccccaccctgaccgtgctaactgtgtgtacatatatattctacatatatgtatattaaaactgcactgccatgtctgcccttttttgtggtgtctagcattaacttattgtctaggccagagcgggggtgggaggggaatgccacagtgaagggagtggcagaatcaaattgctacatagtccaaacaaaaaagaaggctttttcaaaaaacattaaattcacatgcagtctcagagactatttagacaaagttcaagttaggagcttttaggatgtgggagtaaaactttaatgggaggggagggctggctgctggaagaaggaagaagccagactggttagacagtactcttaactcctagcccagcctagcgtgccctgcccctctggccactgctgcagacacctgccttaacacacacacctctaggactccacagttttgccttaaaggaccttcccaagtctccctttccctgtctggcttctcccttaagaagagagagatacttgtagaattgggtggggggaatgagcatgaactgtccttccatttgggatatgttacattagagtgagagagagaataaggagcctttcttatggaagaaatgggagaagagagacagggttcttttcagcagagtctagtagtttctctgtaaggcaaaataatctaaaaagactaacctgcccacccactccttatattgctgtgagattgcccctatcttgtgctcttctgtctgcagtgtgcacggccttgttctaacccggaataaaggtgattgattgtattgcaactaa

SEQ ID NO: 111949 - DNA, 2694 bp, Artificial Sequence
  derived and/or modified sequence
gcggcggcggcggcggcgggagccgaggaggaggttccggacgctgcttaggaaccggggactcaggagtgcccgcgccctgagcgctcagctccagaggcgggatgctcaccccttcctaattgcagctccgaatattcagatggggacagtgaagcacagatctcaggagtcctaagtattcatggctaccactaagttggatagaatggcctccgcccagactgcctggtgatccctgagcagctctctgcactgctccagaaatcaggaggatttttcagagcccagagagcagatttctccacgagccctaaggaaatctgaatctctggtgaggaaagtgacatggaggatgaaggaaacaagctctgccaagccccaccatggccaggccagaccagcccagtcatggctgagtacgggaccctcctgcaagacctgaccaacaacatcacccttgaagatctagaacagctcaagtcggcctgcaaggaagacatccccagcgaaaagagtgaggagatcactactggcagtgcctggtttagcttcctggagagccacaacaagctggacaaagacaacctctcctacattgagcacatctttgagatctcccgccgtcctgacctactcactatggtggttgactacagaacccgtgtgctgaagatctctgaggaggatgagctggacaccaagctaacccgtatccccagtgccaagaagtacaaagacattatccggcagccctctgaggaagagatcatcaaattggctcccccaccgaagaaggcctgagcaagggggaggaagaggaggaaggttggaccttcatcagaccactcccttcccccatcctccaggagagggggcaagggcaacccaccatctacccacttactaacctggtcctaacccccttactgtgcgcgtgtgtgtgcgtgtgcgcacgctctggctgtttgtctatatgtctagctcatctagttcctcttcttaaggggatgggggtcaggggctaggggagggggctgagtttccccactttaggaggaggtgggggctatttctatgcaaatagaaatcagcacattcctcctacttccctttcctccactccccccatatctttaaagtgtggaagcagaaaggacctgcattttcctacattgaggagctgacataggggtaaggtatgggagaggtaggtggatccagggaaaagcagtggggacggaaggcaaagagaccactcaacccccacctggaaggggcaaagaaaagccagagttccatgtttgtactcctgtgctggactgtttcctgagtaccagcaggtccctttttgtctctcatgggcctagcataggtatgagccagggatcctttcctggtccctaagatcaaaccccatggagcagccagcgttagatgcccccacccacctgtactctggagagactgtgctgggaacatgtaccactgagcctgagatggggatgagggcagagagaggggagccccctcttccactcagttgttcctactcagactgttgcactctaaacctagggaggttgaagaatgagacccttaggttttaacacgaatcctgacaccaccatctatagggtcccaacttggttattgtaggcaaccttccctctctccttggtgaagaacatcccaagccagaaagaagttaactacagtgttttcctttgcaccgatccccaccccaattcaatcccggaagggacttacttaggaaacccttctttactagatatcctggccccctgggcttgtgaacacctcctagccacatcactacagtacagtgagtgaccccagcctcctgcctaccccaagatgcccctccccaccctgaccgtgctaactgtgtgtacatatatattctacatatatgtatattaaaactgcactgccatgtctgcccttttttgtggtgtctagcattaacttattgtctaggccagagcgggggtgggaggggaatgccacagtgaagggagtggcagaatcaaattgctacatagtccaaacaaaaaagaaggctttttcaaaaaacattaaattcacatgcagtctcagagactatttagacaaagttcaagttaggagcttttaggatgtgggagtaaaactttaatgggaggggagggctggctgctggaagaaggaagaagccagactggttagacagtactcttaactcctagcccagcctagcgtgccctgcccctctggccactgctgcagacacctgccttaacacacacacctctaggactccacagttttgccttaaaggaccttcccaagtctccctttccctgtctggcttctcccttaagaagagagagatacttgtagaattgggtggggggaatgagcatgaactgtccttccatttgggatatgttacattagagtgagagagagaataaggagcctttcttatggaagaaatgggagaagagagacagggttcttttcagcagagtctagtagtttctctgtaaggcaaaataatctaaaaagactaacctgcccacccactccttatattgctgtgagattgcccctatcttgtgctcttctgtctgcagtgtgcacggccttgttctaacccggaataaaggtgattgattgtattgcaactaa

SEQ ID NO: 111950 - DNA, 456 bp, Artificial Sequence
  derived and/or modified sequence
atggaggacgaggggaacaagctttgtcaggccccaccgtggcccggacaaaccagtcccgtcatggcagagtacggtaccttgctgcaggatttaacgaataatattaccttagaagaccttgagcagctgaagtctgcctgtaaagaggacatcccttcagagaaaagtgaagaaatcacgaccggatcagcatggttcagctttcttgagtcgcacaataagctggacaaggacaatctttcctacattgagcacatctttgagattagccgcaggccagacctgctgaccatggtggtcgactaccggacgagggttctaaaaatttcagaagaagatgagctcgatactaaactgacacgtattcccagcgccaagaagtacaaggatatcatccgtcagccgtctgaggaggagatcattaaactcgccccaccgccaaaaaaggcctag

SEQ ID NO: 111951 - DNA, 456 bp, Artificial Sequence
  derived and/or modified sequence
atggaggacgagggcaacaagctgtgccaggcccccccctggcccggccagaccagccccgtgatggccgagtacggcaccctgctgcaggacctgaccaacaacatcaccctggaggacctggagcagctgaagagcgcctgcaaggaggacatccccagcgagaagagcgaggagatcaccaccggcagcgcctggttcagcttcctggagagccacaacaagctggacaaggacaacctgagctacatcgagcacatcttcgagatcagcagaagacccgacctgctgaccatggtggtggactacagaaccagagtgctgaagatcagcgaggaggacgagctggacaccaagctgaccagaatccccagcgccaagaagtacaaggacatcatcagacagcccagcgaggaggagatcatcaagctggcccccccccccaagaaggcctag

SEQ ID NO: 111952 - protein, 130 aa, Artificial Sequence
  derived and/or modified sequence
MAEYGTLLQDLTNNITLEDLEQLKSACKEDIPSEKSEEITTGSAWFSFLESHNKLDKDNLSYIEHIFEISRRPDLLTMVVDYRTRVLKISEEDELDTKLTRIPSAKKYKDIIRQPSEEEIIKLAPPPKKA

SEQ ID NO: 111953 - DNA, 393 bp, Artificial Sequence
  derived and/or modified sequence
atggccgagtatggcaccctgctgcaggacctgacaaataacattacgctcgaggatctcgaacagcttaagagcgcttgtaaagaggacattccatcagagaaaagtgaggaaatcacaaccggatccgcatggttttcttttctcgaaagccacaacaaactcgacaaagataatctgagctacattgagcacattttcgaaatttctcgtcgccctgatctgcttactatggtggtggattatcgaacccgtgtgctgaaaatatccgaggaagatgagcttgataccaaattgactcgcatcccatcagctaaaaaatataaagacatcataaggcagccttctgaggaagagatcatcaagctcgctcccccacctaaaaaagcctag

SEQ ID NO: 111954 - DNA, 393 bp, Artificial Sequence
  derived and/or modified sequence
atggccgagtatggcaccctgctgcaggacctgaccaacaacatcaccctggaggacctggagcagctgaagagcgcctgcaaggaggacatccccagcgagaagtctgaggagatcaccactggaagtgcctggttctccttcctggagagccacaacaagctggacaaggacaacctgagctacatcgagcacatctttgagatcagcagaagaccagacctgctgaccatggtggtggactaccgcaccagggtgctgaagatcagcgaggaggatgagctggacaccaagctgacccgcatccccagcgccaagaagtacaaggacatcatccggcagcccagcgaggaggagatcatcaagctggcccccccacccaagaaggcctag

SEQ ID NO: 111955 - DNA, 393 bp, Artificial Sequence
  derived and/or modified sequence
atggccgagtacggcaccctgctgcaggacctgaccaacaacatcacacttgaggatctggagcagctcaaatccgcctgcaaagaggacataccctccgagaagtctgaagagattactactggttcagcatggttctccttcttggagagccacaacaagctcgataaggataacctttcttatatagagcacatctttgaaatctcacgaaggccagacttgttaacaatggtggtggattatcggacgcgcgtgcttaaaatatccgaggaggacgagctggacactaagcttacacggataccatctgcgaaaaaatataaggacattatccggcaaccatctgaagaggagattattaagctggccccacccccaaagaaggcttag

SEQ ID NO: 111956 - DNA, 393 bp, Artificial Sequence
  derived and/or modified sequence
atggctgagtacgggacgttgttgcaggacctgacgaataacattacactggaggatctcgagcagttaaagagcgcttgcaaggaggacatcccgagcgaaaagtcagaagaaataactaccggatcagcttggttttccttcctcgagtcccacaataagttagataaggacaatctatcctacattgaacatattttcgaaatctcccggcgtcctgatctgcttacaatggtggtggactacaggactcgcgtgctcaaaatctctgaggaggacgaactcgacacaaaactgacccgcatccccagcgccaagaagtataaagacataattaggcagccctctgaagaggagatcattaagcttgcaccacctcccaaaaaagcgtag

SEQ ID NO: 111957 - DNA, 393 bp, Artificial Sequence
  derived and/or modified sequence
atggccgagtacggcaccctgctgcaggacctgaccaacaacatcaccctggaggacctggagcagctgaagagcgcctgcaaggaggacatccccagcgagaagagcgaggagatcaccaccggcagcgcctggttcagcttcctggagagccacaacaagctggacaaggacaacctgagctacatcgagcacatcttcgagatcagcagaagacccgacctgctgaccatggtggtggactacagaaccagagtgctgaagatcagcgaggaggacgagctggacaccaagctgaccagaatccccagcgccaagaagtacaaggacatcatcagacagcccagcgaggaggagatcatcaagctggcccccccccccaagaaggcctag

SEQ ID NO: 111958 - protein, 108 aa, Artificial Sequence
  derived and/or modified sequence
MAEYGTLLQDLTNNITLEDLEQLKSACKEDIPSEKNNLSYIEHIFEISRRPDLLTMVVDYRTRVLKISEEDELDTKLTRIPSAKKYKDIIRQPSEEEIIKLAPPPKKA

SEQ ID NO: 111959 - DNA, 327 bp, Artificial Sequence
  derived and/or modified sequence
atggcggagtacggtactctgttgcaagacctgactaataacatcacactggaggaccttgaacagctaaagagtgcatgcaaagaagacatcccatccgaaaagaataacttgtcatatatcgagcacatatttgaaatatcccgccggccagatcttttgactatggtggtggattataggacaagagtgctcaaaatctctgaggaggatgagctcgataccaagctgaccagaatccctagcgcaaaaaagtacaaagacattatcagacaacccagtgaggaggaaatcataaaattggcaccacctccaaagaaagcctag

SEQ ID NO: 111960 - DNA, 327 bp, Artificial Sequence
  derived and/or modified sequence
atggccgagtatggcaccctgctgcaggacctgaccaacaacatcaccctggaggacctggagcagctgaagagcgcctgcaaggaggacatccccagcgagaagaacaacctgagctacatcgagcacatctttgagatcagcagaagaccagacctgctgaccatggtggtggactaccgcaccagggtgctgaagatcagcgaggaggatgagctggacaccaagctgacccgcatccccagcgccaagaagtacaaggacatcatccggcagcccagcgaggaggagatcatcaagctggcccccccacccaagaaggcctag

SEQ ID NO: 111961 - DNA, 327 bp, Artificial Sequence
  derived and/or modified sequence
atggccgagtacggcaccctgctgcaggacctgaccaacaacatcacactggaagatctggagcaacttaagtccgcctgtaaggaagacatcccctccgagaagaataatttaagttatatcgagcatatctttgaaatttccaggaggccggatttgcttactatggtggtcgactacaggaccagggtgctcaagatctctgaagaggacgaattagacacgaagctcaccagaatcccttcagcgaagaagtataaggatatcatccggcagccctccgaggaagaaatcatcaagttggcgccgccccctaagaaggcatag

SEQ ID NO: 111962 - DNA, 1021 bp, Artificial Sequence
  derived and/or modified sequence
ctccggctccgcgggcggaagaggcggcggcggcggcagaagcggcggcggcggcggcgggagccgaggaggaggttccggacgctgcttaggaaccggggactcaggagtgcccgcgccctgagcgctcagctccagaggcgtcatggctgagtacgggaccctcctgcaagacctgaccaacaacatcacccttgaagatctagaacagctcaagtcggcctgcaaggaagacatccccagcgaaaagaacaacctctcctacattgagcacatctttgagatctcccgccgtcctgacctactcactatggtggttgactacagaacccgtgtgctgaagatctctgaggaggatgagctggacaccaagctaacccgtatccccagtgccaagaagtacaaagacattatccggcagccctctgaggaagagatcatcaaattggctcccccaccgaagaaggcctgagcaagggggaggaagaggaggaaggttggaccttcatcagaccactcccttcccccatcctccaggagagggggcaagggcaacccaccatctacccacttactaacctggtcctaacccccttactgtgcgcgtgtgtgtgcgtgtgcgcacgctctggctgtttgtctatatgtctagctcatctagttcctcttcttaaggggatgggggtcaggggctaggggagggggctgagtttccccactttaggaggaggtgggggctatttctatgcaaatagaaatcagcacattcctcctacttccctttcctccactccccccatatctttaaagtgtggaagcagaaaggacctgcattttcctacattgaggagctgacataggggtaaggtatgggagaggtaggtggatccagggaaaagcagtggggacggaaggcaaagagaccactcaacccccacctggaaggggcaaagaaaagccagagttccatgtttgtactcctgtgctggactgtttcctgagtaccagcaggtcccttttt

SEQ ID NO: 111963 - DNA, 327 bp, Artificial Sequence
  derived and/or modified sequence
atggccgagtacggcacgctgttacaggatctcaccaataacatcactttggaagacctggaacaacttaaatcagcctgtaaggaagacatcccttctgagaagaacaatctttcctatatcgagcatattttcgagatctctaggagacccgacctgcttacaatggtcgtggactatcggaccagagttcttaaaatcagtgaggaggacgagttggataccaagctcaccaggattccatccgccaagaaatataaagatataatccggcaaccttctgaggaagagattatcaagttggcaccaccgcctaagaaagcctag

SEQ ID NO: 111964 - DNA, 327 bp, Artificial Sequence
  derived and/or modified sequence
atggccgagtacggcaccctgctgcaggacctgaccaacaacatcaccctggaggacctggagcagctgaagagcgcctgcaaggaggacatccccagcgagaagaacaacctgagctacatcgagcacatcttcgagatcagcagaagacccgacctgctgaccatggtggtggactacagaaccagagtgctgaagatcagcgaggaggacgagctggacaccaagctgaccagaatccccagcgccaagaagtacaaggacatcatcagacagcccagcgaggaggagatcatcaagctggcccccccccccaagaaggcctag

SEQ ID NO: 111965 - protein, 1130 aa, Artificial Sequence
  derived and/or modified sequence
MAHAGGGSGGSGAGGPAGRGLSGARWGRSGSAGHEKLPVHVEDALTYLDQVKIRFGSDPATYNGFLEIMKEFKSQSIDTPGVIRRVSQLFHEHPDLIVGFNAFLPLGYRIDIPKNGKLNIQSPLTSQENSHNHGDGAEDFKQQVPYKEDKPQVPLESDSVEFNNAISYVNKIKTRFLDHPEIYRSFLEILHTYQKEQLNTRGRPFRGMSEEEVFTEVANLFRGQEDLLSEFGQFLPEAKRSLFTGNGPCEMHSVQKNEHDKTPEHSRKRSRPSLLRPVSAPAKKKMKLRGTKDLSIAAVGKYGTLQEFSFFDKVRRVLKSQEVYENFLRCIALFNQELVSGSELLQLVSPFLGKFPELFAQFKSFLGVKELSFAPPMSDRSGDGISREIDYASCKRIGSSYRALPKTYQQPKCSGRTAICKEVLNDTWVSFPSWSEDSTFVSSKKTPYEEQLHRCEDERFELDVVLETNLATIRVLESVQKKLSRMAPEDQEKFRLDDSLGGTSEVIQRRAIYRIYGDKAPEIIESLKKNPVTAVPVVLKRLKAKEEEWREAQQGFNKIWREQYEKAYLKSLDHQAVNFKQNDTKALRSKSLLNEIESVYDEHQEQHSEGRSAPSSEPHLIFVYEDRQILEDAAALISYYVKRQPAIQKEDQGTIHQLLHQFVPSLFFSQQLDLGASEESADEDRDSPQGQTTDPSERKKPAPGPHSSPPEEKGAFGDAPATEQPPLPPPAPHKPLDDVYSLFFANNNWYFFLRLHQTLCSRLLKIYRQAQKQLLEYRTEKEREKLLCEGRREKGSDPAMELRLKQPSEVELEEYYPAFLDMVRSLLEGSIDPTQYEDTLREMFTIHAYVGFTMDKLVQNIARQLHHLVSDDVCLKVVELYLNEKKRGAAGGNLSSRCVRAARETSYQWKAERCMADENCFKVMFLQRKGQVIMTIELLDTEEAQTEDPVEVQHLARYVEQYVGTEGASSSPTEGFLLKPVFLQRNLKKFRRRWQSEQARALRGEARSSWKRLVGVESACDVDCRFKLSTHKMVFIVNSEDYMYRRGTLCRAKQVQPLVLLRHHQHFEEWHSRWLEDNVTVEAASLVQDWLMGEEDEDMVPCKTLCETVHVHGLPVTRYRVQYSRRPASP

SEQ ID NO: 111966 - DNA, 5037 bp, Artificial Sequence
  derived and/or modified sequence
ggcgcagctccgacttcggacatggcgcacgctggcggtggcagcggtggcagcggtgccggcggccccgcgggccgggggctgagcggcgcccgctggggtcgctcgggctccgcaggccacgagaagctgccggtgcacgtagaagacgccctcacctatctggaccaggtgaagatccgctttggcagcgaccctgccacctacaacggcttcctggagatcatgaaggagttcaaaagccagagcatcgatactcctggagtcatcagacgtgtctcgcagctcttccacgagcaccctgacctcattgttggattcaacgcttttcttcccctcggatatagaatagacattcccaagaatggcaagttaaacatacagtcgcctctgacaagccaggagaattcgcacaaccacggggacggtgcagaggacttcaagcagcaggtgccgtataaagaggacaaaccccaggtgcccctggagtccgattccgtggaattcaacaacgccatcagctatgtgaataagattaaaacccgcttcctagaccacccagaaatctacaggtcattcctggagatcctgcacacgtaccagaaggagcagctgaacacgaggggccggccattccgaggcatgtctgaagaggaggtgttcaccgaggtggccaacctcttccggggccaggaggacctgctctcagagtttggacagttcctgcccgaagccaagcggtctctgttcacaggaaacgggccgtgcgagatgcacagcgtgcagaagaacgagcacgacaagaccccggagcacagcaggaagcgctcccggccctcgctcctccgccccgtgtctgcacccgccaagaaaaaaatgaaacttcgtggtaccaaagacctgtccatcgctgcagtggggaagtacgggactctgcaggaattttctttctttgacaaggtccgccgggtgctgaagagccaggaggtgtatgaaaacttcctccgctgcatcgcactcttcaaccaggagctggtgtctggctctgagctcctgcagctcgtcagcccatttctggggaaatttccagaactctttgcacagttcaagtccttcctgggggtaaaagagctgtccttcgcgccacccatgagcgacagatccggggacgggataagccgggaaattgattatgcatcctgcaagcgcataggatccagctaccgggcactccccaaaacctaccagcagcccaagtgcagtgggaggacagccatctgcaaggaggtactgaacgacacctgggtctccttcccttcctggtctgaggactccacgttcgtcagctccaagaagacaccgtacgaggagcagcttcaccgctgtgaggacgagcgcttcgagttagacgttgtcctggagacgaacctggccacaatccgtgtgttggaaagtgtgcagaagaagctgtctcggatggcgccggaagaccaggagaagttccggctggacgactccctgggaggcacgtcggaggtgatccagcgccgtgccatttatcgcatctatggcgacaaggccccggagatcatcgagagcctcaagaagaaccctgtcaccgctgtccccgttgtcctgaaaagactgaaggccaaggaagaggagtggcgggaggcccagcagggcttcaacaagatctggcgggagcagtatgagaaggcgtacctcaagtcccttgaccaccaggctgtgaacttcaagcagaacgacaccaaggccctgcgctccaagagcttgctcaacgagatcgagagcgtctacgacgagcaccaggagcagcactcggagggccgcagtgccccctctagcgagccgcacctcatctttgtgtacgaggaccggcagatcctggaggacgcagcagcgctcatcagctactacgtgaagcggcagccggccatccagaaggaggaccagggcaccatccaccagctgctgcaccagttcgtgcccagcctcttcttctctcagcagctggacctgggcgcctccgaggagtcagctgatgaggaccgggacagcccccaggggcagaccacagaccccagtgagcggaagaagccggcgccaggaccccacagtagccccccagaggagaagggggccttcggggatgccccggccactgagcagccacccctgccgcccccagccccgcacaagcccctggacgatgtctacagcctattttttgccaacaacaactggtacttcttcctgcgcctgcaccagaccctgtgctccaggctgctgaagatctaccgccaggcgcagaagcagcttctggagtatcggaccgagaaggagcgggagaagctgctgtgtgagggccgcagggagaagggcagcgaccccgccatggagctgcggctgaagcagcccagtgaagtggagctggaggagtactacccggccttcctggacatggtgcggagcctgctggagggcagcatcgaccccacgcagtacgaggacaccctacgcgagatgttcaccatccatgcctacgtgggcttcaccatggacaagctggtgcagaacattgcgcggcagctgcaccacctcgtgagcgatgacgtctgcctgaaggtggtggagctctacctgaacgagaagaagcggggtgccgctggtgggaacctgtcctcccgctgcgtccgcgctgctagggagaccagctaccagtggaaggctgagcgctgcatggccgacgagaactgcttcaaggtgatgttcctgcagcgcaaagggcaggtgatcatgaccatcgagctcctggacaccgaggaggcccagacggaggaccctgtggaggtccagcacctggctcggtacgtggagcagtatgtggggaccgagggcgcgtccagctcgcccactgagggcttcctcctgaaacctgtgttcctgcagaggaacctcaagaagttccgccgccggtggcagagcgagcaggcgcgggccctgcgcggtgaggccaggagctcctggaagcggctggtgggcgtggagagcgcctgcgacgtggactgccgcttcaagctcagcactcacaagatggtgttcatcgtgaactccgaggactacatgtaccgtcgcgggaccctctgccgggccaagcaggtgcagcccctggtcctgctccgccaccaccagcactttgaggagtggcacagccgctggctggaggacaatgtgacggtggaggcggctagcctggtgcaggactggctgatgggtgaggaggacgaggacatggtaccctgcaagacgctgtgtgagacagtgcacgtgcacggcctgcccgtgacccgctaccgcgtgcagtacagccgccgcccggcctcgccctgacccgccctcatgggcaccgggcaggcgcctcacagagcacagacgtgccctcggccttggtcgtgtcggggccgttttcttgaacgacgtgagaggcatctcccagcccctctgctgccggacagcgcactccagggcaggacgccgcccccgtggctcccggtctcctgtgggcctgctgtgtgccaaacctgagctacctgcacccgagccctggggctcagccccaccacaggggcgggtggacgtgctggccgaggaacaagcaatcatgtttgcgtccccgtccgtcacatgtgccaaatccctggcaggcagatggctcctgccccatattcttgccgtgtcttggaaaagtcacaggtgacagccctcctgaggcccacactttggagggggtccatgtccaagagaccctgacaaggaaggagttgagccctgggtaggcttgcttgaaaagtgagtccttccagaatattctcagagctgccagaaacatcatctgagggtttgggcatcagctctgcctggctggtgttcaggccctcagtcactttggaagtgagaagaacccttcagccaaacctttgggatcccattttgaagtccagagctggagcaggcgggcagtgccctgggagaccccgctctggataagacacccaaccccaactccagcagctggactctgggcccacaaggggagggaccccagccagtattccctcagagccggcacgaccctgctgtggggcggcgggcccagtcgtgttcctgcagtgggcaccctaggcgtatgtgtatacacgcacagatatttattcctttcgcttttagtggttgttatttctgtagcagccaagtcctgcgactccctggggctgagatctccctttgtggaactccgagagccgccctgacagtcccagccgccacccaaggagccccatccgcccacccaccctgggacccacgcggccactccagggatcattgttgtccttttgtgaggggctgaggcgactgtcccatggaggcatccaaggctttctgtgccaagaatcccaagtgactggggctggggaccacttctccaggcctctctccccgaccatgagagcccctggccctggcccctgcacaccagtaggcccagaataaccgccacccttgccatcctgcaacagctggactcaagtttccaggaagtggagatgtgtttctagaagtttcctgtggaacctggaggctcctgatgcctttgactccaggctgggcgattccgatgctgacccgtcctcctgggctccccacccccgctccccaagtgtcacacaggcactttgtacacatcctggttttctaagaagggaacttgccatcaagattcctgtaccaggcccacggccgtctcgggcagagccacctgggccccgggtgcagccggagaccccgccgagcccctcctcccagtattcccatccccgcatgcttctagggagcgcctcttttccgttcttgaggaatttctgttctggggcttgtccttcctttgcagctgttttgaatgtagttttccttttctatttatttgcacattaaagttaataattgaatattgac

SEQ ID NO: 111967 - DNA, 3393 bp, Artificial Sequence
  derived and/or modified sequence
atggcgcacgccggtggtggatctggggggtccggggccggtggtcctgctgggcgcggcctgagcggtgctcggtggggacgctccgggtcggccggacatgagaagctgcccgtccatgtggaggacgcactcacttacctagaccaggtgaagatccggttcggatctgacccagctacttataacggatttctagaaatcatgaaggaattcaaatcacagagtatagatacgccaggcgtgatcagaagggtgtcccagttgttccacgaacatcccgaccttattgtgggattcaatgcgttcctgccactaggataccgaattgacatccccaagaatgggaaactgaatatccagtctccgctgaccagtcaggagaactcccataatcacggagacggtgcagaggacttcaagcagcaggtcccttataaggaggataagccacaagtacctcttgagtccgatagcgtcgaatttaataatgccatttcatatgttaacaagataaaaacccgatttcttgatcatcccgaaatctatcgaagttttcttgagattctgcatacgtatcagaaagagcagctaaataccagggggcgcccattccgagggatgagcgaagaggaggtgttcaccgaagttgcaaacctgtttcgtggccaggaagaccttttgtccgagttcgggcagtttctgccggaggctaaaagatctttgtttacaggcaacggcccttgtgaaatgcactccgtgcagaagaacgaacacgacaagacaccggaacattcccggaagagatcgaggccaagcttgctgagaccggtgagtgcgcctgcgaaaaaaaagatgaaactgcggggaacaaaggacttatcaatcgcggcggtcggcaaatacggcacactgcaggaattctcgttctttgacaaggttcgcagggtgttaaaatctcaggaggtctacgagaacttcttgaggtgcattgcgttattcaaccaagagctcgtgagcggatctgaactgctccaactggtttctccattccttggaaaattccctgagctgttcgcccagttcaagtccttcctgggagtgaaagagctgtcattcgcaccaccaatgagcgacaggagtggcgacggcatatcccgcgaaatcgattacgcgtcgtgtaagcgcataggcagctcctaccgggccctgcccaagacctatcagcagccaaagtgttccggacgtaccgcgatctgcaaagaagtgctgaatgacacttgggtgagcttccctagctggtctgaggattctacattcgtttcttctaaaaaaacaccatatgaagagcagctgcatcgctgtgaggatgagaggttcgagctcgacgtggtgcttgagaccaacctggccacgattagagtcttggagtccgttcagaaaaaactgagccggatggcccctgaagaccaagaaaaatttagactcgacgactccttgggtgggacgtccgaagtgatccagcgccgggccatatatcggatctatggtgacaaagcgccagagatcatcgaaagtctgaagaaaaatcctgtaaccgccgtgcccgtggtcctgaagagattgaaggcgaaggaggaggaatggagggaggcccagcaggggtttaacaagatctggcgcgaacagtacgaaaaggcctatttgaagtcacttgaccatcaggctgtgaactttaaacagaacgacaccaaggctctccgctcaaaatcgctcttgaacgaaattgaatcagtgtatgacgaacaccaggagcagcattctgaaggaagaagcgctcccagcagcgaacctcatttgatttttgtatatgaggacagacagatccttgaggacgcggccgcactgatcagctattatgtgaagcgacagcccgccatccagaaggaggatcaaggcaccattcaccagctcctccaccagtttgtgcccagtttgtttttcagccagcaactggatctgggtgcttcagaggagagcgcggacgaggacagagactctccacagggtcaaacgacagatccgtcagaaagaaaaaagcctgcccccggaccccactctagcccacctgaggaaaagggagctttcggcgacgctcccgcaacagagcagccccctttgccacccccagcgccgcacaaacctctcgacgatgtctactctctgttcttcgccaataataactggtatttctttctacggctgcaccaaaccctgtgtagccgcctgttaaaaatttaccgccaggcgcagaagcagctgctggagtacaggactgaaaaagaaagagaaaagctgttatgtgaagggcgaagagaaaaggggtcggaccctgctatggagttgcggctgaagcagccctccgaagtggaactggaggaatactatccagcattcctggacatggtcaggtctctacttgaagggtcaatagatcccacccaatatgaggacaccttaagagaaatgttcaccattcatgcctacgttggctttaccatggataaactcgttcaaaacattgccagacagttgcatcatctcgtctccgacgacgtgtgtttaaaggtagttgagctctatttaaatgagaaaaagcgaggtgctgccggagggaatctgagctccagatgcgtcagagctgcacgggaaacgtcctatcagtggaaggccgaaagatgtatggcagacgagaattgtttcaaagtgatgttccttcagcggaagggacaggtcattatgacaattgagctgctagacactgaagaagcgcaaacagaagatcccgtggaggtccagcacctagccaggtatgtagagcagtacgtcggcacagaaggggcttcctctagcccaaccgagggttttctgttaaagcctgtgttcttgcagcgaaacctaaagaaattccggcgcagatggcagtccgagcaagcccgtgccttgagaggcgaggcccggagcagctggaaacggcttgtgggcgtagaatcagcctgtgacgtcgattgtcggttcaagctttccactcataagatggtatttatcgtcaattcagaagattacatgtatcgtaggggcacgctgtgtagagccaagcaagtgcagcccctagtcttgctgcgacatcatcagcattttgaagaatggcattctcggtggttagaagataacgtgaccgtggaggctgcaagcctcgtgcaggattggctgatgggcgaagaagatgaagacatggtgccttgcaagacactgtgtgaaacagtgcacgtccacggtcttcctgtcacacgttaccgtgtgcagtactcccgtaggcctgcatccccttag

SEQ ID NO: 111968 - DNA, 3393 bp, Artificial Sequence
  derived and/or modified sequence
atggcccacgccggcggcggcagcggcggcagcggggccggcggccctgctggccggggcctgagcggggcccgctggggccgcagcggcagcgctggccacgagaagctgcctgtgcacgtggaggatgccctgacctacctggaccaggtgaagatccgctttggaagtgaccctgccacctacaacggcttcctggagatcatgaaggagttcaagagccagagcattgacaccccaggagtcatccggcgggtgtcccagctgttccacgagcacccagacctgattgtgggcttcaatgccttcctgcccctgggctacagaattgacatccccaagaatggcaagctgaacatccagagccccctgaccagccaggagaacagccacaaccacggagatggagctgaggacttcaagcagcaggtgccctacaaggaggacaagccccaggtgcccctggagagtgacagcgtggagttcaacaatgccatctcctatgtgaacaagatcaagacccgcttcctggaccaccctgagatctaccgctccttcctggagatcctgcacacctaccagaaggagcagctgaacacccggggccggcccttccggggcatgtctgaggaggaggtgttcacagaggtggccaacctcttccggggccaggaggacctgctgtctgaatttggccagttcctgcctgaggccaagaggagcctcttcaccggaaatggcccctgtgagatgcacagcgtgcagaagaatgaacatgacaagaccccagagcacagcaggaagaggagccggcccagcctgctgcggcctgtgtctgccccagccaagaagaagatgaagctgcggggcaccaaggacctgagcattgctgctgtgggcaagtatggcaccctgcaggagttctccttctttgacaaggtgagaagagtgctgaagagccaggaggtgtatgagaacttcctgcgctgcatcgccctcttcaaccaggagctggtgtctggcagcgagctgctgcagctggtgagccccttcctgggcaagtttcctgagctgtttgcccagttcaagagcttcctgggcgtgaaggagctgagctttgccccacccatgtctgacagaagtggagatggcatcagccgggagattgattatgccagctgcaagagaattggcagcagctaccgggccctgcccaagacctaccagcagcccaagtgcagcggccgcacagccatctgcaaggaggtgctgaatgacacctgggtgtccttccccagctggagcgaggacagcacctttgtgagcagcaagaagaccccctatgaggagcagctgcaccgctgtgaagatgaaagatttgagctggatgtggtgctggagaccaacctggccaccatccgggtgctggagagcgtgcagaagaagctgagcaggatggcccctgaggaccaggagaagttccggctggatgacagcctgggcggcaccagcgaggtgatccagaggcgggccatctaccgcatctacggggacaaggcccctgagatcatcgagagcctgaagaagaaccctgtgacagctgtgcctgtggtgctgaagaggctgaaggccaaggaggaggagtggagggaggcccagcagggcttcaacaagatctggagggagcagtatgagaaggcctacctgaagagcctggaccaccaggccgtgaacttcaagcagaatgacaccaaggccctgcggagcaagagcctgctgaatgaaattgagagcgtgtatgatgagcaccaggagcagcacagcgagggccgcagcgcccccagcagcgagccccacctgatctttgtgtatgaagatcggcagatcctggaggatgctgctgccctgatctcctactacgtgaagaggcagcctgccatccagaaggaggaccagggcaccatccaccagctgctgcaccagtttgtgcccagcctcttcttcagccagcagctggacctgggcgccagcgaggagagcgcagatgaagatcgggacagcccccagggccagaccacagaccccagcgagaggaagaagccagcccctggcccccacagcagccccccagaggagaagggggcctttggagatgccccagccacagagcagccccccctgcccccaccagccccccacaagcccctggatgatgtgtacagcctcttctttgccaacaacaactggtacttcttcctgcggctgcaccagaccctgtgcagccggctgctgaagatctaccggcaggcccagaagcagctgctggagtacagaacagagaaggagcgggagaagctgctgtgtgagggcagaagagagaagggcagtgaccctgccatggagctgcggctgaagcagcccagcgaggtggagctggaggagtactacccagccttcctggacatggtgcgcagcctgctggagggcagcattgaccccacccagtatgaggacaccctgcgggagatgttcaccatccacgcctacgtgggcttcaccatggacaagctggtgcagaacatcgcccggcagctgcaccacctggtgtctgatgatgtgtgcctgaaggtggtggagctgtacctgaatgagaagaagagaggagctgctgggggcaacctgagcagccgctgtgtgcgggccgcccgggagaccagctaccagtggaaggccgagcgctgcatggctgatgagaactgcttcaaggtgatgttcctgcagaggaagggccaggtgatcatgaccatcgagctgctggacacagaggaggcccagacagaagatcctgtggaggtgcagcacctggcccgctacgtggagcagtatgtgggcacagaaggagccagcagcagccccacagagggcttcctgctgaagcctgtgttcctgcagaggaacctgaagaagttcagaagacgctggcagagcgagcaggcccgggccctgcggggggaggcccggagctcctggaagaggctggtgggcgtggagagcgcctgtgatgtggactgccgcttcaagctgagcacccacaagatggtgttcatcgtgaacagcgaggactacatgtacagaagaggcaccctgtgccgggccaagcaggtgcagcccctggtgctgctgcggcaccaccagcactttgaggagtggcacagccgctggctggaggacaacgtgacagtggaggccgccagcctggtgcaggactggctgatgggagaagaagatgaggacatggtgccctgcaagaccctgtgtgagaccgtgcacgtgcacggcctgcctgtgacccgctacagagtgcagtacagcagaagacctgccagcccctag

SEQ ID NO: 111969 - DNA, 3393 bp, Artificial Sequence
  derived and/or modified sequence
atggcccacgccggcggcggcagcggcggcagcggcgccggcggccccgccggccgaggtctgtctggggcccgctggggacgctccggtagcgccggtcatgaaaagctgcccgtgcacgttgaagacgcgctcacatatctggatcaggtcaagattcggttcggcagcgaccccgcaacctataatgggtttttggagatcatgaaggagttcaagtcccagtcaatcgacactcctggagtgatccgacgggtatcccaattatttcatgagcatccagacttgattgtggggtttaatgcttttctgccactgggctacagaattgacattccaaaaaacggtaagctcaatattcagagtcctttaacttctcaagagaattcacacaatcatggcgacggagccgaagatttcaagcagcaagtcccatacaaagaagacaagccacaggtacctctcgagagcgatagcgtggagtttaataacgctatcagctatgtcaacaaaattaaaacacggttcctggatcatcccgagatttatagatcttttctggagatcctgcacacataccagaaagagcagctaaatactcggggacgcccctttaggggcatgtctgaagaggaggtgtttaccgaggtggccaatcttttcagaggtcaagaagacctgctgagcgagttcgggcaattcctgcctgaggccaagaggtccttgttcaccggtaatggaccatgcgaaatgcattcagtgcagaagaatgaacacgataaaacaccagagcatagtagaaaaagaagcagaccttctctccttagacccgtctcagcaccagcaaaaaaaaagatgaagctgcgaggcacaaaagatctgtccatcgccgccgttggtaagtacggaacacttcaggagttttctttctttgacaaagtacgcagagtcttgaagagccaggaggtgtacgagaatttccttagatgcattgcactttttaatcaagagctggtgtctggatccgaactgttacagcttgtatcgccgtttctgggcaaatttcccgaattgtttgcccagtttaaatccttcctcggcgtgaaggaactgtcgtttgctcctcctatgtctgaccggtctggcgacggtatctcccgcgaaatcgactacgccagttgtaaaaggatcggttcgagctatcgagcactaccgaagacctaccagcagccgaaatgttccggccgcactgccatttgcaaggaggtgctgaacgacacatgggtatcttttcccagttggagtgaggacagtacctttgtgtccagcaaaaagaccccatacgaagaacagctgcatcgatgtgaggacgagaggttcgagctcgacgtggtgcttgagactaacctggctactatccgtgtgctggagagtgtgcaaaaaaaactgagtaggatggctcccgaggatcaggagaagttccgactagacgactccctgggaggaactagtgaggtgatccagcggcgcgcaatttatagaatctacggagacaaagctccagaaatcattgagtcactcaagaagaatcccgtgacagccgtcccagtggttctcaagcgcctgaaggccaaggaggaagagtggcgggaagcgcaacaaggtttcaacaagatatggcgggagcagtacgaaaaagcctatctcaaatccctggatcatcaggcagtcaactttaagcagaacgatactaaggcattgcgctctaaatctctcctgaacgaaatcgagagtgtttacgatgaacatcaggaacagcactccgaaggacgttcggccccatccagcgaaccacatctgattttcgtgtacgaggacagacaaattctcgaggacgccgccgcactcatctcctattatgtcaagaggcagcccgcaattcaaaaggaagatcaaggcactatccaccagctattacatcagttcgtgcccagcctttttttctctcaacagctggatcttggggcgagcgaggagtctgcggacgaagatagagactcgcctcagggacagaccacggaccccagcgagcgtaaaaaaccagcacccggtccgcactcaagtccccccgaagagaaaggcgctttcggggacgcgccagccacagagcagcccccccttccacctccagctcctcacaagccacttgacgacgtgtattcactgttctttgccaataataattggtattttttcctgcgcttgcatcaaactctctgctctaggttactcaagatttaccggcaagctcagaagcagctcctggagtatcgtacagagaaagaacgggagaagctgctgtgtgaggggcgcagagagaagggctcggaccccgctatggagctacgactaaagcagccaagtgaggtggaacttgaggaatactatcctgcttttctggacatggtcaggtcactgctggagggttcaatcgaccctactcagtatgaggacaccctgcgcgaaatgtttacaattcatgcgtacgtgggttttaccatggataaactggttcagaatatagcccggcagttacatcacttggtgtcggacgacgtctgcttgaaggtcgtggaactctatctaaacgaaaagaaacggggagcagccggcggaaatctgtcttcacgctgcgtgcgggctgccagggagacctcttaccagtggaaggccgagagatgcatggcagacgaaaattgttttaaggtaatgttcctgcagcgaaaagggcaggtcattatgacaatagagctgctggacactgaggaggcccagaccgaggacccagttgaagtgcagcacttggcaaggtatgtcgagcagtacgtaggaaccgagggtgcttctagttcccctactgaggggtttttacttaagcccgtattccttcagagaaatctgaaaaaattcagaaggcggtggcagtcagaacaagcccgagctctccgaggcgaggcacgcagctcgtggaagaggctagtgggtgtagagtctgcatgcgatgttgactgcaggtttaagctgtccacccacaagatggttttcatcgtgaactcagaggattatatgtatcgtagagggacactctgtcgagctaagcaggtccagcctctggtgcttcttaggcatcatcagcactttgaggagtggcacagtcgttggctggaggacaatgtcaccgtagaggcagcgagtctggtgcaggactggcttatgggtgaggaggatgaagatatggttccatgcaaaactctctgtgagaccgtgcacgtccatggcctcccagtgacgcggtatagagtccagtattctcggagaccggcctccccatag

SEQ ID NO: 111970 - DNA, 3393 bp, Artificial Sequence
  derived and/or modified sequence
atggctcatgccggaggcggttccggtgggtccggagctggtggcccagctggtcgtggtttatcaggagctagatggggtcggagtgggagtgccggacacgagaagctgccagtgcacgtagaagacgccttgacttatctggaccaggtgaagatccgctttggctctgatccggcaacttacaatggtttcctggagatcatgaaggagttcaagtcacagtccatcgacacccctggggtcattaggcgtgtatcccaattattccatgagcaccctgatttaattgttggcttcaacgccttcttgcccttgggctacaggatagacatccccaaaaacggcaaactaaatatccagtctcccttaacttctcaggagaatagtcacaaccatggcgatggagctgaggatttcaagcagcaggtgccttacaaggaggacaagcctcaggttccactcgaaagtgactctgtggagttcaacaacgctatttcttacgttaataaaataaaaactcgattcctggaccaccccgagatttacagatctttcctagagattcttcatacttaccaaaaagaacagcttaacacaagaggaagaccattccggggaatgtcagaagaggaggtgttcaccgaagtcgctaacttgttcagaggacaggaagatctgctgagtgaatttggtcagtttcttccagaagccaaaaggtctctttttaccggaaacggaccctgtgagatgcactcagtccagaagaatgagcacgataagactccagagcacagcaggaaacggagccggccaagtctgctgcggccagtcagcgcccctgcgaagaagaagatgaagctgagggggacaaaggacttgtccattgccgcagtcgggaaatatggcactctgcaggagttcagttttttcgataaagtcagacgcgtgcttaagagccaggaggtgtacgaaaatttcctgaggtgtatcgctctcttcaatcaggagttggtgagcggaagcgaactcctccagcttgtgtcaccgttccttggaaagttccccgaactcttcgcccagtttaagagttttctgggcgtgaaagaactctcatttgcaccacctatgtcagaccgcagcggagacggaatttctcgagaaattgactatgctagttgcaaacgtatcggctcatcctacagggccctgccaaagacctaccagcagcctaaatgcagcggacggaccgccatctgcaaggaagtcttaaatgacacttgggttagcttcccatcttggtccgaggactctaccttcgtttcaagtaaaaaaacaccgtatgaggaacagttgcatcgctgtgaggacgagcgattcgagctagacgtggtgttagagactaacctcgctacaatccgcgttcttgagtccgtgcagaaaaaactgtcaagaatggctcccgaggaccaggagaagtttagactggacgactcccttggaggtacatcagaagtaattcagcgcagagccatttacagaatctacggcgacaaggctcccgaaatcatcgaatcactgaaaaaaaatcccgtgacagccgttccagtcgtgctcaaacgtctgaaagcaaaagaagaggagtggagagaagctcagcagggcttcaataaaatttggcgcgaacagtacgagaaagcttatctgaagagccttgatcaccaggcagttaactttaaacagaatgacaccaaagctcttagatcaaaatcactgctgaacgagatcgagagcgtgtatgacgagcatcaggagcaacatagtgaggggaggtctgcaccatcaagtgaaccacaccttatctttgtttacgaggaccggcaaatattggaggacgctgcagctctcattagctattatgtgaaacggcaacctgccattcaaaaagaagaccagggcacaatccaccagctcctgcaccaattcgttcccagcctgtttttctcgcaacagctggacctcggcgctagtgaggagagcgccgatgaagatcgcgatagtcctcaggggcaaacaacagatccatctgaaagaaagaaaccagcccctggaccacattccagtccaccagaggaaaaaggtgcctttggagatgcccctgccaccgaacagccgcctctgcctcctccagcacctcataaacctctggatgacgtctattccttattcttcgccaataacaattggtacttcttcctgagactgcaccagactctgtgctcacggctactcaagatctaccggcaggcccagaagcagctgctggagtacagaaccgagaaggagcgcgaaaagctgctgtgcgaggggcgacgggagaaaggcagtgaccccgctatggagctcaggctgaaacagcctagtgaagtggagttggaggaatattatcccgcatttctagatatggtccggagcctccttgaaggctccatcgaccccacacaatacgaggatactctgcgggagatgttcactatacacgcctatgtcgggtttaccatggacaagcttgttcagaatatagcacgtcagctgcaccacctcgtttctgatgatgtttgtctcaaggtggtagagctgtacctcaacgaaaaaaaacggggagccgctggcggtaacctctccagccgatgtgtgcgcgcagcccgagaaacttcctatcagtggaaagcggagcgatgtatggcagacgagaactgttttaaggtgatgtttctccagcgaaaaggtcaagtgatcatgacaattgaactgctcgatactgaagaagctcagaccgaagatcccgttgaggtccagcatttagcccgatacgttgaacaatacgtcggaacagaaggggcatcttcctcacctacggaaggctttctcctgaagccagtctttctgcaacggaatttaaaaaaattccgcaggagatggcagtcggagcaggccagggcgctgcggggagaagccagatcgtcttggaagagattggttggcgtggaaagcgcctgtgatgtcgactgccgcttcaagctgtccacacacaagatggtgtttatcgtaaattcagaagactatatgtacagaagaggaacgctctgccgcgctaagcaggtccagcctttggtgcttttgcgtcatcatcagcactttgaggagtggcactccaggtggctagaagataatgtcacggtagaagctgcttcactagttcaggactggctcatgggtgaggaggatgaagatatggttccatgtaaaactctgtgtgagactgtccatgtccacggcctcccggtgacgaggtaccgagtccaatactctcgaagaccagctagtccctag

SEQ ID NO: 111971 - DNA, 5033 bp, Artificial Sequence
  derived and/or modified sequence
ctccgacttcggacatggcgcacgctggcggtggcagcggtggcagcggtgccggcggccccgcgggccgggggctgagcggcgcccgctggggtcgctcgggctccgcaggccacgagaagctgccggtgcacgtagaagacgccctcacctatctggaccaggtgaagatccgctttggcagcgaccctgccacctacaacggcttcctggagatcatgaaggagttcaaaagccagagcatcgatactcctggagtcatcagacgtgtctcgcagctcttccacgagcaccctgacctcattgttggattcaacgcttttcttcccctcggatatagaatagacattcccaagaatggcaagttaaacatacagtcgcctctgacaagccaggagaattcgcacaaccacggggacggtgcagaggacttcaagcagcaggtgccgtataaagaggacaaaccccaggtgcccctggagtccgattccgtggaattcaacaacgccatcagctatgtgaataagattaaaacccgcttcctagaccacccagaaatctacaggtcattcctggagatcctgcacacgtaccagaaggagcagctgaacacgaggggccggccattccgaggcatgtctgaagaggaggtgttcaccgaggtggccaacctcttccggggccaggaggacctgctctcagagtttggacagttcctgcccgaagccaagcggtctctgttcacaggaaacgggccgtgcgagatgcacagcgtgcagaagaacgagcacgacaagaccccggagcacagcaggaagcgctcccggccctcgctcctccgccccgtgtctgcacccgccaagaaaaaaatgaaacttcgtggtaccaaagacctgtccatcgctgcagtggggaagtacgggactctgcaggaattttctttctttgacaaggtccgccgggtgctgaagagccaggaggtgtatgaaaacttcctccgctgcatcgcactcttcaaccaggagctggtgtctggctctgagctcctgcagctcgtcagcccatttctggggaaatttccagaactctttgcacagttcaagtccttcctgggggtaaaagagctgtccttcgcgccacccatgagcgacagatccggggacgggataagccgggaaattgattatgcatcctgcaagcgcataggatccagctaccgggcactccccaaaacctaccagcagcccaagtgcagtgggaggacagccatctgcaaggaggtactgaacgacacctgggtctccttcccttcctggtctgaggactccacgttcgtcagctccaagaagacaccgtacgaggagcagcttcaccgctgtgaggacgagcgcttcgagttagacgttgtcctggagacgaacctggccacaatccgtgtgttggaaagtgtgcagaagaagctatctcggatggcgccggaagaccaggagaagttccggctggacgactccctgggaggcacgtcggaggtgatccagcgccgtgccatttatcgcatctatggcgacaaggccccggagatcatcgagagcctcaagaagaaccctgtcaccgctgtccccgttgtcctgaaaagactgaaggccaaggaagaggagtggcgggaggcccagcagggcttcaacaagatctggcgggagcagtatgagaaggcgtacctcaagtcccttgaccaccaggctgtgaacttcaagcagaacgacaccaaggccctgcgctccaagagcttgctcaacgagatcgagagcgtctacgacgagcaccaggagcagcactcggagggccgcagtgccccctctagcgagccgcacctcatctttgtgtacgaggaccggcagatcctggaggacgcagcagcgctcatcagctactacgtgaagcggcagccggccatccagaaggaggaccagggcaccatccaccagctgctgcaccagttcgtgcccagcctcttcttctctcagcagctggacctgggcgcctccgaggagtcagctgatgaggaccgggacagcccccaggggcagaccacagaccccagtgagcggaagaagccggcgccaggaccccacagtagccccccagaggagaagggggccttcggggatgccccggccactgagcagccacccctgccgcccccagccccgcacaagcccctggacgatgtctacagcctattttttgccaacaacaactggtacttcttcctgcgcctgcaccagaccctgtgctccaggctgctgaagatctaccgccaggcgcagaagcagcttctggagtatcggaccgagaaggagcgggagaagctgctgtgtgagggccgcagggagaagggcagcgaccccgccatggagctgcggctgaagcagcccagtgaagtggagctggaggagtactacccggccttcctggacatggtgcggagcctgctggagggcagcatcgaccccacgcagtacgaggacaccctacgcgagatgttcaccatccatgcctacgtgggcttcaccatggacaagctggtgcagaacattgcgcggcagctgcaccacctcgtgagcgatgacgtctgcctgaaggtggtggagctctacctgaacgagaagaagcggggtgccgctggtgggaacctgtcctcccgctgcgtccgcgctgctagggagaccagctaccagtggaaggctgagcgctgcatggccgacgagaactgcttcaaggtgatgttcctgcagcgcaaagggcaggtgatcatgaccatcgagctcctggacaccgaggaggcccagacggaggaccctgtggaggtccagcacctggctcggtacgtggagcagtatgtggggaccgagggcgcgtccagctcgcccactgagggcttcctcctgaaacctgtgttcctgcagaggaacctcaagaagttccgccgccggtggcagagcgagcaggcgcgggccctgcgcggtgaggccaggagctcctggaagcggctggtgggcgtggagagcgcctgcgacgtggactgccgcttcaagctcagcactcacaagatggtgttcatcgtgaactccgaggactacatgtaccgtcgcgggaccctctgccgggccaagcaggtgcagcccctggtcctgctccgccaccaccagcactttgaggagtggcacagccgctggctggaggacaatgtgacggtggaggcggctagcctggtgcaggactggctgatgggtgaggaggacgaggacatggtaccctgcaagacgctgtgtgagacagtgcacgtgcacggcctgcccgtgacccgctaccgcgtgcagtacagccgccgcccggcctcgccctgacccgccctcatgggcaccgggcaggcgcctcacagagcacagacgtgccctcggccttggtcgtgtcggggccgttttcttgaacgacgtgagaggcatctcccagcccctctgctgccggacagcgcactccagggcaggacgccgcccccgtggctcccggtctcctgtgggcctgctgtgtgccaaacctgagctacctgcacccgagccctggggctcagccccaccacaggggcgggtggacgtgctggccgaggaacaagcaatcatgtttgcgtccccgtccgtcacatgtgccaaatccctggcaggcagatggctcctgccccatattcttgccgtgtcttggaaaagtcacaggtgacagccctcctgaggcccacactttggagggggtccatgtccaagagaccctgacaaggaaggagttgagccctgggtaggcttgcttgaaaagtgagtccttccagaatattctcagagctgccagaaacatcatctgagggtttgggcatcagctctgcctggctggtgttcaggccctcagtcactttggaagtgagaagaacccttcagccaaacctttgggatcccattttgaagtccagagctggagcaggcgggcagtgccctgggagaccccgctctggataagacacccaaccccaactccagcagctggactctgggcccacaaggggagggaccccagccagtattccctcagagccggcacgaccctgctgtggggcggcgggcccagtcgtgttcctgcagtgggcaccctaggcgtatgtgtatacacgcacagatatttattcctttcgcttttagtggttgttatttctgtagcagccaagtcctgcggctccctggggctgagatctccctttgtggaactccgagagccgccctgacagtcccagccgccacccaaggagccccatccgcccacccaccctgggacccacgcggccactccagggatcattgttgtccttttgtgaggggctgaggcgactgtcccatggaggcatccaaggctttctgtgccaagaatcccaagtgactggggctggggaccacttctccaggcctctctccccgaccatgagagcccctggccctggcccctgcacaccagtaggcccagaataaccgccacccttgccatcctgcaacagctggactcaagtttccaggaagtggagatgtgtttctagaagtttcctgtggaacctggaggctcctgatgcctttgactccaggctgggcgattccgatgctgacccgtcctcctgggctccccacccccgctccccaagtgtcacacaggcactttgtacacatcctggttttctaagaagggaacttgccatcaagattcctgtaccaggcccacggccgtctcgggcagagccacctgggccccgggtgcagccggagaccccgccgagcccctcctcccagtattcccatccccgcatgcttctagggagcgcctcttttccgttcttgaggaatttctgttctggggcttgtccttcctttgcagctgttttgaatgtagttttccttttctatttatttgcacattaaagttaataattgaatattgacatc

SEQ ID NO: 111972 - DNA, 3393 bp, Artificial Sequence
  derived and/or modified sequence
atggcccacgccggcggcggcagcggcggcagcggcgccggcggccccgccggcagaggcctgagcggcgccagatggggcagaagcggcagcgccggccacgagaagctgcccgtgcacgtggaggacgccctgacctacctggaccaggtgaagatcagattcggcagcgaccccgccacctacaacggcttcctggagatcatgaaggagttcaagagccagagcatcgacacccccggcgtgatcagaagagtgagccagctgttccacgagcaccccgacctgatcgtgggcttcaacgccttcctgcccctgggctacagaatcgacatccccaagaacggcaagctgaacatccagagccccctgaccagccaggagaacagccacaaccacggcgacggcgccgaggacttcaagcagcaggtgccctacaaggaggacaagccccaggtgcccctggagagcgacagcgtggagttcaacaacgccatcagctacgtgaacaagatcaagaccagattcctggaccaccccgagatctacagaagcttcctggagatcctgcacacctaccagaaggagcagctgaacaccagaggcagacccttcagaggcatgagcgaggaggaggtgttcaccgaggtggccaacctgttcagaggccaggaggacctgctgagcgagttcggccagttcctgcccgaggccaagagaagcctgttcaccggcaacggcccctgcgagatgcacagcgtgcagaagaacgagcacgacaagacccccgagcacagcagaaagagaagcagacccagcctgctgagacccgtgagcgcccccgccaagaagaagatgaagctgagaggcaccaaggacctgagcatcgccgccgtgggcaagtacggcaccctgcaggagttcagcttcttcgacaaggtgagaagagtgctgaagagccaggaggtgtacgagaacttcctgagatgcatcgccctgttcaaccaggagctggtgagcggcagcgagctgctgcagctggtgagccccttcctgggcaagttccccgagctgttcgcccagttcaagagcttcctgggcgtgaaggagctgagcttcgccccccccatgagcgacagaagcggcgacggcatcagcagagagatcgactacgccagctgcaagagaatcggcagcagctacagagccctgcccaagacctaccagcagcccaagtgcagcggcagaaccgccatctgcaaggaggtgctgaacgacacctgggtgagcttccccagctggagcgaggacagcaccttcgtgagcagcaagaagaccccctacgaggagcagctgcacagatgcgaggacgagagattcgagctggacgtggtgctggagaccaacctggccaccatcagagtgctggagagcgtgcagaagaagctgagcagaatggcccccgaggaccaggagaagttcagactggacgacagcctgggcggcaccagcgaggtgatccagagaagagccatctacagaatctacggcgacaaggcccccgagatcatcgagagcctgaagaagaaccccgtgaccgccgtgcccgtggtgctgaagagactgaaggccaaggaggaggagtggagagaggcccagcagggcttcaacaagatctggagagagcagtacgagaaggcctacctgaagagcctggaccaccaggccgtgaacttcaagcagaacgacaccaaggccctgagaagcaagagcctgctgaacgagatcgagagcgtgtacgacgagcaccaggagcagcacagcgagggcagaagcgcccccagcagcgagccccacctgatcttcgtgtacgaggacagacagatcctggaggacgccgccgccctgatcagctactacgtgaagagacagcccgccatccagaaggaggaccagggcaccatccaccagctgctgcaccagttcgtgcccagcctgttcttcagccagcagctggacctgggcgccagcgaggagagcgccgacgaggacagagacagcccccagggccagaccaccgaccccagcgagagaaagaagcccgcccccggcccccacagcagcccccccgaggagaagggcgccttcggcgacgcccccgccaccgagcagccccccctgcccccccccgccccccacaagcccctggacgacgtgtacagcctgttcttcgccaacaacaactggtacttcttcctgagactgcaccagaccctgtgcagcagactgctgaagatctacagacaggcccagaagcagctgctggagtacagaaccgagaaggagagagagaagctgctgtgcgagggcagaagagagaagggcagcgaccccgccatggagctgagactgaagcagcccagcgaggtggagctggaggagtactaccccgccttcctggacatggtgagaagcctgctggagggcagcatcgaccccacccagtacgaggacaccctgagagagatgttcaccatccacgcctacgtgggcttcaccatggacaagctggtgcagaacatcgccagacagctgcaccacctggtgagcgacgacgtgtgcctgaaggtggtggagctgtacctgaacgagaagaagagaggcgccgccggcggcaacctgagcagcagatgcgtgagagccgccagagagaccagctaccagtggaaggccgagagatgcatggccgacgagaactgcttcaaggtgatgttcctgcagagaaagggccaggtgatcatgaccatcgagctgctggacaccgaggaggcccagaccgaggaccccgtggaggtgcagcacctggccagatacgtggagcagtacgtgggcaccgagggcgccagcagcagccccaccgagggcttcctgctgaagcccgtgttcctgcagagaaacctgaagaagttcagaagaagatggcagagcgagcaggccagagccctgagaggcgaggccagaagcagctggaagagactggtgggcgtggagagcgcctgcgacgtggactgcagattcaagctgagcacccacaagatggtgttcatcgtgaacagcgaggactacatgtacagaagaggcaccctgtgcagagccaagcaggtgcagcccctggtgctgctgagacaccaccagcacttcgaggagtggcacagcagatggctggaggacaacgtgaccgtggaggccgccagcctggtgcaggactggctgatgggcgaggaggacgaggacatggtgccctgcaagaccctgtgcgagaccgtgcacgtgcacggcctgcccgtgaccagatacagagtgcagtacagcagaagacccgccagcccctag

SEQ ID NO: 111973 - protein, 550 aa, Artificial Sequence
  derived and/or modified sequence
MAEASFGSSSPVGSLSSEDHDFDPTAEMLVHDYDDERTLEEEEMMDEGKNFSSEIEDLEKEGTMPLEDLLAFYGYEPTIPAVANSSANSSPSELADELPDMTLDKEEIAKDLLSGDDEETQSSADDLTPSVTSHETSDFFPRPLRSNTACDGDKESEVEDVETDSGNSPEDLRKEIMIGLQYQAEIPPYLGEYDGNEKVYENEDQLLWCPDVVLESKVKEYLVETSLRTGSEKIMDRISAGTHTRDNEQALYELLKCNHNIKEAIERYCCNGKASQEGMTAWTEEECRSFEHALMLFGKDFHLIQKNKVRTRTVAECVAFYYMWKKSERYDYFAQQTRFGKKRYNHHPGVTDYMDRLVDETEALGGTVNASALTSNRPEPIPDQQLNILNSFTASDLTALTNSVATVCDPTDVNCLDDSFPPLGNTPRGQVNHVPVVTEELLTLPSNGESDCFNLFETGFYHSELNPMNMCSEESERPAKRLKMGIAVPESFMNEVSVNNLGVDFENHTHHITSAKMAVSVADFGSLSANETNGFISAHALHQHAALHSE

SEQ ID NO: 111974 - DNA, 1653 bp, Artificial Sequence
  derived and/or modified sequence
atggctgaagcctcctttggaagctcctctcccgttggcagcctctcgagcgaggatcacgatttcgatcccacagctgagatgctcgtgcatgattacgacgatgaacggacactcgaagaggaagaaatgatggatgaaggcaagaatttctcgtccgagatcgaagatctggagaaggaagggactatgccccttgaagatctgttggccttctacggatacgagcctaccattcccgcagttgcaaactcatcagcaaatagctctccatcagaactagcagacgagctgcctgacatgacgctggacaaagaagaaatcgccaaagacttgctatctggcgacgacgaagagacacagtcctctgctgatgacctcacaccatcggtgacgagccatgagaccagtgatttcttcccgcgcccactgaggagtaatactgcctgcgatggggataaagaatcagaagtcgaggatgtggagactgattctggcaatagcccagaggacctgcgcaaagaaataatgatagggctgcagtatcaagcagaaatacccccctacctgggcgaatatgatggcaacgaaaaggtgtacgagaacgaggaccagctgctttggtgccccgatgtagtcttagaaagcaaagtcaaagagtacctggtggaaaccagtctgagaacaggttctgagaaaattatggaccgcatctccgcgggcactcatacccgagacaacgagcaggccctgtatgagttgctcaagtgtaatcataatattaaagaggctatagagcggtactgttgtaatgggaaagcctctcaggaaggcatgaccgcatggaccgaagaggaatgtcgctcatttgaacatgcattgatgttgttcggaaaggactttcacctgatacagaagaataaggttagaacacggaccgtcgctgagtgcgttgccttctattatatgtggaaaaaatcggagcggtatgactattttgctcagcagacacgctttggaaagaagagatataatcaccacccaggcgttactgattatatggatcgattggttgatgaaacagaggcactcggcggaaccgtcaatgcttcagccctgacctcgaaccgcccagagcctattcccgaccaacagctgaacattttgaattccttcacggcaagcgacctcacagctctcactaactccgtggcaacagtctgcgaccccacagacgtgaactgcttggacgactcattcccgcccctaggcaatactccacgtgggcaggtgaatcatgtgcccgtggtcaccgaagaattgctgacgctgccaagtaacggcgagtcagattgctttaacctgtttgaaaccggcttctaccatagtgagttaaacccaatgaatatgtgcagcgaagaatcagagcgacccgcaaagagattaaagatgggtatcgctgttccagagagctttatgaacgaggtctctgttaacaacctcggagtggacttcgagaatcatacacatcatattacttccgccaagatggccgtctctgtagctgacttcggctcactgagtgctaacgaaacaaatgggtttatcagcgctcacgcacttcaccaacacgcagccctgcatagtgaatag

SEQ ID NO: 111975 - DNA, 5188 bp, Artificial Sequence
  derived and/or modified sequence
aaggtaccaatatggcggaggcttcttttggaagttcgagcccagttgggtctttgtcttctgaggatcatgattttgaccccactgctgagatgttggtccatgactatgatgatgaaagaactcttgaagaagaggaaatgatggatgagggtaaaaacttcagttcagaaattgaagacttagaaaaggaaggaaccatgcctctagaagatttactggcattctatggctatgaacctacaattccagcagttgcaaattccagtgcaaatagttccccaagtgaactggcagatgaactaccagacatgacactagacaaagaggaaatagcaaaagacctgttgtcaggtgatgacgaggaaactcagtcttctgcggatgatctgacgccatctgtgacttcccatgaaacttctgatttcttccctaggcctttacgatcaaatactgcatgtgatggtgataaggaatcagaggttgaagatgttgaaacagacagtggtaattcacctgaagatttgaggaaggaaataatgattggtttacaatatcaggcagagattcccccttatcttggagagtacgatggtaatgagaaagtatatgaaaacgaagaccagttactttggtgtcctgatgtggttttggagagcaaagttaaggaataccttgttgagacttcattaaggactggcagtgaaaaaataatggataggatttctgcaggaacacacacaagggacaatgaacaggcattatatgaacttctcaagtgtaaccacaatataaaggaagcaatcgaaagatactgctgcaatggaaaggcctctcaagaaggaatgactgcatggacggaagaagaatgccgaagctttgaacatgcactcatgctttttggaaaagattttcatcttatacagaagaataaggtgagaactaggacagttgctgagtgtgtagcattctactatatgtggaagaaatctgaacgttatgattactttgctcaacagacaagatttgggaaaaaaagatataaccatcaccctggagttacggactatatggatcgtttagtagatgaaacagaagctttgggtgggacggtaaatgcttcagccttaacttctaaccggcctgagcctattcctgatcaacagctaaacattctcaactccttcactgccagtgacttgacagctttgaccaacagtgtagcaaccgtctgcgaccccacagatgtgaattgtttggatgatagctttcctccactgggcaacacaccccgtggacaagttaatcatgtgcctgttgtaacagaagagttactcaccctgcccagcaatggggaaagtgattgttttaatttatttgagactggattttatcactcggagctaaaccctatgaacatgtgcagtgaagagtcagagagaccagcaaaaagattgaaaatgggcattgccgtccctgaatcctttatgaatgaagtttctgtaaataacctgggtgtggactttgaaaatcacacacatcacatcaccagtgccaaaatggctgtttctgtggctgactttggcagtctctctgccaacgagaccaatggtttcatcagtgcccatgctctgcatcagcacgcggccctacactctgagtgacctgagtgaggatcccggaactgcgtgtgcagcaccagtaaacttgaggggagctatcaggtttgcatagtctttcactggaagtttgaacctttctcactatgacatcagtgatgtcagtatgtatagaactatatcttgatttatcaagagtattttcatttttcaatccataaatgtggaaatgaactatgatcagcagagttgggaactaagattgaactctgtggtgcagctttaagctctgcttctctcttcctcatctcccaatacctcttccccactcccttctttttctattcttttgtgttccccactgccctcactcccaattttaaaacctgtagacagaggccaccagctcaaaaccagcacagatgttctgaactgaatggtgtggcctgtttttgtgtaaattccttttgccgtaatggatgcagtggaataacaatgtttacaggtaccgatcccgatccctgctcaatgtagcatttttttggttttattttcttaataaaagcaggggtaggtttctttaaactgcacaaacatgcaaggattttttaaaaatggaaacttctctcatgttattcaactagagcacttcagtttacaaaacagcaagtccatctttatggaagccagcacaaggaactgtgtgcaaataatgaagacgcttgcttggatcctgtttcaaaattctagaccagggctaccttacacagaattggtcatgttactgccaggagatttctgtgtaacttcatttattggctacagttttggcatttgaagatgtggtactcagatggggttttgtccaccattgtcaagattgtaatcttaaaaatcataccagtcattgataatttagtttatcctgaggcagtcgacttgcagaggcacagtctacaaagcctaggatgttgccactcaatggtttacattttgggacatcttttaagttgtttgtagcactgcagttcaaagtgttaatatttagagggacttctagattttatacctaatgcagtagaaccttgaagtatatttaagcttttttgttaagcttgaacagttggcaagaataatgtgagttcctatctgaaatagaatggtacattaccacttttaagttttaaaaattgatagatgttcagatgtatctcaaactcagttttatttttattccaaatattgtgaatgagaagccattgtcctaaactttggccatttttgtgctataaacatgcatttttaagttataaggtgaatcaaacaatatgtaatacagtattaggatgtaatctttgcttttgtagtactgttaaaatagagaattatgttgtttgcaccgtcttaattaaaattcttgatttttactagttgctttgcaaaaaacaaatgtttggctgcattgctaatatttgtaagtataagttgcttcaaggttgtgctgatgagtagataggatgtagtgatcttagtagtgattgaaagggagggtatttattatacaaactgtgaactgcaatgacatccttagttttggatgatgtgtattcttgtttttctttgcagcattttaatgaagattgctttgaagtgtttacgcagtagcacattagtataaaatttagtttagcacagtggacaaaaagtagttaaattaataacttaaaatcagtctctaatttatacatctgaagtatagcattcctgtatgcacacagtaaataatgggtagcctgggctctgtgttactttcttgtatttttatccaagttgtcagcttcttattgctgtgttgttgtgctaaactttgaaccttatttcttttattaaaaatcagtacactttctataatttagtaagatactggccataatcttccattgttataaccttaattttcactctgggtttacagtggctggtctgtataaataatttacacaaagatgactgaatgctaataccagttgcacttaaatgaacatgcccattctcagtagctgatgcagtaatatattcagtttatctatgcattgctggggtcttgatataagatggaaacagtgtttcttatctaaagttttgattatcagcaagttgaatggacactttagttatttaaataaagatttttgaccaaaatccagaaaatggtatgagagaaaaataaattccagctagtttaatagatttttaaatgtcaatctgattttagcctcttagagagtgctaactagctggtaatgtttacttttaattccttgttaaaatgaggcaataatttgcaagatttttgtatataagtgtaaattcttcatatctttttagatctaattcaatattttctgactacttctgccatgtataataccatttttgtgcatgcttgatgtgacattcataaattgtaccactatgactttatccatgtaaaatagctatttattgaattttcttttaaaagctggatttactgggttttttttttctctcagtttaaacatcttaacagagaatttgttactgtttattaaaagaattgcatttggaagcaagaaaacaaccggatttgcaatcatgtgaagaaacaataatgcctttattatcaagtgttaagcacaattcttataacaaactgtgataaattctttttgtttttttttcctttgccccattattttcttatgaacaaaccaaaaattcatggtgagcagttgcagtgttggctgatatatcttttatgtacagggaatttgaaaaggacagtggattcatttagaagtgtaactggtgctgtgattatagcaatacatttgttagttgtacttcatctttttcatgctagctttttaaatgtttagttttcctcttgtcatggtcagctgctgaatttacttgaaggatgtagaatactgtttaaaaaatactaaaatttgtacaattagatcaaagaattgtgcaatcatttcctttttaatttttaaaatgttgaggctcataaatatttgagaacatcagatctaatagagcatagtgatactatttaatttaaccaaagtctctagtgaatatttcaactttgaatgtaaactaacaaataaacctgaccaccaaggagattgtttgcccagagtttcaaagcacattgtctacaaatggaaattgaaataatttataaaatattgacgttactatgttttttaaaaagttcctaattttttcactaaatggaggaaactattagttttattgttaaatatggtagatattaatattcctcttagatgaccagtgattccaattgtcccagtttgaaataagtaccctgtgagtatgagataaattagtgacaatcagaacaagtttcagtatcagatgttcaagaggaagttgctattgcattgattttaatatttgtacataaacactgatttttttgagcattattttgtatttgttgtactttaatacctggtgtacagttccagaaataaaaatctgggaatctt

SEQ ID NO: 111976 - DNA, 1653 bp, Artificial Sequence
  derived and/or modified sequence
atggccgaggccagctttggcagcagcagccctgtgggcagcctgagcagcgaggaccatgactttgaccccacagctgagatgctggtgcatgactatgatgatgagaggaccctggaggaggaggagatgatggatgagggcaagaacttcagcagcgagattgaggacctggagaaggagggcaccatgcccctggaggacctgctggccttctacggctatgagcccaccatcccagctgtggccaacagcagcgccaacagcagccccagcgagctggctgatgagctgcctgacatgaccctggacaaggaggagatcgccaaggacctgctgtctggagatgatgaggagacccagagcagcgcagatgacctgacccccagcgtgaccagccatgagaccagtgacttcttcccccggcccctgcggagcaacacagcctgtgatggagacaaggagagcgaggtggaggatgtggagacagattctggcaacagccctgaggacctgaggaaggagatcatgattggcctgcagtaccaggccgagatccccccctacctgggggagtatgatggaaatgagaaggtgtatgaaaatgaagaccagctgctgtggtgcccagatgtggtgctggagagcaaggtgaaggagtacctggtggagaccagcctgaggactggaagtgagaagatcatggaccgcatctctgctggcacccacacccgggacaatgagcaggccctgtatgagctgctgaagtgcaaccacaacatcaaggaggccatcgagcgctactgctgcaatggcaaggccagccaggagggcatgacagcctggacagaggaggagtgccgcagctttgagcacgccctgatgctgtttgggaaggacttccacctgatccagaagaacaaggtgaggaccaggacagtggccgagtgtgtggccttctactacatgtggaagaagtcagaaagatatgactactttgcccagcagaccaggtttgggaagaagcgctacaaccaccaccctggggtgacagactacatggaccggctggtggatgaaacagaggccctgggcggcaccgtgaatgccagcgccctgaccagcaacagacctgagcccatcccagaccagcagctgaacatcctgaacagcttcaccgccagtgacctgacagccctgaccaacagcgtggccaccgtgtgtgaccccacagatgtgaactgcctggatgacagcttcccccccctgggcaacaccccccggggccaggtgaaccacgtgcctgtggtgacagaggagctgctgaccctgcccagcaatggagagagtgactgcttcaacctgtttgagaccggcttctaccacagcgagctgaaccccatgaacatgtgcagcgaggagagcgagaggcctgccaagaggctgaagatgggcattgctgtgcctgagagcttcatgaatgaggtgtctgtgaacaacctgggcgtggactttgagaaccacacccaccacatcaccagcgccaagatggctgtgtctgtggccgactttggcagcctgagcgccaatgagaccaacggcttcatcagcgcccacgccctgcaccagcacgccgccctgcacagcgagtag

SEQ ID NO: 111977 - DNA, 1653 bp, Artificial Sequence
  derived and/or modified sequence
atggccgaggccagcttcggcagcagcagccccgtgggcagcctgagcagcgaagatcacgatttcgaccctaccgccgagatgttggtgcacgactacgacgatgagcgcacgctggaagaggaggagatgatggacgagggtaaaaacttcagttccgagatagaggatctggaaaaagaggggactatgcctctagaggaccttctggcattctacggttacgagcctaccatcccagccgtggctaattcaagcgcaaattcttctccatccgagttagcagatgaactcccagatatgactctcgataaagaggaaattgctaaagatctgctgtccggtgacgacgaggaaactcagagctccgcagatgatctcacgccaagtgtgacctcacacgaaacctcggattttttcccacggccactgcgtagcaataccgcttgtgatggggataaagagtctgaggtcgaagacgtagagactgacagcggaaattcacccgaggatcttcggaaagagatcatgatcggcctgcaatatcaggcagagatccccccctatctgggagagtacgacgggaacgaaaaggtctatgagaacgaagaccagctgctctggtgtccagacgtcgtgctggaaagcaaggttaaggaatatctggtggagacaagtcttaggactgggtccgagaagattatggatcggatatctgctggaacccatacgcgcgataacgagcaggccctgtatgaactcttgaagtgtaaccacaacattaaagaggccattgagcgctattgctgcaatggcaaggcctcccaagagggtatgacagcctggacagaggaggaatgcagatctttcgaacacgcactcatgctgttcggtaaggactttcatctgattcaaaagaacaaagttcggacgcgcaccgtggctgagtgcgttgctttttactatatgtggaagaagagcgaaaggtatgattacttcgctcagcagacccggtttgggaagaaacgttacaaccaccatcccggggtgacagactacatggatagactggtggacgagacagaggccttaggagggaccgttaacgcctccgctttaacctccaacaggcccgagcctattcccgatcaacagcttaatattctcaatagtttcacggcaagtgacttaaccgcgctgacaaactctgtggccaccgtgtgcgatcccactgacgtgaactgtctggatgacagctttccacccctgggcaatacccctcgagggcaggttaaccacgtcccagtggtcaccgaggagctgctcacccttcctagtaatggagagagcgactgcttcaatttattcgagaccggtttttaccacagcgaactcaaccccatgaacatgtgttctgaagagagtgaacgtcccgctaaacgcctaaaaatggggattgcagtgcccgagtcttttatgaatgaggtgtcagtaaacaacctgggggtcgattttgagaaccacacccaccatatcacaagtgcaaaaatggcagtgagcgtggccgactttggcagcctgtctgcaaatgagacgaatggatttatatcagcccacgcattacaccaacatgcagcactgcactccgagtag

SEQ ID NO: 111978 - DNA, 1653 bp, Artificial Sequence
  derived and/or modified sequence
atggccgaagcttccttcggctcaagctccccagttggatccctctcctcagaagatcatgacttcgatcctacggcggaaatgctggtgcacgactatgacgacgagcgcacacttgaagaggaggagatgatggatgagggcaagaattttagttctgaaattgaagacctcgagaaggagggcaccatgccactggaggatctgctagcgttttacggatatgagcccaccatcccagctgtggctaacagttctgctaactcctcaccttcagagttggccgatgagctgcccgacatgaccttggacaaagaggaaattgccaaagatctgctcagtggggatgacgaggaaacccagtcctcagctgacgatctcactccttctgttacaagtcatgaaacctccgattttttcccccgtcccctgcggtctaacaccgcatgcgacggggacaaggagtccgaagtggaagatgtcgagaccgatagtggaaatagccctgaggatctccgaaaggaaattatgatcgggctgcagtatcaggccgagatccccccatatctgggtgagtatgatggcaatgagaaagtttatgagaacgaggaccagcttctgtggtgtcctgacgtggttctcgagtcaaaggttaaggaatacctggtggagacaagcctaagaacaggtagcgagaaaataatggatcggatttctgcaggcacccacacacgagataatgagcaggccctctatgaactactgaagtgcaatcataatatcaaggaggcgattgagcgctactgctgcaatggaaaggcttctcaggaaggaatgacggcttggaccgaagaggaatgtagaagcttcgaacacgcccttatgctctttggaaaagacttccacctcatccaaaaaaacaaagtccgcacgcggaccgtggcagaatgcgtggctttctactacatgtggaagaaatcagagcgttacgactatttcgctcagcagacacgatttgggaagaagcggtataatcaccatcccggtgtcacagactacatggacagactggtggacgaaaccgaagcgctcgggggaactgttaatgcaagcgcattgacgagtaataggccagagcctatccccgatcagcaactcaacatcctgaactcattcactgctagtgaccttaccgctctgaccaattccgtcgctacagtctgcgacccaaccgacgtcaactgcctggatgactcttttcccccactgggtaacacaccacgcggacaggttaaccatgtgccagtggtcactgaagagcttcttaccctaccctcgaacggtgaaagcgattgtttcaacctgtttgaaactggcttctatcattcggagctcaatcccatgaacatgtgtagcgaagaatcagaaaggcccgctaagcggctcaaaatgggcattgcagtgcccgagtcattcatgaatgaagttagcgtgaataacctaggagtcgactttgaaaaccatacccaccatattacatctgcaaagatggctgtttcagtcgctgactttggcagcctgtcagccaacgaaaccaacggctttatttcagcgcatgccctccatcaacacgccgcactgcactctgaatag

SEQ ID NO: 111979 - DNA, 1653 bp, Artificial Sequence
  derived and/or modified sequence
atggccgaggccagcttcggcagcagcagccccgtgggcagcctgagcagcgaggaccacgacttcgaccccaccgccgagatgctggtgcacgactacgacgacgagagaaccctggaggaggaggagatgatggacgagggcaagaacttcagcagcgagatcgaggacctggagaaggagggcaccatgcccctggaggacctgctggccttctacggctacgagcccaccatccccgccgtggccaacagcagcgccaacagcagccccagcgagctggccgacgagctgcccgacatgaccctggacaaggaggagatcgccaaggacctgctgagcggcgacgacgaggagacccagagcagcgccgacgacctgacccccagcgtgaccagccacgagaccagcgacttcttccccagacccctgagaagcaacaccgcctgcgacggcgacaaggagagcgaggtggaggacgtggagaccgacagcggcaacagccccgaggacctgagaaaggagatcatgatcggcctgcagtaccaggccgagatccccccctacctgggcgagtacgacggcaacgagaaggtgtacgagaacgaggaccagctgctgtggtgccccgacgtggtgctggagagcaaggtgaaggagtacctggtggagaccagcctgagaaccggcagcgagaagatcatggacagaatcagcgccggcacccacaccagagacaacgagcaggccctgtacgagctgctgaagtgcaaccacaacatcaaggaggccatcgagagatactgctgcaacggcaaggccagccaggagggcatgaccgcctggaccgaggaggagtgcagaagcttcgagcacgccctgatgctgttcggcaaggacttccacctgatccagaagaacaaggtgagaaccagaaccgtggccgagtgcgtggccttctactacatgtggaagaagagcgagagatacgactacttcgcccagcagaccagattcggcaagaagagatacaaccaccaccccggcgtgaccgactacatggacagactggtggacgagaccgaggccctgggcggcaccgtgaacgccagcgccctgaccagcaacagacccgagcccatccccgaccagcagctgaacatcctgaacagcttcaccgccagcgacctgaccgccctgaccaacagcgtggccaccgtgtgcgaccccaccgacgtgaactgcctggacgacagcttcccccccctgggcaacacccccagaggccaggtgaaccacgtgcccgtggtgaccgaggagctgctgaccctgcccagcaacggcgagagcgactgcttcaacctgttcgagaccggcttctaccacagcgagctgaaccccatgaacatgtgcagcgaggagagcgagagacccgccaagagactgaagatgggcatcgccgtgcccgagagcttcatgaacgaggtgagcgtgaacaacctgggcgtggacttcgagaaccacacccaccacatcaccagcgccaagatggccgtgagcgtggccgacttcggcagcctgagcgccaacgagaccaacggcttcatcagcgcccacgccctgcaccagcacgccgccctgcacagcgagtag

SEQ ID NO: 111980 - DNA, 1798 bp, Artificial Sequence
  derived and/or modified sequence
gcaaaagtatcgggggcgggactcgctgaggtgcgaaaactgggccaggggcagggctttgaccagctacttgagcgtgaaggggcggcgcccgcacgaaggggcgtcccagcttggaggcggggcccggatgggaggggcggggccgagtgcagtatcccgccagatggcggcgcccagcagagtcaggtgcggacgactttgtctgtaggagcagcggcggcttgaggacccggggagaccctcaagaatcgacccatcaggacgccagagctgcttcagcggtgaccaccttctccctctaacacattcttcccttcttcacaaacggcccatgtcagacgaaggctcaagggggagccgcctgcccctggcgctgcccccggcctcccagggttgctcttcagggggcggcggcggcggctcctcggctgggggctcgggcaattcccggcccccacgcaacctccaaggcttgctgcagatggccatcaccgcgggctctgaagagccagaccctcctccagaaccgatgagtgaggagaggcgtcagtggctgcaggaggccatgtcggctgccttccgaggccagcgggaggaggtggagcagatgaagagctgcctccgagtgctgtcacagcccatgccccccactgctggggaggccgagcaggcggccgaccagcaagagcgagagggggccctggagctgctggccgacctgtgtgagaacatggacaatgccgcagacttctgccagctgtctggcatgcacctgctggtgggccggtacctggaggcgggggctgcgggactgcggtggcgggcggcacagctcatcggcacgtgcagtcagaacgtggcagccatccaggagcaggtgctgggcctgggtgccctgcgtaagctgctgcggctgctggaccgcgacgcctgcgacacggtgcgcgtcaaggccctcttcgccatctcctgtctggtccgagagcaggaggctgggctgctgcagttcctccgcctggacggcttctctgtgttgatgagggccatgcagcagcaggtgcagaagctcaaggtcaaatcagcattcctgctgcagaacctgctggtgggccaccctgaacacaaagggaccctgtgctccatggggatggtccagcagctggtggccctggtgcggacagagcacagccccttccacgagcacgtgcttggagccctgtgcagcctggtgacagactttccgcagggtgtgcgcgagtgtcgggagccggaactgggcctggaggagctcctccgccaccgctgtcagctgctgcagcagcatgaggagtaccaggaggagctggagttctgtgaaaagctgctacagacctgtttctccagcccagcggacgacagcatggatcggtgaaaccaggtggcttcttgcccccttctccgtgggaaccccaggcctcttgcctccctccccacctacaaggccctctcccaagggatcgcagggcctaggtgcctggacccagggtgtgccagcccgtctctgtgcagtccctggaaggggcgctgagaaaggcaccagctccttggaccccacctcccatgctctcactctcatccccgttctcttgtccacacagctcttccaataaaggtgtttctcttcctccttctcctccttcactgccgcctttgtcatctcctttggagggtgcatgggggacgggaggaggggcacgggtttaagggacttggggagccactggaagaataataaaagtgttgctctttatcatct

SEQ ID NO: 111981 - DNA, 1197 bp, Artificial Sequence
  derived and/or modified sequence
aagatggcggcgcccagcagagtcaggtgcggacgactttgtctgtaggagcagcggcggcttgaggacccggggagaccctcaagaatcgacccatcaggacgccagagctgcttcagcggtgaccaccttctccctctaacacattcttcccttcttcacaaacggcccatgtcagacgaaggctcaagggggagccgcctgcccctggcgctgcccccggcctcccagggttgctcttcagggggcggcggcggcggctcctcggctgggggctcgggcaattcccggcccccacgcaacctccaaggcttgctgcagatggccatcaccgcgggctctgaagagccagaccctcctccagaaccgatgagtgaggagaggcgtcagtggctgcaggaggccatgtcggctgccttccgaggccagcgggaggaggtggagcagatgaagagctgcctccgagtgctgtcacagcccatgccccccactgctggggaggccgagcaggcggccgaccagcaagagcgagagggggccctggagctgctggccgacctgtgtgagaacatggacaatgccgcagacttctgccagctgtctggcatgcacctgctggtgggccggtacctggaggcgggggctgcgggactgcggtggcgggcggcacagctcatcggcacgtgcagtcagaacgtggcagccatccaggagcaggtgctgggcctgggtgccctgcgtaagctgctgcggctgctggaccgcgacgcctgcgacacgggtgtgcgcgagtgtcgggagccggaactgggcctggaggagctcctccgccaccgctgtcagctgctgcagcagcatgaggagtaccaggaggagctggagttctgtgaaaagctgctacagacctgtttctccagcccagcggacgacagcatggatcggtgaaaccaggtggcttcttgcccccttctccgtgggaaccccaggcctcttgcctccctccccacctacaaggccctctcccaagggatcgcagggcctaggtgcctggacccagggtgtgccagcccgtctctgtgcagtccctggaaggggcgctgagaaaggcaccagctccttggaccccacctcccatgctctcactctcatccccgttctcttgtccacacagctcttccaataaaggtgtttctcttc

SEQ ID NO: 111982 - DNA, 1907 bp, Artificial Sequence
  derived and/or modified sequence
gcaaaagtatcgggggcgggactcgctgaggtgcgaaaactgggccaggggcagggctttgaccagctacttgagcgtgaaggggcggcgcccgcacgaaggggcgtcccagcttggaggcggggcccggatgggaggggcggggccgagtgcagtatcccgccaggtgagaaggggataagagtcgggcaagcagcttcagccgcaaccacggcacgaagttgggtgggtacgcctggcacttccgggtgaaaccgtgcgtatttccggttaagatggcggcgcccagcagagtcaggtgcggacgactttgtctgtaggagcagcggcggcttgaggacccggggagaccctcaagaatcgacccatcaggacgccagagctgcttcagcggtgaccaccttctccctctaacacattcttcccttcttcacaaacggcccatgtcagacgaaggctcaagggggagccgcctgcccctggcgctgcccccggcctcccagggttgctcttcagggggcggcggcggcggctcctcggctgggggctcgggcaattcccggcccccacgcaacctccaaggcttgctgcagatggccatcaccgcgggctctgaagagccagaccctcctccagaaccgatgagtgaggagaggcgtcagtggctgcaggaggccatgtcggctgccttccgaggccagcgggaggaggtggagcagatgaagagctgcctccgagtgctgtcacagcccatgccccccactgctggggaggccgagcaggcggccgaccagcaagagcgagagggggccctggagctgctggccgacctgtgtgagaacatggacaatgccgcagacttctgccagctgtctggcatgcacctgctggtgggccggtacctggaggcgggggctgcgggactgcggtggcgggcggcacagctcatcggcacgtgcagtcagaacgtggcagccatccaggagcaggtgctgggcctgggtgccctgcgtaagctgctgcggctgctggaccgcgacgcctgcgacacggtgcgcgtcaaggccctcttcgccatctcctgtctggtccgagagcaggaggctgggctgctgcagttcctccgcctggacggcttctctgtgttgatgagggccatgcagcagcaggtgcagaagctcaaggtcaaatcagcattcctgctgcagaacctgctggtgggccaccctgaacacaaagggaccctgtgctccatggggatggtccagcagctggtggccctggtgcggacagagcacagccccttccacgagcacgtgcttggagccctgtgcagcctggtgacagactttccgcagggtgtgcgcgagtgtcgggagccggaactgggcctggaggagctcctccgccaccgctgtcagctgctgcagcagcatgaggagtaccaggaggagctggagttctgtgaaaagctgctacagacctgtttctccagcccagcggacgacagcatggatcggtgaaaccaggtggcttcttgcccccttctccgtgggaaccccaggcctcttgcctccctccccacctacaaggccctctcccaagggatcgcagggcctaggtgcctggacccagggtgtgccagcccgtctctgtgcagtccctggaaggggcgctgagaaaggcaccagctccttggaccccacctcccatgctctcactctcatccccgttctcttgtccacacagctcttccaataaaggtgtttctcttcctccttctcctccttcactgccgcctttgtcatctcctttggagggtgcatgggggacgggaggaggggcacgggtttaagggacttggggagccactggaagaataataaaagtgttgctctttatcatct

SEQ ID NO: 111983 - DNA, 522 bp, Artificial Sequence
  derived and/or modified sequence
atggagccccccggcgactggggcccccccccctggagaagcacccccaagaccgacgtgctgagactggtgctgtacctgaccttcctgggcgccccctgctacgcccccgccctgcccagctgcaaggaggacgagtaccccgtgggcagcgagtgctgccccaagtgcagccccggctacagagtgaaggaggcctgcggcgagctgaccggcaccgtgtgcgagccctgcccccccggcacctacatcgcccacctgaacggcctgagcaagtgcctgcagtgccagatgtgcgaccccgacatcggcagcccctgcgacctgagaggcagaggccacctggaggccggcgcccacctgagccccggcagacagaagggcgagcccgaccccgaggtggccttcgagagcctgagcgccgagccccacgccagactgagcatggccagcgccccctgcggccaggccggcctgcacctgagagacagagccgacggcacccccggcggcagagcctag

SEQ ID NO: 111984 - DNA, 552 bp, Artificial Sequence
  derived and/or modified sequence
atggagccccccggcgactggggcccccccccctggagaagcacccccaagaccgacgtgctgagactggtgctgtacctgaccttcctgggcgccccctgctacgcccccgccctgcccagctgcaaggaggacgagtaccccgtgggcagcgagtgctgccccaagtgcagccccggctacagagtgaaggaggcctgcggcgagctgaccggcaccgtgtgcgagccctgcccccccggcacctacatcgcccacctgaacggcctgagcaagtgcctgcagtgccagatgtgcgaccccgccatgggcctgagagccagcagaaactgcagcagaaccgagaacgccgtgtgcggctgcagccccggccacttctgcatcgtgcaggacggcgaccactgcgccgcctgcagagcctacgccaccagcagccccggccagagagtgcagaagggcggcaccgagagccaggacaccctgtgccagaactgcccccccggcaccttcagccccaacggcaccctggaggagtgccagcaccagacctag

SEQ ID NO: 111985 - DNA, 522 bp, Artificial Sequence
  derived and/or modified sequence
atggagccccctggagactggggcccgcccccatggcggtccaccccaaaaaccgatgtgctgagactggtgctgtacctcacttttctgggggccccttgctatgctccagctcttccgtcctgcaaggaggatgaatatcccgtcggcagtgaatgctgccccaaatgtagccctggctatcgcgttaaagaggcatgcggagagctgaccggcacagtctgtgaaccctgcccgcctgggacatacattgcgcatttaaacggcctttcaaaatgtttacaatgtcaaatgtgtgatcccgacatcgggagtccatgcgatctgaggggcaggggccatctcgaggccggggcacacctgagccccgggagacagaagggtgaaccggacccggaagtggcctttgagtccctctcagctgagccccatgccagactttcgatggcctctgcaccatgtggccaggcaggcctacatttacgcgaccgcgcagacggaacgcctggagggagggcatag

SEQ ID NO: 111986 - DNA, 552 bp, Artificial Sequence
  derived and/or modified sequence
atggagccccccggtgactggggtccacctccttggcgatctacccccaaaaccgatgtgttgagactagtgctgtatcttaccttcctgggcgctccatgttatgctcctgccttgccaagctgcaaggaggatgaatatcctgttggatctgaatgctgccctaagtgtagcccaggataccgtgtgaaggaggcctgtggcgaactcacaggtactgtgtgtgagccatgtcctcctggcacgtatattgcacatttaaatggattgagcaagtgcttgcagtgtcagatgtgcgacccggccatgggcttaagagcatctcgaaactgctctcgcacagagaacgctgtgtgtggttgttcgcctggccatttctgcatagtacaggatggggaccactgcgccgcttgccgagcctatgctacaagcagccctggtcagcgggtccagaaaggaggaacggagtctcaggacacgctatgtcagaattgcccacctgggacattcagtccaaacggcactctcgaggagtgccagcatcagacatag

SEQ ID NO: 111987 - DNA, 522 bp, Artificial Sequence
  derived and/or modified sequence
atggagcccccaggggactggggccccccaccctggaggagcacccccaagacagatgtgctgcggctggtgctgtacctgaccttcctgggcgccccctgctacgccccagccctgcccagctgcaaggaggatgagtaccctgtgggcagcgagtgctgccccaagtgcagccctggctacagagtgaaggaggcctgtggggagctgactggaacagtgtgtgagccctgccccccaggcacctacatcgcccacctgaatggcctgagcaagtgcctgcagtgccagatgtgtgaccctgacatcggcagcccctgtgacctgcggggccggggccacctggaggccggggcccacctgagccctggccggcagaagggggagccagaccctgaggtggcctttgagagcctgtctgctgagccccacgcccggctgtccatggccagcgccccctgtggccaggccggcctgcacctgcgggacagagcagatggcaccccaggcggccgggcctag

SEQ ID NO: 111988 - DNA, 552 bp, Artificial Sequence
  derived and/or modified sequence
atggagcccccaggggactggggccccccaccctggaggagcacccccaagacagatgtgctgcggctggtgctgtacctgaccttcctgggcgccccctgctacgccccagccctgcccagctgcaaggaggatgagtaccctgtgggcagcgagtgctgccccaagtgcagccctggctacagagtgaaggaggcctgtggggagctgactggaacagtgtgtgagccctgccccccaggcacctacatcgcccacctgaatggcctgagcaagtgcctgcagtgccagatgtgtgaccctgccatgggcctgcgggccagcaggaactgcagcaggacagaaaatgctgtgtgtggctgcagccctggccacttctgcatcgtgcaggatggagaccactgtgccgcctgccgggcctatgccaccagcagccctggccagagggtgcagaagggcggcacagagagccaggacaccctgtgccagaactgccccccaggcaccttcagccccaacggcaccctggaggagtgccagcaccagacctag

SEQ ID NO: 111989 - DNA, 522 bp, Artificial Sequence
  derived and/or modified sequence
atggagccccccggcgactggggcccccccccctggcggagcaccccaaagaccgacgttctgagattagttctgtacctgaccttcctcggggctccctgctatgcccccgcactaccctcttgtaaggaggacgaatacccagtgggatcggagtgttgtcctaagtgtagtcctggatacagagtgaaggaggcatgtggcgagctcacagggacagtgtgtgaaccttgtccccctggaacgtatatagctcacttaaatggcctatctaagtgcctgcagtgtcaaatgtgcgatcccgatattggatccccctgtgatctgcgcgggcgcgggcacctggaggcgggcgctcacctgagtcccggtcggcagaaaggagagccggatcccgaggtggcatttgagagcctgtcagccgagccacacgctcgcctgagcatggcctccgcaccctgcgggcaggccggccttcaccttagggatcgggccgatggcacccccggcgggagggcatag

SEQ ID NO: 111990 - DNA, 552 bp, Artificial Sequence
  derived and/or modified sequence
atggagccccccggcgactggggcccccccccctggcggagcacccccaagaccgacgtgctccggctggtgttatatcttacctttttgggagcaccgtgctacgccccagccctaccctcttgtaaggaagacgagtacccggtggggtcagagtgctgccctaagtgctccccgggatatcgtgtgaaagaagcttgtggcgaactgaccgggacagtctgcgagccctgtcccccaggcacatatatagcccaccttaatgggctgtccaaatgtctgcagtgccagatgtgtgatcccgcaatggggcttagagcttcaagaaactgctcgcgcacagaaaacgccgtgtgcggttgttcccccggccacttttgtatcgtgcaggatggcgatcactgtgcagcatgtagggcttatgctaccagtagtcccggccagcgggtccaaaaagggggcactgaaagccaggataccctgtgtcagaattgtcctcccggcaccttcagccccaatggaaccctagaggagtgccagcatcagacctag

SEQ ID NO: 111991 - DNA, 522 bp, Artificial Sequence
  derived and/or modified sequence
atggagccacctggggactggggaccccctccttggagaagtactccaaagacggatgttctgaggctcgtgctatacctaacattcctgggagccccttgttacgcccctgctctgccgagctgcaaggaggacgagtatcccgtaggttccgagtgctgccccaaatgcagtcccggttatagagtgaaggaggcctgcggcgagctgactggcactgtgtgcgaaccttgtcctccgggtacttatatcgctcacctgaacggactgtctaagtgccttcagtgtcaaatgtgcgaccccgacatcgggtcaccctgtgatctgcggggaaggggccacctggaggccggtgcccacttatcccccggacgccagaaaggtgagccggatcccgaagtggctttcgaatcactcagcgctgagcctcacgcccgactgagtatggctagcgcaccttgtggacaagctggcttacatcttcgggaccgcgcagatggaaccccagggggtagagcttag

SEQ ID NO: 111992 - DNA, 552 bp, Artificial Sequence
  derived and/or modified sequence
atggaaccgcctggagattggggtccaccaccatggagatcaacacccaagactgacgttctgcgtctggtgttgtacctcaccttcttaggcgctccttgctatgcgccagccttaccgagttgtaaggaggatgagtatccggtgggatctgaatgctgtcccaaatgttccccaggttatcgcgtaaaggaggcctgtggagagctcactgggacagtctgtgagccgtgtccgcctggaacttacattgcccatcttaacgggttgtcaaaatgtctgcagtgtcagatgtgcgatcccgctatgggcctaagggctagtcggaactgcagtagaactgagaatgccgtgtgtggctgcagtcctgggcatttctgcatcgttcaagacggcgaccactgtgccgcatgccgagcgtatgccacaagcagcccaggacagcgggttcagaaggggggtacggagtcccaggacacactctgccagaattgtccacctgggacgttcagccccaatggaaccctggaggagtgtcagcaccagacatag

SEQ ID NO: 111993 - DNA, 1027 bp, Artificial Sequence
  derived and/or modified sequence
tccttcataccggcccttcccctcggctttgcctggacagctcctgcctcccgcagggcccacctgtgtcccccagcgccgctccacccagcaggcctgagcccctctctgctgccagacaccccctgctgcccactctcctgctgctcgggttctgaggcacagcttgtcacaccgaggcggattctctttctctttctctttctcttctggcccacagccgcagcaatggcgctgagttcctctgctggagttcatcctgctagctgggttcccgagctgccggtctgagcctgaggcatggagcctcctggagactgggggcctcctccctggagatccacccccaaaaccgacgtcttgaggctggtgctgtatctcaccttcctgggagccccctgctacgccccagctctgccgtcctgcaaggaggacgagtacccagtgggctccgagtgctgccccaagtgcagtccaggttatcgtgtgaaggaggcctgcggggagctgacgggcacagtgtgtgaaccctgccctccaggcacctacattgcccacctcaatggcctaagcaagtgtctgcagtgccaaatgtgtgacccagatattggttccccctgtgacctcaggggaagaggtcacctggaggctggtgcccacctgagtccaggcagacagaaaggggaaccagacccagaggtggcctttgagtcactgagcgcagagcctcatgccaggctcagcatggccagtgctccctgcggccaggcaggactgcacctgcgggacagggctgacggcacacctgggggcagggcctgagcctacagggaggcacagggcaggtgggctagccatgaacagaagaggaagctggagtgctttgggggttcatgcatgtaggctgggatttggggctcacacctcaacctgcatgcccagttccatgcccctcccctcttgtgaaagcacctgtctacttgggctgaggatgtgggggcacaggtggcaggtgaggctgccctca

SEQ ID NO: 111994 - DNA, 660 bp, Artificial Sequence
  derived and/or modified sequence
ctgggacctgctctgggcaagcacaggcgccgcagcaatggcgctgagttcctctgctggagttcatcctgctagctgggttcccgagctgccggtctgagcctgaggcatggagcctcctggagactgggggcctcctccctggagatccacccccaaaaccgacgtcttgaggctggtgctgtatctcaccttcctgggagccccctgctacgccccagctctgccgtcctgcaaggaggacgagtacccagtgggctccgagtgctgccccaagtgcagtccaggttatcgtgtgaaggaggcctgcggggagctgacgggcacagtgtgtgaaccctgccctccaggcacctacattgcccacctcaatggcctaagcaagtgtctgcagtgccaaatgtgtgacccagccatgggcctgcgcgcgagccggaactgctccaggacagagaacgccgtgtgtggctgcagcccaggccacttctgcatcgtccaggacggggaccactgcgccgcgtgccgcgcttacgccacctccagcccgggccagagggtgcagaagggaggcaccgagagtcaggacaccctgtgtcagaactgccccccggggaccttctctcccaatgggaccctggaggaatgtcagcaccagaccaa

SEQ ID NO: 111995 - protein, 1280 aa, Artificial Sequence
  derived and/or modified sequence
MAGPCPRSGAERAGSCWQDPLAVALSRGRQLAAPPGRGCARSRPLSVVYVLTREPQPGLEPREGTEAEPLPLRCLREACAQVPRPRPPPQLRSLPFGTLELGDTAALDAFYNADVVVLEVSSSLVQPSLFYHLGVRESFSMTNNVLLCSQADLPDLQALRDCVGSYTLIPYVVTATGRVLCGDAGLLRGLADGLVQAGVGTEALLTPLVGRLARLLEATPTDSCGYFRETIRRDIRQARERFSGPQLRQELARLQRRLDSVELLSPDIIMNLLLSYRDVQDYSAIIELVETLQALPTCDVAEQHNVCFHYTFALNRRNRPGDRAKALSVLLPLVQLEGSVAPDLYCMCGRIYKDMFFSSGFQDAGHREQAYHWYRKAFDVEPSLHSGINAAVLLIAAGQHFEDSKELRLIGMKLGCLLARKGCVEKMQYYWDVGFYLGAQILANDPTQVVLAAEQLYKLNAPIWYLVSVMETFLLYQHFRPTPEPPGGPPRRAHFWLHFLLQSCQPFKTACAQGDQCLVLVLEMNKVLLPAKLEVRGTDPVSTVTLSLLEPETQDIPSSWTFPVASICGVSASKRDERCCFLYALPPAQDVQLCFPSVGHCQWFCGLIQAWVTNPDSTAPAEEAEGAGEMLEFDYEYTETGERLVLGKGTYGVVYAGRDRHTRVRIAIKEIPERDSRFSQPLHEEIALHRRLRHKNIVRYLGSASQGGYLKIFMEEVPGGSLSSLLRSVWGPLKDNESTISFYTRQILQGLGYLHDNHIVHRDIKGDNVLINTFSGLLKISDFGTSKRLAGITPCTETFTGTLQYMAPEIIDQGPRGYGKAADIWSLGCTVIEMATGRPPFHELGSPQAAMFQVGMYKVHPPMPSSLSAEAQAFLLRTFEPDPRLRASAQTLLGDPFLQPGKRSRSPSSPRHAPRPSDAPSASPTPSANSTTQSQTFPCPQAPSQHPPSPPKRCLSYGGTSQLRVPEEPAAEEPASPEESSGLSLLHQESKRRAMLAAVLEQELPALAENLHQEQKQEQGARLGRNHVEELLRCLGAHIHTPNRRQLAQELRALQGRLRAQGLGPALLHRPLFAFPDAVKQILRKRQIRPHWMFVLDSLLSRAVRAALGVLGPEVEKEAVSPRSEELSNEGDSQQSPGQQSPLPVEPEQGPAPLMVQLSLLRAETDRLREILAGKEREYQALVQRALQRLNEEARTYVLAPEPPTALSTDQGLVQWLQELNVDSGTIQMLLNHSFTLHTLLTYATRDDLIYTRIRGGMVCRIWRAILAQRAGSTPVTSGP

SEQ ID NO: 111996 - DNA, 3843 bp, Artificial Sequence
  derived and/or modified sequence
atggctggcccgtgccctagaagcggcgcagagagggctggctcctgttggcaagatcccttggcagtagcactctcccgagggcgccagttggcagccccacccggccgagggtgcgcaaggtccaggcctcttagtgtagtgtacgtgttgaccagggagccccagccaggattggaaccaagggagggcaccgaggcagaaccgctccctttgagatgcctcagagaggcatgcgcccaggttcctcgcccaaggccacctccccagcttcgttcgcttcccttcgggacgctggagctgggcgataccgctgccctggacgctttctacaacgcggacgtcgtggtgttggaagtgtccagctccttagtacaacctagtctattctatcatctaggtgtgcgcgagtctttctcaatgacaaacaacgtactgttatgtagccaggctgacctcccagacctgcaagcactccgcgactgcgtcggctcttataccttgataccatatgttgtgaccgcgacgggccgagtgctatgcggcgacgccgggttactgcgcggtctagccgacggcctcgttcaagctggcgttggaacggaagccttgttgacacctctggtggggcgcctggcaagactgttagaggccacacccacggattcatgtggttatttccgggagactatcagacgggacatccggcaggcgcgcgaacgcttttccgggccacagctccggcaggagttggcccgcttgcagaggagactggatagcgtcgaacttctgtcgcccgacatcattatgaatttgcttctgagctacagggatgtgcaggattacagcgcgatcatcgaacttgtcgagaccctgcaggcactgcctacgtgtgatgtcgccgaacagcacaacgtgtgctttcattacaccttcgctttgaatcgaaggaatcggcccggagacagagccaaggccttaagtgtactcctaccattagtacagttggaaggttcagtggctccggatctgtattgtatgtgcggaaggatctacaaggacatgttcttttcgagtgggtttcaggatgccggtcatcgagagcaagcttatcattggtacagaaaggcctttgacgtcgaacctagtctccacagcggtattaatgctgctgtgttgttgatcgctgctggtcaacacttcgaggattctaaagaactcagactgatcggcatgaaactgggatgcctgctcgcgcggaaggggtgcgtcgaaaagatgcagtattactgggatgttggattctatctcggggcccagatcctggccaatgacccaacccaggttgtgctagcagctgagcaactttataagctgaacgcacctatatggtacttggtctccgttatggaaacgttcctgttgtatcagcacttccgaccaacgcctgaaccaccaggcggtccacctagacgggcccatttttggctgcattttctgctgcagagttgccagccattcaaaacggcctgcgcgcagggcgaccagtgtttggttctggttctggagatgaacaaagtccttctccccgccaagctcgaagtaagaggaacagatcccgtgtcaactgtgactctctcgctgttggagccagaaacgcaggatataccctcttcatggacttttccagtggcgtctatttgcggcgtctctgcctctaaacgggatgagcgttgttgtttcttgtacgccctgccacccgcccaagatgtccaactgtgctttccctcagtgggacattgtcagtggttctgcggcttgatacaagcttgggtcacgaatcccgattcgacagcccccgctgaggaagcagaaggggcgggtgaaatgttagaattcgattatgagtataccgaaaccggcgagcgcctcgtgctgggaaaaggtacatatggcgtggtgtatgcaggaagggaccgccacacacgtgtgagaattgcaatcaaagaaattcctgaaagagacagtaggttctctcagcctctccacgaagaaattgccctgcatcgacgattgagacacaaaaatatagtgcgatacctggggagtgcgtcacagggtggttacctcaaaattttcatggaggaggtccctggcgggtccctgagctctctgcttcggtctgtatggggccccctaaaggataacgaatcaactatcagcttttacacacgacagatcctgcagggactgggctacctacacgataaccatattgtgcacagggatatcaagggggataatgtcttgatcaataccttcagcggactcttaaagatctctgattttggaacatctaaacgcctcgcgggaattacaccctgtaccgagacattcaccggtaccctgcaatacatggctcctgagatcattgatcaaggcccaaggggatatggtaaagctgcggacatttggtcgctgggatgtacagttatagaaatggccacaggtcgcccgccctttcacgagctgggcagcccacaagcagcaatgttccaagtgggaatgtacaaggtgcacccaccaatgccttcatccctttctgccgaggcacaagcatttcttctcaggactttcgagccggatccgcgcctgagggcctccgcccaaacactgctgggggacccattcctccagccgggcaaaagatctcggtctcctagcagtccacgtcacgcaccccggccctcagatgctccatcagcctcgcctacaccatctgcgaactctaccacacagtcccagacatttccctgtccccaggcccccagtcagcaccctccaagtcctccaaagcgctgcctgagctatgggggtacatcgcagctccgtgtgccagaagaacccgctgccgaggaaccagcgtcacctgaagaaagttctggactaagcctactccaccaggaaagcaaacgcagggcaatgctggcggctgtgctagaacaggagctccctgccctcgccgagaacctgcatcaggagcagaagcaggagcagggcgctagactcggtcgaaaccatgtcgaggaactgctccgatgcctgggagctcatattcatactcccaaccggaggcagctcgcccaggaactccgagcacttcagggtcggcttcgagcgcagggactcggtccagctctactgcaccgacctcttttcgcattccccgatgcagtgaaacaaattctgagaaaacggcagatacggcctcattggatgtttgtgctcgattcgttgttatcgagagccgtacgggccgctctgggagtgttaggaccagaggtcgagaaggaagcggtgagtccccgcagcgaagagctctccaatgagggagattcacagcagagccctggacagcaatccccattgcctgttgagcctgagcaggggcctgctccactgatggtgcagctctctctgctcagagccgaaaccgacaggctccgcgaaatcttagccggaaaggagagagaatatcaggcgcttgtgcagcgggctctgcagaggcttaatgaagaggctagaacctatgtattagcacccgaaccccctaccgccctttctacagaccaggggctcgtgcagtggctacaggagctcaacgtggatagtggcacgatccagatgctgctgaatcattccttcactctgcacaccctactcacctacgctacccgggacgacctcatctacaccagaatccggggcggtatggtctgtagaatttggcgcgctatactggcccagcgggcaggaagtactcctgtgaccagtggcccttag

SEQ ID NO: 111997 - DNA, 3843 bp, Artificial Sequence
  derived and/or modified sequence
atggccggcccctgccccaggtctggagctgagagagctggcagctgctggcaggaccccctggccgtggccctgagccggggccggcagctggccgcccctcctggccggggctgtgcccggagccggcccctgtctgtggtgtatgtgctgacccgggagccccagcccggcctggagccccgggagggcacagaagctgagcccctgcccctgcgctgcctgcgggaggcctgtgcccaggtgccccggccccggcccccaccccagctgcggagcctgcccttcggcaccctggagctgggggacacagctgccctggatgccttctacaatgctgatgtggtggtgctggaggtgagcagcagcctggtgcagcccagcctcttctaccacctgggcgtgcgggagagcttctccatgaccaacaacgtgctgctgtgcagccaggccgacctgcctgacctgcaggccctgcgggactgtgtgggcagctacaccctcatcccctacgtggtgacagccaccggccgggtgctgtgtggagatgctggcctgctgcggggcctggctgatggcctggtgcaggccggcgtgggcacagaggccctgctgacccccctggtgggccgcctggcccggctgctggaggccacccccacagacagctgtggctacttccgggagaccatccggcgggacatccggcaggcccgggagcgcttcagcggcccccagctgcggcaggagctggcccggctgcagaggcggctggacagcgtggagctgctgagcccagacatcatcatgaacctgctgctgagctacagagatgtgcaggactacagcgccatcatcgagctggtggagaccctgcaggccctgcccacctgtgatgtggccgagcagcacaacgtgtgcttccactacacctttgccctgaacagaagaaacagacctggggaccgggccaaggccctgtctgtgctgctgcccctggtgcagctggagggctctgtggccccagacctgtactgcatgtgtggccgcatctacaaggacatgttcttcagcagcggcttccaggatgctggccaccgggagcaggcctaccactggtacaggaaggcctttgatgtggagcccagcctgcacagcggcatcaatgctgctgtgctgctgattgctgctggccagcactttgaggacagcaaggagctgcggctcatcggcatgaagctgggctgcctgctggccaggaagggctgtgtggagaagatgcagtactactgggatgtgggcttctacctgggcgcccagatcctggccaatgaccccacccaggtggtgctggccgctgagcagctgtacaagctgaatgcccccatctggtacctggtgtctgtgatggagaccttcctgctgtaccagcacttccggcccaccccagagcccccaggcggccccccaagaagagcccacttctggctgcacttcctgctgcagagctgccagcccttcaagacagcctgtgcccagggcgaccagtgcctggtgctggtgctggagatgaacaaggtgctgctgcctgccaagctggaggtgcggggcacagatcctgtgtccacagtgaccctgagcctgctggagcctgagacccaggacatccccagctcctggaccttccctgtggccagcatctgtggggtgtctgccagcaagagagatgagcgctgctgcttcctgtatgccctgcccccagcccaggatgtgcagctgtgcttccccagcgtgggccactgccagtggttctgtggcctcatccaggcctgggtgaccaacccagacagcacagccccagctgaggaggccgagggcgctggggagatgctggagtttgattatgagtacacagagaccggggagcggctggtgctgggcaagggcacctatggagtggtgtatgccggccgggacagacacaccagggtgcgcatcgccatcaaggagatccctgagcgggacagccgcttcagccagcccctgcacgaggagatcgccctgcaccggcggctgcggcacaagaacatcgtgcgctacctgggcagcgccagccagggcggctacctgaagatcttcatggaggaggtgcctgggggcagcctgagcagcctgctgcggtctgtgtggggccccctgaaggacaatgaaagcaccatctccttctacacccggcagatcctgcagggcctgggctacctgcatgacaaccacatcgtgcaccgggacatcaagggggacaacgtgctgatcaacaccttcagcggcctgctgaagatcagtgactttggcaccagcaagaggctggccggcatcaccccctgcacagagaccttcaccggcaccctgcagtacatggcccctgagatcatcgaccagggcccccggggctacggcaaggctgctgacatctggagcctgggctgcaccgtcatcgagatggccaccggccggccccccttccacgagctgggcagcccccaggccgccatgttccaggtgggcatgtacaaggtgcacccccccatgcccagcagcctgtctgctgaggcccaggccttcctgctgcggacctttgagccagacccccggctgcgggccagcgcccagaccctgctgggggaccccttcctgcagcccgggaagaggagccgcagccccagcagccccaggcatgccccccggcccagtgatgcccccagcgccagccccaccccatctgccaacagcaccacccagagccagaccttcccctgcccccaggcccccagccagcacccccccagcccccccaagcgctgcctgtcctatggaggcaccagccagctgcgggtgcctgaggagcctgctgctgaggagcccgccagccctgaggagagcagcggcctgagcctgctgcaccaggagagcaagaggcgggccatgctggccgctgtgctggagcaggagctgcctgccctggccgagaacctgcaccaggagcagaagcaggagcagggcgcccggctgggcagaaatcatgtggaggagctgctgcgctgcctgggcgcccacatccacacccccaacagacggcagctggcccaggagctgcgggccctgcagggccgcctgcgggcccagggcctgggccctgccctgctgcaccggcccctgtttgccttcccagatgctgtgaagcagatcctgaggaagaggcagatccggccccactggatgtttgtgctggacagcctgctgagcagagctgtgcgggccgccctgggcgtgctgggccctgaggtggagaaggaggccgtgagccccaggtctgaggagctgagcaatgaaggagacagccagcagagccctggccagcagagccccctgcctgtggagcctgagcagggccctgcccccctgatggtgcagctgagcctgctgcgggcagagacagaccggctgcgggagatcctggccggcaaggagcgggagtaccaggccctggtgcagagggccctgcagaggctgaatgaggaggcccggacctacgtgctggcccctgagcccccaacagccctgagcacagaccagggcctggtgcagtggctgcaggagctgaatgtggacagcggcaccatccagatgctgctgaaccacagcttcaccctgcacaccctgctgacctacgccaccagagatgacctgatctacacccgcatccggggcggcatggtgtgccgcatctggagggccatcctggcccagagagctggcagcacccctgtgaccagcggcccctag

SEQ ID NO: 111998 - DNA, 4304 bp, Artificial Sequence
  derived and/or modified sequence
gccccagattcctgggacccaatcccggatttcagaacctcaggaccttgcaagtccgagctaggatttctccctggactttagattcctggaacgggacgtcaggccgtattccggatccctagatcccgtgggagattctccgattccgaacggattccagatcccaagattcctgatctgccggcccaggctcctgccccgcccccggttcccagtgcgcggcgccccgcgcctgagcgcccccgcatggcggggccgtgtccccggtccggggcggagcgcgccggcagctgctggcaggacccgctggccgtggcgctgagccggggccggcagctcgcggcgcccccgggccggggctgcgcgcggagccggccgctcagcgtggtctacgtgctgacccgggagccgcagcccgggctcgagcctcgggagggaaccgaggcggagccgctgcccctgcgctgcctgcgcgaggcttgcgcgcaggtcccccggccgcggccgcccccgcagctgcgcagcctgcccttcgggacgctggagctaggcgacaccgcggctctggatgccttctacaacgcggatgtggtggtgctggaggtgagcagctcgctggtacagccctccctgttctaccaccttggtgtgcgtgagagcttcagcatgaccaacaatgtgctcctctgctcccaggccgacctccctgacctgcaggccctgcgggattgcgttggcagctacacactgatcccctatgtggtgacggccactggtcgggtgctgtgtggtgatgcaggccttctgcggggcctggctgatgggctggtacaggctggagtggggaccgaggccctgctcactcccctggtgggccggcttgcccgcctgctggaggccacacccacagactcttgtggctatttccgggagaccattcggcgggacatccggcaggcgcgggagcggttcagtgggccacagctgcggcaggagctggctcgcctgcagcggagactggacagcgtggagctgctgagccccgacatcatcatgaacttgctgctctcctaccgcgatgtgcaggactactcggccatcattgagctggtggagacgctgcaggccttgcccacctgtgatgtggccgagcagcataatgtctgcttccactacacttttgccctcaaccggaggaacaggcctggggaccgggcgaaggccctgtctgtgctgctgccgctggtacagcttgagggctctgtggcgcccgatctgtactgcatgtgtggccgtatctacaaggacatgttcttcagctcgggtttccaggatgctgggcaccgggagcaggcctatcactggtatcgcaaggcttttgacgtagagcccagccttcactcaggcatcaatgcagctgtgctcctcattgctgccgggcagcactttgaggattccaaagagctccggctaataggcatgaagctgggctgcctgctggcccgcaaaggctgcgtggagaagatgcagtattactgggatgtgggtttctacctgggagcccagatcctcgccaatgaccccacccaggtggtgctggctgcagagcagctgtataagctcaatgcccccatatggtacctggtgtccgtgatggagaccttcctgctctaccagcacttcaggcccacgccagagccccctggagggccaccacgccgtgcccacttctggctccacttcttgctacagtcctgccaaccattcaagacagcctgtgcccagggcgaccagtgcttggtgctggtcctggagatgaacaaggtgctgctgcctgcaaagctcgaggttcggggtactgacccagtaagcacagtgaccctgagcctgctggagcctgagacccaggacattccctccagctggaccttcccagtcgcctccatatgcggagtcagcgcctcaaagcgcgacgagcgctgctgcttcctctatgcactccccccggctcaggacgtccagctgtgcttccccagcgtagggcactgccagtggttctgcggcctgatccaggcctgggtgacgaacccggattccacggcgcccgcggaggaggcggagggcgcgggggagatgttggagtttgattatgagtacacggagacgggcgagcggctggtgctgggcaagggcacgtatggggtggtgtacgcgggccgcgatcgccacacgagggtgcgcatcgccatcaaggagatcccggagcgggacagcaggttctctcagcccctgcatgaagagatcgctcttcacagacgcctgcgccacaagaacatagtgcgctatctgggctcagctagccagggcggctaccttaagatcttcatggaggaagtgcctggaggcagcctgtcctccttgctgcggtcggtgtggggacccctgaaggacaacgagagcaccatcagtttctacacccgccagatcctgcagggacttggctacttgcacgacaaccacatcgtgcacagggacataaaaggggacaatgtgctgatcaacaccttcagtgggctgctcaagatttctgacttcggcacctccaagcggctggcaggcatcacaccttgcactgagaccttcacaggaactctgcagtatatggccccagaaatcattgaccagggcccacgcgggtatgggaaagcagctgacatctggtcactgggctgcactgtcattgagatggccacaggtcgcccccccttccacgagctcgggagcccacaggctgccatgtttcaggtgggtatgtacaaggtccatccgccaatgcccagctctctgtcggccgaggcccaagcctttctcctccgaacttttgagccagacccccgcctccgagccagcgcccagacactgctgggggaccccttcctgcagcctgggaaaaggagccgcagccccagctccccacgacatgctccacggccctcagatgccccttctgccagtcccactccttcagccaactcaaccacccagtctcagacattcccgtgccctcaggcaccctctcagcacccacccagccccccgaagcgctgcctcagttatgggggcaccagccagctccgggtgcccgaggagcctgcggccgaggagcctgcgtctccggaggagagttcggggctgagcctgctgcaccaggagagcaagcgtcgggccatgctggccgcagtattggagcaggagctgccagcgctggcggagaatctgcaccaggagcagaagcaagagcagggggcccgtctgggcagaaaccatgtggaagagctgctgcgctgcctcggggcacacatccacactcccaaccgccggcagctcgcccaggagctgcgggcgctgcaaggacggctgagggcccagggccttgggcctgcgcttctgcacagaccgctgtttgccttcccggatgcggtgaagcagatcctccgcaagcgccagatccgtccacactggatgttcgttctggactcactgctcagccgtgctgtgcgggcagccctgggtgtgctaggaccggaggtggagaaggaggcggtctcaccgaggtcagaggagctgagtaatgaaggggactcccagcagagcccaggccagcagagcccgcttccggtggagcccgagcagggccccgctcctctgatggtgcagctgagcctcttgagggcagagactgatcggctgcgcgaaatcctggcggggaaggaacgggagtaccaggccctggtgcagcgggctctacagcggctgaatgaggaagcccggacctatgtcctggccccagagcctccaactgctctttcaacggaccagggcctggtgcagtggctacaggaactgaatgtggattcaggcaccatccaaatgctgttgaaccatagcttcaccctccacactctgctcacctatgccactcgagatgacctcatctacacccgcatcaggggagggatggtatgccgcatctggagggccatcttggcacagcgagcaggatccacaccagtcacctctggaccctgagagctgaatgagggcatcataggccagacaggcccaaggatggatgaatggagaggacaaaggcagcttctgacacaccagccccaggacctggggcgactggaggaagccaggcgagtggggcccaggactggttccagtgagagaaaccaaccacaggcacccaagcactaccagacaaagcgtattaaacagaacacttttgaaccttt

SEQ ID NO: 111999 - DNA, 3843 bp, Artificial Sequence
  derived and/or modified sequence
atggccggcccctgcccccggagcggcgccgagcgggccggcagctgttggcaggatccattagctgtggcactgtcccgaggaaggcaactggcggccccacccggcagaggatgcgcacgaagcaggccattatctgtggtctatgtgcttacacgcgagccgcagccaggcctggaaccacgtgaaggaacagaggctgagccgctgccactgaggtgtctcagggaagcatgtgcgcaggttcctcgcccaagaccccccccccagttgcggagtctcccttttgggaccctcgagctcggcgatactgccgcgttagatgccttctacaatgccgatgttgtcgtgcttgaagttagcagctccctagtacagcctagcttgttctaccacctgggggtgagggagtcattctctatgactaataacgtacttttgtgctcacaagccgaccttcctgacctgcaggcccttcgcgactgcgtgggcagctatactctgataccatacgtggtcactgcaactggtcgcgtgttgtgtggagatgctggtctactccgcggcctggctgatggcctggtccaagctggtgtgggaaccgaagccctgctgaccccattggtcgggaggttggctaggctgctagaggctactccaacggactcatgtgggtatttccgagagacaatccggagggacatccgacaggccagggaacgtttttcaggaccacagctgaggcaagagctggcccgcctgcagagacgactcgattcagtagagctgctgagccccgatatcataatgaaccttctgctgtcttaccgtgatgtgcaagactattctgcgattattgagctggtggagactctccaggccctccccacctgtgacgtggccgagcagcacaacgtgtgttttcactacacattcgcactgaatcgcagaaatcgacctggtgaccgcgcaaaggctctctcggtgctactccccctcgtccaactggaaggatctgttgcgcctgacttatattgcatgtgtggccgcatttataaggatatgtttttctctagtggattccaggacgctggtcatagagaacaggcttaccattggtacagaaaggccttcgatgtggagccctcactacacagtgggataaacgccgccgtgctgcttattgctgcaggtcagcatttcgaagattcgaaagaattacgcttgatcgggatgaagcttggctgcttactggcccgcaaggggtgcgttgagaagatgcaatattattgggatgtgggattttacttaggcgctcagattctcgcaaatgaccctacgcaggtggtcctggccgccgaacaactctataagcttaacgccccgatttggtatctggtgagcgtcatggaaaccttcctactgtaccagcacttcagacccacccctgaacccccaggggggcctcccaggagggcccatttctggttacatttcctgctgcagagctgccagccattcaaaaccgcatgcgctcaaggggatcaatgcctggtgctcgtgctggagatgaacaaggtcctgcttcccgccaagctggaggtgcgaggcaccgatcccgtgtcgacagttaccctctctctcttggaacccgagacccaggacattccctcctcttggacctttcccgtggccagtatatgcggtgttagtgctagtaagagggatgagcgttgttgctttctttacgccctccccccagctcaggacgtccagctatgttttcccagtgttggtcactgccagtggttttgcgggttaatccaggcgtgggtgacaaaccccgatagcactgctcccgccgaggaggccgagggagctggcgagatgctcgaatttgattacgagtacaccgagaccggcgaaaggctggttctgggtaagggaacatatggagtggtttatgccggaagagaccgccacacaagagttcgcatcgccataaaagagattcccgagcgcgactcccgcttttcacagccgctgcacgaagaaatcgctctccacagacgactgcggcataaaaacatagtgcgatatctcggctccgcttctcagggcggctatctgaagatcttcatggaagaagtccccggcggtagtctctcatctttgctccgcagcgtgtggggccctcttaaagataatgagtcgaccatttctttctatacaaggcaaatccttcaggggttgggctatttacacgacaatcatattgtgcatcgagacatcaagggcgataacgtactgatcaacacctttagcggcctattgaagatctcagatttcgggacaagcaaacggctggccggaattactccttgtaccgaaacctttactggtacactacaatatatggcaccagaaatcatcgaccaaggcccacgcggctacgggaaggctgctgatatttggtcgctgggttgcacggtgatagagatggctaccggtagacccccctttcacgagctgggcagcccgcaggctgccatgttccaggttggcatgtataaggttcacccgccaatgcctagctccctctctgccgaagcccaggcctttttgctgcgaacattcgagccagaccccagactgagagcctctgcgcaaactctcttgggcgatccattcttacaacccgggaaaaggtcacgtagcccctctagcccccgccatgcccccaggccgagtgacgccccatccgctagtcctaccccctctgccaacagcaccacccaatcccagacctttccatgcccccaggcgccctctcagcacccaccaagcccgccgaaacgatgcctatcttatggtggcaccagtcaactgcgcgtccctgaggaaccagccgctgaagagcccgcttcaccggaagaatctagcggcttaagcctgttgcatcaagagagcaagcggcgagcaatgcttgccgccgttctcgaacaggagctgccagccctcgccgagaatctccatcaggagcagaaacaagaacagggagccagactcgggcgcaaccatgtggaggaattactacgttgcctgggtgcacatatccacactcccaacaggaggcagctggcacaggaactccgcgcactacaagggaggcttagagctcagggcttgggtccagcccttctgcaccgcccgctcttcgcgttccctgacgctgttaaacagattctcagaaaacgacagattaggcctcactggatgttcgtgctggacagcctgctgagcagggcggttcgcgctgccctgggcgtgcttggaccagaggtggagaaggaagctgtgagtccccgatctgaggagctgagtaacgaaggggattcccagcagtctcccgggcagcaaagtcccctgccagtagaacctgaacaaggcccggccccattgatggtgcagctgagcttgcttagggcggagacggaccgattaagggagatacttgccggcaaggaacgggagtaccaggcgctcgtgcaacgagcccttcagagattaaatgaggaggcccgtacctacgtgctcgcacctgagccaccaacggccctatcaaccgaccagggcttggtccagtggttacaggagttgaatgtagactccggaactatccagatgctcctcaaccatagctttactttacacaccctactaacatatgctacacgtgacgaccttatttacacacgaatcagaggtggaatggtgtgtcgcatttggagggcgatcctggcccagcgtgccgggagtactccagtgacctccggaccttag

SEQ ID NO: 112000 - DNA, 3843 bp, Artificial Sequence
  derived and/or modified sequence
atggctggcccatgtcctcggtccggcgctgagagggccggatcctgttggcaagacccactggctgtggccctgtcacggggacgccagctggctgctcctccaggcagaggatgtgctaggagccgacctctatcagtggtgtacgttctcactagggagccccaacctgggctggagccgagagagggcactgaagcagagccactgcctctgaggtgcctccgggaagcctgcgcacaggtgccacgccctaggcctcccccacaacttcgcagtctgccatttggcacactggaattgggcgataccgctgctttagacgcattctacaatgccgacgtcgtggtgctggaggttagcagctcgctcgttcagccctccctgttctatcatctgggagtgagagagtctttttcaatgacgaacaacgttctactgtgcagccaggccgacctacctgatctccaagccctgagggactgtgttggcagctacacccttattccctacgtagtgacagccacagggagagtgctgtgtggggatgccggtcttctacgcggtctggctgatggtcttgtgcaggcgggagttggtaccgaagcactgttgactcctttagtgggacgcctcgcaaggcttctggaggccacacctacggactcatgtggttactttcgcgagactatccgcagagatattagacaggcacgggagcgcttctcaggtcctcagctgagacaggaactggcaagactgcagagaaggctggattctgtcgagcttctgtctcccgatattatcatgaatcttctcctgagctacagggatgtccaggattatagtgctatcatcgaactggtggaaacacttcaggctttgcctacctgtgacgtcgccgaacagcacaatgtctgttttcactatactttcgcgctgaatagaagaaaccgccctggcgacagggccaaggccttaagcgtgctgctgcccctggtgcagctggaggggtccgtcgccccagatctctactgtatgtgtggcagaatctacaaggatatgttcttttcgtcaggattccaggatgctggtcacagagagcaggcatatcactggtaccgcaaagctttcgatgtggaaccctctctgcatagcggaatcaatgctgccgtgctgctgatcgctgctggccaacatttcgaagactccaaggaactccgtctcatcgggatgaagctggggtgcctcctcgctaggaagggttgcgtcgagaagatgcagtattactgggatgtgggcttttacctgggcgctcagatactcgccaacgacccaactcaagtcgtgcttgccgcagaacaactttacaagctgaacgctccaatttggtacttagtcagtgtgatggaaacatttctactgtaccaacattttcgcccaactcccgagcccccaggaggcccaccacggagggcccacttctggctccactttttgttgcagtcttgccagccatttaagaccgcctgcgcccagggcgaccaatgtcttgtcctggttcttgaaatgaacaaggtgctcctgccggcaaaattggaggtccgtggaactgacccagtctcgactgtgacattgagcttgctcgagccagaaactcaggacatcccaagctcgtggacgttcccagtggcctccatttgtggagtatcagctagcaagcgggacgaacggtgctgcttcctttatgccctacctccagcccaggacgtccagttgtgttttccatcagtgggacactgccagtggttttgcggacttatacaagcctgggtcacaaaccctgactccactgctcctgctgaggaggccgaaggagctggggaaatgctggaattcgactacgagtacacagagacaggcgaacgcttagtcttagggaaaggcacttatggcgtagtctacgcgggtagagacaggcatacccgcgtgcgtatcgctatcaaggaaattccggagcgcgactcaagattttctcaacccttgcacgaagaaattgctcttcatcggcgactcagacataagaatatcgtccgctatcttggatccgcgtctcaggggggataccttaagatctttatggaagaggttcccggtggatcactctcaagcctcctgaggtctgtgtgggggccactcaaggacaatgaatccaccatctcattctacacccgacagatccttcagggcttagggtaccttcatgacaaccacatcgtgcaccgagacattaagggtgataatgtgctgattaatacattttcaggtttgctaaagatcagtgatttcggaacatctaagaggctggcagggatcacaccgtgcacggagacctttacagggacgctgcaatacatggctcctgaaatcatcgatcagggtccgagaggctatggaaaggctgccgacatctggagtcttggatgcacagtcatcgagatggctactggcagacctccctttcacgaactggggtccccacaggcggctatgtttcaagtgggaatgtacaaagtccacccccctatgccaagctctctaagtgctgaagcccaggcctttttgctgaggacctttgaacctgacccaaggctcagggcttcagctcagacactgctgggagatcccttcctgcaacctgggaaacggtctcgtagcccctcctctccgaggcacgctccgagaccaagcgatgcaccgagcgcatcacctacccccagtgcgaattctactacccagtctcaaacctttccatgtccacaggcccctagccagcaccctccatcaccccctaaacgctgtttgtcctatggcggaacctctcagttacgcgttcctgaagaaccagccgcagaagagccagcatctcccgaggagagcagcggattgagcctattgcaccaggaatccaaaaggagagctatgttggccgctgtgctagagcaagagctacctgcacttgcggaaaaccttcatcaggaacaaaagcaagaacagggggcacgccttgggagaaaccacgttgaagaactccttagatgtctgggtgctcatatccataccccaaatcgcaggcaactcgcccaagaacttagggcccttcagggtcggttgcgggcacagggattgggccctgcattattgcataggcctctgttcgcgttccccgacgcggtcaaacagatcttgcggaaacggcagatcagacctcactggatgttcgtgcttgattcgttgctgagtcgagctgtgagggctgcgctgggcgtgctcggaccagaggttgagaaggaagctgtgagtcctaggtcagaagaactgtctaatgaaggcgacagccagcagtcgcccggacagcaatccccactgcccgtcgagcctgagcaaggtccagctccgcttatggtgcaactgtccctgttgagggctgaaaccgaccgtcttagagaaattctcgccggaaaggagcgcgagtaccaagcactggtgcagagggccctccagagactgaacgaggaggccaggacctacgtattggccccagaaccccctacagccctatccaccgatcagggacttgttcagtggttacaagaattaaacgttgatagcggaactatccagatgctgctcaaccacagctttaccctacacactctcctcacatatgccacccgggacgatctgatttatacaagaatccgtgggggaatggtgtgtagaatctggcgggctattctcgcacagcgagctggcagcacccctgtgaccagtggaccctag

SEQ ID NO: 112001 - DNA, 3843 bp, Artificial Sequence
  derived and/or modified sequence
atggccggcccctgccccagaagcggcgccgagagagccggcagctgctggcaggaccccctggccgtggccctgagcagaggcagacagctggccgccccccccggcagaggctgcgccagaagcagacccctgagcgtggtgtacgtgctgaccagagagccccagcccggcctggagcccagagagggcaccgaggccgagcccctgcccctgagatgcctgagagaggcctgcgcccaggtgcccagacccagaccccccccccagctgagaagcctgcccttcggcaccctggagctgggcgacaccgccgccctggacgccttctacaacgccgacgtggtggtgctggaggtgagcagcagcctggtgcagcccagcctgttctaccacctgggcgtgagagagagcttcagcatgaccaacaacgtgctgctgtgcagccaggccgacctgcccgacctgcaggccctgagagactgcgtgggcagctacaccctgatcccctacgtggtgaccgccaccggcagagtgctgtgcggcgacgccggcctgctgagaggcctggccgacggcctggtgcaggccggcgtgggcaccgaggccctgctgacccccctggtgggcagactggccagactgctggaggccacccccaccgacagctgcggctacttcagagagaccatcagaagagacatcagacaggccagagagagattcagcggcccccagctgagacaggagctggccagactgcagagaagactggacagcgtggagctgctgagccccgacatcatcatgaacctgctgctgagctacagagacgtgcaggactacagcgccatcatcgagctggtggagaccctgcaggccctgcccacctgcgacgtggccgagcagcacaacgtgtgcttccactacaccttcgccctgaacagaagaaacagacccggcgacagagccaaggccctgagcgtgctgctgcccctggtgcagctggagggcagcgtggcccccgacctgtactgcatgtgcggcagaatctacaaggacatgttcttcagcagcggcttccaggacgccggccacagagagcaggcctaccactggtacagaaaggccttcgacgtggagcccagcctgcacagcggcatcaacgccgccgtgctgctgatcgccgccggccagcacttcgaggacagcaaggagctgagactgatcggcatgaagctgggctgcctgctggccagaaagggctgcgtggagaagatgcagtactactgggacgtgggcttctacctgggcgcccagatcctggccaacgaccccacccaggtggtgctggccgccgagcagctgtacaagctgaacgcccccatctggtacctggtgagcgtgatggagaccttcctgctgtaccagcacttcagacccacccccgagccccccggcggcccccccagaagagcccacttctggctgcacttcctgctgcagagctgccagcccttcaagaccgcctgcgcccagggcgaccagtgcctggtgctggtgctggagatgaacaaggtgctgctgcccgccaagctggaggtgagaggcaccgaccccgtgagcaccgtgaccctgagcctgctggagcccgagacccaggacatccccagcagctggaccttccccgtggccagcatctgcggcgtgagcgccagcaagagagacgagagatgctgcttcctgtacgccctgccccccgcccaggacgtgcagctgtgcttccccagcgtgggccactgccagtggttctgcggcctgatccaggcctgggtgaccaaccccgacagcaccgcccccgccgaggaggccgagggcgccggcgagatgctggagttcgactacgagtacaccgagaccggcgagagactggtgctgggcaagggcacctacggcgtggtgtacgccggcagagacagacacaccagagtgagaatcgccatcaaggagatccccgagagagacagcagattcagccagcccctgcacgaggagatcgccctgcacagaagactgagacacaagaacatcgtgagatacctgggcagcgccagccagggcggctacctgaagatcttcatggaggaggtgcccggcggcagcctgagcagcctgctgagaagcgtgtggggccccctgaaggacaacgagagcaccatcagcttctacaccagacagatcctgcagggcctgggctacctgcacgacaaccacatcgtgcacagagacatcaagggcgacaacgtgctgatcaacaccttcagcggcctgctgaagatcagcgacttcggcaccagcaagagactggccggcatcaccccctgcaccgagaccttcaccggcaccctgcagtacatggcccccgagatcatcgaccagggccccagaggctacggcaaggccgccgacatctggagcctgggctgcaccgtgatcgagatggccaccggcagaccccccttccacgagctgggcagcccccaggccgccatgttccaggtgggcatgtacaaggtgcacccccccatgcccagcagcctgagcgccgaggcccaggccttcctgctgagaaccttcgagcccgaccccagactgagagccagcgcccagaccctgctgggcgaccccttcctgcagcccggcaagagaagcagaagccccagcagccccagacacgcccccagacccagcgacgcccccagcgccagccccacccccagcgccaacagcaccacccagagccagaccttcccctgcccccaggcccccagccagcacccccccagcccccccaagagatgcctgagctacggcggcaccagccagctgagagtgcccgaggagcccgccgccgaggagcccgccagccccgaggagagcagcggcctgagcctgctgcaccaggagagcaagagaagagccatgctggccgccgtgctggagcaggagctgcccgccctggccgagaacctgcaccaggagcagaagcaggagcagggcgccagactgggcagaaaccacgtggaggagctgctgagatgcctgggcgcccacatccacacccccaacagaagacagctggcccaggagctgagagccctgcagggcagactgagagcccagggcctgggccccgccctgctgcacagacccctgttcgccttccccgacgccgtgaagcagatcctgagaaagagacagatcagaccccactggatgttcgtgctggacagcctgctgagcagagccgtgagagccgccctgggcgtgctgggccccgaggtggagaaggaggccgtgagccccagaagcgaggagctgagcaacgagggcgacagccagcagagccccggccagcagagccccctgcccgtggagcccgagcagggccccgcccccctgatggtgcagctgagcctgctgagagccgagaccgacagactgagagagatcctggccggcaaggagagagagtaccaggccctggtgcagagagccctgcagagactgaacgaggaggccagaacctacgtgctggcccccgagccccccaccgccctgagcaccgaccagggcctggtgcagtggctgcaggagctgaacgtggacagcggcaccatccagatgctgctgaaccacagcttcaccctgcacaccctgctgacctacgccaccagagacgacctgatctacaccagaatcagaggcggcatggtgtgcagaatctggagagccatcctggcccagagagccggcagcacccccgtgaccagcggcccctag

SEQ ID NO: 112002 - DNA, 1287 bp, Artificial Sequence
  derived and/or modified sequence
atggccgcccaccacggcgacggcccctacaagtgcaagctgtgcggcaaggccttcgtgtggcccagcctgttccacctgcacgagagaacccacaccggcgagaagccctacgagtgcaagcagtgcagcaaggccttccccttctacagcagctacctgagacacgagagaatccacaccggcgagaaggcctacgagtgcaagcagtgcagcaaggccttccccgactacagcacctacctgagacacgagagaacccacaccggcgagaagccctacaagtgcacccagtgcggcaaggccttcagctgctactactacaccagactgcacgagagaacccacaccggcgagcagccctacgcctgcaagcagtgcggcaagaccttctaccaccacaccagcttcagaagacacatgatcagacacaccggcgacggcccccacaagtgcaagatctgcggcaagggcttcgactgccccagcagcgtgagaaaccacgagaccacccacaccggcgagaagccctacgagtgcaagcagtgcggcaaggtgctgagccacagcagcagcttcagaagccacatgatcacccacaccggcgacggcccccagaagtgcaagatctgcggcaaggccttcggctgccccagcctgttccagagacacgagagaacccacaccggcgagaagccctaccagtgcaagcagtgcggcaaggccttcagcctggccggcagcctgagaagacacgaggccacccacaccggcgtgaagccctacaagtgccagtgcggcaaggccttcagcgacctgagcagcttccagaaccacgagaccacccacaccggcgagaagccctacgagtgcaaggagtgcggcaaggccttcagctgcttcaagtacctgagccagcacaagagaacccacaccgtggagaagccctacgagtgcaagacctgcagaaaggccttcagccacttcagcaacctgaaggtgcacgagagaatccacagcggcgagaagccctacgagtgcaaggagtgcggcaaggccttcagctggctgacctgcctgctgagacacgagagaatccacaccggcgagaagccctacgagtgcctgcagtgcggcaaggccttcaccagaagcagattcctgagaggccacgagaagacccacaccggcgagaagctgtacgagtgcaaggagtgcggcaaggccctgagcagcctgagaagcctgcacagacacaagagaacccactggaaggacaccctgtag

SEQ ID NO: 112003 - DNA, 1287 bp, Artificial Sequence
  derived and/or modified sequence
atggcggcacaccacggagacggaccctataagtgcaaactatgtggcaaggcctttgtgtggcctagtttattccacttacatgaacggacccacacaggggagaagccctatgagtgcaagcagtgctccaaggcattcccattctacagctcctatctgcggcacgaacgcattcacacaggcgaaaaggcttacgagtgtaagcagtgcagcaaggccttccccgactattcaacctaccttcggcacgagcggactcacaccggggaaaaaccctacaagtgcacacagtgtggaaaggccttttcctgctattactatacgaggttacacgagagaacacacactggagaacagccatacgcctgcaagcaatgtggaaagactttctaccatcacacgagctttcgtagacatatgattagacacaccggagatggcccccataagtgtaagatctgtggcaaaggatttgattgtcccagctcagtcagaaaccacgagacgactcacaccggcgaaaaaccatatgagtgtaagcaatgcggtaaagtgttatcacactcctcatccttcagatcacacatgatcacccataccggcgacggacctcaaaagtgtaaaatctgcggtaaagcgttcggatgcccgtcgctctttcagagacatgaaaggactcatactggagagaaaccttatcagtgtaagcagtgcgggaaggccttctctctggccggctccctcaggcgccacgaggctactcatactggcgtgaaaccctataagtgccaatgcggcaaggcatttagtgacctgagtagttttcaaaatcatgagacaacccacaccggcgagaagccatatgagtgcaaggagtgtggaaaagcgttcagctgctttaaatacctgagccaacacaaaagaactcataccgtggaaaagccttacgagtgtaaaacttgtcgcaaggccttcagtcacttctcaaacctcaaggttcacgagcgcattcactcaggagaaaagccatatgaatgtaaagagtgtggtaaggccttcagctggctcacctgtcttttgagacatgaacgaatccacacaggcgaaaagccctacgagtgcttacagtgtgggaaggcattcacacgcagcaggttcctacgcggacacgaaaagactcatacaggagaaaagctgtacgaatgtaaggagtgcggcaaagcgctttccagtctgaggtcactccacagacataagaggactcactggaaggacaccctgtag

SEQ ID NO: 112004 - DNA, 1287 bp, Artificial Sequence
  derived and/or modified sequence
atggccgcccaccacggagatggcccctacaagtgcaagctgtgtgggaaggcctttgtgtggcccagcctcttccacctgcacgagaggacccacactggagagaagccctatgagtgcaagcagtgcagcaaggccttccccttctacagcagctacctgcggcatgagcgcatccacactggagagaaggcctatgagtgcaagcagtgcagcaaggccttcccagactacagcacctacctgcggcatgagaggacccacactggagagaagccctacaagtgcacccagtgtgggaaggccttcagctgctactactacacccggctgcacgagaggacccacactggagagcagccctatgcctgcaagcagtgtgggaagaccttctaccaccacaccagcttccgccgccacatgatccgccacactggagatggcccccacaagtgcaagatctgtgggaaaggatttgactgccccagctctgtgaggaaccacgagaccacccacactggagagaagccctatgagtgcaagcagtgtgggaaggtgctgagccacagcagcagcttccgcagccacatgatcacccacactggagatggcccccagaagtgcaagatctgtgggaaggccttcggctgccccagcctcttccagagacatgagaggacccacactggagagaagccctaccagtgcaagcagtgtgggaaggccttcagcctggccggcagcctgcggagacatgaggccacccacactggagtgaagccctacaagtgccagtgtgggaaggccttcagtgacctgagcagcttccagaaccacgagaccacccacactggagagaagccctatgagtgcaaggaatgtgggaaggccttcagctgcttcaagtacctgagccagcacaagaggacccacacagtggagaagccctatgagtgcaagacctgcaggaaggccttcagccacttcagcaacctgaaggtgcatgagcgcatccacagcggggagaagccctatgagtgcaaggaatgtgggaaggccttctcctggctgacctgcctgctgcggcatgagcgcatccacactggagagaagccctatgagtgcctgcagtgtgggaaggccttcaccaggagccgcttcctgcggggccacgagaagacccacactggagagaagctgtatgagtgcaaggaatgtgggaaggccctgagcagcctgcggagcctgcaccgccacaagaggacccactggaaggacaccctgtag

SEQ ID NO: 112005 - DNA, 1287 bp, Artificial Sequence
  derived and/or modified sequence
atggccgcccaccacggcgacggcccctacaagtgcaagctgtgcggaaaggcctttgtgtggccttcactgtttcacctgcatgagagaactcacactggtgagaagccctacgaatgtaagcagtgtagcaaagcctttcccttctattcatcttacctgagacatgagcgaatccacaccggtgaaaaggcttacgagtgcaagcagtgctccaaggcattccccgactattccacctacctcaggcacgagcgcactcacacgggagagaagccttacaagtgcactcaatgtgggaaggctttttcttgttattattatacacgattgcatgaacgaacccacacaggtgagcagccctacgcttgcaagcagtgcggcaaaactttctatcaccatacaagttttcggcggcacatgatccggcacaccggtgatgggcctcataagtgcaagatatgtggcaagggatttgactgcccgtctagcgtgcgcaatcatgagacgacccatacaggggagaaaccttacgagtgtaagcagtgcgggaaggtgctttctcacagtagttcttttcgatcccatatgataacacacacaggtgacggaccccagaaatgtaagatctgtggtaaagcctttggctgtccctccttatttcagaggcacgagcgcacacacacaggggagaagccatatcagtgcaaacagtgtggaaaggccttttctctcgcaggctcactcaggcggcatgaagccacccacacaggcgttaaaccgtataagtgtcagtgtgggaaagcctttagcgacctgtctagttttcagaaccacgaaacaacacatactggtgagaagccctatgaatgcaaagaatgcgggaaagccttcagttgctttaagtacctgtctcaacataaacggactcacacagtggagaaaccctacgaatgcaaaacatgtcgaaaggcattttctcactttagcaatctgaaagtgcacgagcgaattcacagcggagagaagccttacgagtgtaaagaatgcgggaaggcattctcttggctgacttgcctgctgcgccacgaacgtatccatactggcgagaagccttacgaatgcctgcagtgcggcaaagcttttacgcgctcgcgcttcctccgcgggcacgagaaaacccatacaggggagaaactgtatgagtgtaaggagtgtggcaaggcccttagctcacttcggtccctgcataggcacaagcggacccactggaaggacaccctgtag

SEQ ID NO: 112006 - DNA, 1287 bp, Artificial Sequence
  derived and/or modified sequence
atggccgctcaccacggggacgggccatacaagtgcaagctgtgcggaaaagcttttgtttggccatctctgttccatcttcatgagcggacccacacaggggaaaagccatacgagtgcaaacagtgcagtaaagcttttcctttctatagcagttatctccgccacgaaaggatccacactggcgagaaggcctacgagtgtaagcaatgtagtaaagcttttcccgattactccacatatttgcgccacgaacgtacccacacgggtgaaaagccttacaaatgcacccagtgtgggaaagcatttagttgttattactatacccgactccacgaacgtacccataccggtgagcaaccgtatgcatgcaagcaatgtggaaaaaccttctaccatcatacaagctttcgtagacacatgatacggcacaccggagacggaccccacaaatgcaagatctgtggaaaggggtttgactgtccttccagtgttcgcaaccacgagacgacccataccggtgagaaaccctacgaatgcaagcagtgcggaaaggttctaagtcactcatccagctttcggtcgcatatgattacgcacactggggacggaccacagaaatgtaagatctgcggaaaggctttcggatgtccctctttgttccagaggcatgaacggacccacacaggcgagaagccctaccagtgcaaacaatgtgggaaagcgttttcactggcaggctcactgcgcaggcacgaggcaactcatacaggggttaaaccctataagtgccagtgcggaaaagcattctcagacctgtcgtcattccaaaatcatgagaccacccacaccggtgaaaaaccgtacgagtgcaaggaatgtggaaaggcattttcctgtttcaagtatcttagtcagcacaagagaacacatactgtggaaaagccctatgaatgcaaaacttgtcgtaaggcgttctctcatttctcaaatctgaaagtgcacgagcgaatccattcaggggagaaaccctacgaatgcaaagaatgtgggaaggcattttcctggctgacatgcctcctccgccacgagaggatccacacaggtgaaaagccctatgaatgcctccagtgtgggaaggccttcacaagaagtagatttctgcgaggtcacgaaaaaacccatactggcgaaaagctgtacgagtgtaaggagtgtggcaaggcactatcttccctgcgtagtctccaccgtcataagaggacacattggaaagatactctttag

SEQ ID NO: 112007 - protein, 484 aa, Artificial Sequence
  derived and/or modified sequence
MNQVVQPLMSRHSACRGSQAHLSWVDKGDLVALSLPAGHGDTDGPISLDVPDGAPDPQRTKAAIDHLHQKILKITEQIKIEQEARDDNVAEYLKLANNADKQQVSRIKQVFEKKNQKSAQTIAQLHKKLEHYRRRLKEIEQNGPSRQPKDVLRDMQQGLKDVGANVRAGISGFGGGVVEGVKGSLSGLSQATHTAVVSKPREFASLIRNKFGSADNIAHLKDPLEDGPPEEAARALSGSATLVSSPKYGSDDECSSASASSAGAGSNSGAGPGGALGSPKSNALYGAPGNLDALLEELREIKEGQSHLEDSMEDLKTQLQRDYTYMTQCLQEERYRYERLEEQLNDLTELHQNEMTNLKQELASMEEKVAYQSYERARDIQEAVESCLTRVTKLELQQQQQQVVQLEGVENANARALLGKFINVILALMAVLLVFVSTIANFITPLMKTRLRITSTTLLVLVLFLLWKHWDSLTYLLEHVLLPS

SEQ ID NO: 112008 - DNA, 1455 bp, Artificial Sequence
  derived and/or modified sequence
atgaaccaggtggtgcagcccctgatgagcagacacagcgcctgcagaggcagccaggcccacctgagctgggtggacaagggcgacctggtggccctgagcctgcccgccggccacggcgacaccgacggccccatcagcctggacgtgcccgacggcgcccccgacccccagagaaccaaggccgccatcgaccacctgcaccagaagatcctgaagatcaccgagcagatcaagatcgagcaggaggccagagacgacaacgtggccgagtacctgaagctggccaacaacgccgacaagcagcaggtgagcagaatcaagcaggtgttcgagaagaagaaccagaagagcgcccagaccatcgcccagctgcacaagaagctggagcactacagaagaagactgaaggagatcgagcagaacggccccagcagacagcccaaggacgtgctgagagacatgcagcagggcctgaaggacgtgggcgccaacgtgagagccggcatcagcggcttcggcggcggcgtggtggagggcgtgaagggcagcctgagcggcctgagccaggccacccacaccgccgtggtgagcaagcccagagagttcgccagcctgatcagaaacaagttcggcagcgccgacaacatcgcccacctgaaggaccccctggaggacggcccccccgaggaggccgccagagccctgagcggcagcgccaccctggtgagcagccccaagtacggcagcgacgacgagtgcagcagcgccagcgccagcagcgccggcgccggcagcaacagcggcgccggccccggcggcgccctgggcagccccaagagcaacgccctgtacggcgcccccggcaacctggacgccctgctggaggagctgagagagatcaaggagggccagagccacctggaggacagcatggaggacctgaagacccagctgcagagagactacacctacatgacccagtgcctgcaggaggagagatacagatacgagagactggaggagcagctgaacgacctgaccgagctgcaccagaacgagatgaccaacctgaagcaggagctggccagcatggaggagaaggtggcctaccagagctacgagagagccagagacatccaggaggccgtggagagctgcctgaccagagtgaccaagctggagctgcagcagcagcagcagcaggtggtgcagctggagggcgtggagaacgccaacgccagagccctgctgggcaagttcatcaacgtgatcctggccctgatggccgtgctgctggtgttcgtgagcaccatcgccaacttcatcacccccctgatgaagaccagactgagaatcaccagcaccaccctgctggtgctggtgctgttcctgctgtggaagcactgggacagcctgacctacctgctggagcacgtgctgctgcccagctag

SEQ ID NO: 112009 - DNA, 771 bp, Artificial Sequence
  derived and/or modified sequence
atgaaccaggtggtgcagcccctgatgagcagacacagcgcctgcagaggcagccaggcccacctgagctggctgtggaccagcgtgcccctgtgctggcccctgaccgagttccccgccggcaccgtgaagatgaagagcaaggaggaggagaccgccgtggacaagggcgacctggtggccctgagcctgcccgccggccacggcgacaccgacggccccatcagcctggacgtgcccgacggcgcccccgacccccagagaaccaaggccgccatcgaccacctgcaccagaagatcctgaagatcaccgagcagatcaagatcgagcaggaggccagagacgacaacgtggccgagtacctgaagctggccaacaacgccgacaagcagcaggtgagcagaatcaagcaggtgttcgagaagaagaaccagaagagcgcccagaccatcgcccagctgcacaagaagctggagcactacagaagaagactgaaggagatcgagcagaacggccccagcagacagcccaaggacgtgctgagagacatgcagcagggcctgaaggacgtgggcgccaacgtgagagccggcatcagcggcttcggcggcggcgtggtggagggcgtgaagggcagcctgagcggcctgagccaggccacccacaccgccgtggtgagcaagcccagagagttcgccagcctgatcagaaacaagttcggcagcgccgacaacatcgcccacctgaaggaccccctggaggacggctag

SEQ ID NO: 112010 - DNA, 1455 bp, Artificial Sequence
  derived and/or modified sequence
atgaatcaggtggtgcagcctttaatgtccaggcactctgcttgtcgcggcagtcaagctcatctcagttgggtggataaaggagatctcgtggccctgtctcttccagccgggcacggtgacacagacggcccaataagcctggacgtccccgacggagcccccgacccgcaaagaactaaggctgctattgaccatctccaccagaagatacttaagatcacagagcagatcaaaatcgagcaggaggcacgggacgacaatgttgcggaatacctgaagctggccaacaacgcggacaaacagcaggtgagccgtatcaaacaggtgtttgaaaaaaagaaccagaagtcggctcagacaattgctcagctccataagaagctcgagcactaccggaggaggctcaaagagattgagcaaaacgggcctagtcggcagcctaaagatgttctccgcgatatgcagcaggggctcaaagatgtgggtgccaatgtccgggcaggaatttcgggcttcggtggaggagtcgtagagggagtgaaaggctctctaagtggattatcccaggccacccacacagctgttgtctctaaacctagagaattcgcatcactcataagaaataagttcggttctgctgacaatatcgcccacctgaaggacccgcttgaagatgggccacccgaagaagcggcccgagccctgagtgggtccgccaccctggtatcatccccaaaatacggtagtgatgacgagtgcagtagcgcctccgccagctcagccggagcaggttcaaacagcggggccggaccaggtggcgccctcggatccccaaaaagtaatgccctgtacggcgctccaggcaacctggatgcactgctcgaagaactccgggagattaaagaaggacagagccaccttgaagactccatggaggatctcaaaacccagctgcaaagagactacacatacatgactcaatgcctccaggaggaacgttatcgatacgagaggcttgaggagcagctcaacgatttaaccgagctccatcagaatgaaatgacaaatctcaaacaggagctggctagtatggaagagaaggtggcgtaccagtcttatgaacgggctagagatatacaggaagccgtcgaatcctgccttacccgcgtgaccaaactcgagcttcagcaacagcagcagcaggtggtacagctggaaggcgtcgaaaatgcaaatgcacgggcactgctggggaaatttatcaacgttattctggctcttatggccgtgttacttgttttcgtgagcacaatagctaatttcatcactccgctgatgaagacccggctgcggatcacctctacaacactcttggttctcgtgctctttctgctgtggaaacactgggactctctcacctacttactcgagcacgtcttacttccaagctag

SEQ ID NO: 112011 - DNA, 771 bp, Artificial Sequence
  derived and/or modified sequence
atgaaccaggttgtgcagcccctgatgagtcggcactcagcttgcaggggaagccaggcacacctgagttggttgtggacgagcgtacctctgtgctggcctctgacggagtttcccgctggcacagtaaagatgaagagtaaggaggaagagacagccgttgataaaggcgatctggtggctttgtctctcccggccggacatggcgatactgatggacctatttccctggacgtgcccgacggcgctccagatccgcaaaggactaaggctgcgatagatcatctgcatcagaaaatcttgaagattacagaacagatcaagatagaacaggaagccagggatgataacgtggccgagtatcttaaactcgctaataacgccgacaaacagcaggtgtctcgaataaaacaggttttcgagaaaaaaaatcaaaaatctgcgcagaccatcgcacagttacacaagaaacttgagcactatcgacggcgcctgaaggaaattgagcaaaatggaccctcacggcagccgaaggatgtgctgagggacatgcagcagggactgaaagatgtgggcgctaatgtccgggccggcatcagtgggtttgggggtggggtagtggagggagtgaaaggttctttgagcggcctgtcacaggcaactcatactgcagtcgtcagtaagccccgggagtttgctagcttgatacgcaacaaatttggaagcgctgacaacatcgcacacctcaaagacccactcgaggacggatag

SEQ ID NO: 112012 - DNA, 1455 bp, Artificial Sequence
  derived and/or modified sequence
atgaaccaggtggtgcagcccctgatgagccgccacagcgcctgccggggcagccaggcccacctgtcctgggtggacaagggggacctggtggccctgagcctgcctgctggccatggagacacagatggccccatcagcctggatgtgcctgatggagccccagacccccagaggaccaaggccgccatcgaccacctgcaccagaagatcctgaagatcacagagcagatcaagattgagcaggaggccagagatgacaacgtggccgagtacctgaagctggccaacaatgctgacaagcagcaggtgagccgcatcaagcaggtgtttgagaagaagaaccagaagagcgcccagaccatcgcccagctgcacaagaagctggagcactacagaagaaggctgaaggagattgagcagaatggccccagccggcagcccaaggatgtgctgcgggacatgcagcagggcctgaaggatgtgggcgccaacgtgcgggccggcatcagcggctttggaggcggcgtggtggagggcgtgaagggcagcctgagcggcctgagccaggccacccacacagctgtggtgtccaagccccgggagtttgccagcctcatccggaacaagtttggatctgctgacaacatcgcccacctgaaggaccccctggaggatggccccccagaggaggccgcccgggccctgagcggcagcgccaccctggtgagcagccccaagtatggcagtgatgatgaatgtagcagcgccagcgccagcagcgctggggccggcagcaacagcggggccggccctgggggcgccctgggcagccccaagagcaatgccctgtatggagcccctggcaacctggatgccctgctggaggagctgcgggagatcaaggagggccagagccacctggaggacagcatggaggacctgaagacccagctgcagagggactacacctacatgacccagtgcctgcaggaggagcgctaccgctatgagcggctggaggagcagctgaatgacctgacagagctgcaccagaatgagatgaccaacctgaagcaggagctggcctccatggaggagaaggtggcctaccagagctatgaaagagcccgggacatccaggaggccgtggagagctgcctgaccagggtgaccaagctggagctgcagcagcagcagcagcaggtggtgcagctggagggcgtggagaatgccaatgcccgggccctgctgggcaagttcatcaacgtcatcctggccctgatggctgtgctgctggtgtttgtgtccaccatcgccaacttcatcacccccctgatgaagacccggctgcgcatcaccagcaccaccctgctggtgctggtgctcttcctgctgtggaagcactgggacagcctgacctacctgctggagcacgtgctgctgcccagctag

SEQ ID NO: 112013 - DNA, 771 bp, Artificial Sequence
  derived and/or modified sequence
atgaaccaggtggtgcagcccctgatgagccgccacagcgcctgccggggcagccaggcccacctgtcctggctgtggacctctgtgcccctgtgctggcccctgacagagttccctgctggcaccgtgaagatgaagagcaaggaggaggagacagctgtggacaagggggacctggtggccctgagcctgcctgctggccacggggacacagatggccccatcagcctggatgtgcctgatggagccccagacccccagaggaccaaggccgccatcgaccacctgcaccagaagatcctgaagatcacagagcagatcaagattgagcaggaggccagagatgacaacgtggccgagtacctgaagctggccaacaatgctgacaagcagcaggtgagccgcatcaagcaggtgtttgagaagaagaaccagaagagcgcccagaccatcgcccagctgcacaagaagctggagcactacagaagaaggctgaaggagattgagcagaatggccccagccggcagcccaaggatgtgctgcgggacatgcagcagggcctgaaggatgtgggcgccaacgtgcgggccggcatcagcggctttggaggaggagtggtggagggcgtgaagggcagcctgagcggcctgagccaggccacccacacagctgtggtgtccaagccccgggagtttgccagcctcatccggaacaagtttggcagcgctgacaacatcgcccacctgaaggaccccctggaggatggatag

SEQ ID NO: 112014 - DNA, 1455 bp, Artificial Sequence
  derived and/or modified sequence
atgaaccaggtggtgcagcccctgatgagccggcacagcgcctgcaggggaagccaggcccatctgtcgtgggttgacaaaggcgacctggtcgcgctttccctgcctgcaggacacggggacactgacgggcccatttctctggacgtgccagacggggctcccgacccccagaggacaaaggcagcaattgatcacctccatcagaagatccttaaaatcaccgaacaaattaaaatcgaacaagaggctcgggacgacaacgtcgcagaatacttaaaattggcaaataacgcagacaaacagcaagtatccagaatcaagcaagtgttcgaaaagaagaaccagaaatctgcgcaaactattgctcagctgcacaagaagctcgagcactatcggaggcgcttgaaagagattgagcagaatggtcctagcaggcagcccaaagacgtgttacgggatatgcagcagggcttgaaggatgtgggagccaacgttcgggctggcatcagtggcttcggtggcggagtggtggaaggtgtcaagggatccctgtcaggactgtcacaggctacacatacagccgtggtgtccaaacctcgggagtttgcaagccttataaggaataaatttggctcggcagataatatcgctcaccttaaggatccgttagaggacggccctcccgaagaagccgcaagggctttgagtggtagtgcgacactggtgtccagtcccaaatatggttccgatgacgagtgttctagcgccagtgcgtctagtgcgggcgctggctctaactctggtgccgggcctggcggcgccctggggtcgcccaagagcaacgcactttacggtgcccccgggaacctcgacgcgcttttagaagaactgagagaaataaaagaaggtcaaagtcacttggaagattctatggaagaccttaaaacacagctgcagagagactacacatacatgacgcagtgccttcaggaagagcgctaccggtacgagcgtttggaagagcagttaaacgatttaaccgaattgcatcagaacgagatgacaaatttaaagcaggagcttgcgtccatggaggagaaggttgcatatcagagctacgaaagagccagagacatccaagaagcagtggagtcatgcctgactagggttacaaagctcgagctacagcagcagcagcagcaagtggtgcaattggaaggagtggagaacgcaaacgccagggccctgctgggtaagtttataaacgtcatcctggcactgatggccgttcttctcgtgttcgtgagcaccatcgcaaatttcatcacgcctctaatgaagaccagactcaggattaccagcacaaccctgcttgtgttggtgctgtttcttttgtggaagcattgggatagcctgacgtatttgttggagcacgtgcttctgcctagctag

SEQ ID NO: 112015 - DNA, 771 bp, Artificial Sequence
  derived and/or modified sequence
atgaaccaggtggtgcagcccctgatgagccggcacagcgcctgccgggggagtcaagcacacctgtcatggctgtggacatccgtcccgttgtgttggcctcttactgaatttcctgctggcacagtgaagatgaaatctaaggaggaagaaactgccgtcgataaaggcgacctggtggctctctctttaccagccggccatggggacactgacggccctatttcattggacgtgccagatggggcacccgacccccaacgaaccaaagcggctatagaccacttacaccagaaaatcctgaagattacggaacagattaaaatcgaacaggaagcgcgagacgacaacgtagccgaatatttgaaacttgccaataacgctgataagcagcaggtgagccggataaaacaggtgtttgaaaagaaaaaccagaaaagcgcacagaccattgctcagttgcacaagaaactggagcattacaggcgtcggctgaaggaaatcgaacagaatggaccctcacggcaacctaaggacgtgttgagagacatgcagcaaggtttaaaggacgtaggagcaaatgtgagagcaggaatctccggctttgggggaggcgttgtggagggggtgaaaggatctctgagcgggctgtcccaagccactcacactgctgtggtgagtaagccccgtgaatttgcgagtctgattagaaataaatttggatccgcggacaacattgcccatctgaaggatccactggaggatggctag

SEQ ID NO: 112016 - DNA, 1455 bp, Artificial Sequence
  derived and/or modified sequence
atgaatcaagtcgttcagccactgatgtcacggcactcagcttgcagagggagccaggcgcatctttcctgggtggataagggggatttggttgccctatcgttgcctgccggacacggcgataccgatggacccatctcacttgacgtccccgatggcgcaccagaccctcagaggaccaaggctgccattgatcatctgcaccagaagatcctgaagattacggaacagatcaagattgaacaggaagctcgggacgacaatgtggccgaatacctcaagcttgccaacaacgctgataagcagcaggtgtccagaattaaacaggtgtttgagaaaaagaaccagaaatcagctcagaccattgcacagctacacaagaaactcgagcattacaggcgcaggctcaaggaaattgagcagaatggcccaagtcggcaacccaaggacgtgctccgagatatgcagcagggcttaaaggacgtcggtgctaatgtgcgggcaggcatatctggattcggcggaggggttgtggagggtgtcaaggggtctctctccggtttatctcaagctacgcatacagctgtggtgtcaaagccacgcgagttcgcttccctaattcgcaacaagttcggaagtgctgacaacattgctcaccttaaagacccactcgaggacggtcctccggaggaggccgcaagagcattgagtgggagcgcaacccttgtaagcagcccaaagtacggcagcgacgatgagtgtagttccgcttccgcaagttctgccggtgctggctcaaactctggggcaggacctggcggtgctctggggagtcctaaatccaacgcactttacggcgctcccggaaatttggatgcccttctggaggagctgcgggagattaaagaaggacagtcacacttggaggatagtatggaagacctgaagacacagttgcagagagactatacatacatgacccagtgtcttcaggaggagaggtataggtatgaacgccttgaggaacagctcaatgacctgacagaactgcaccagaacgaaatgaccaatctcaaacaggagctagctagtatggaagagaaagtggcctaccagtcttatgaaagagcccgtgatattcaggaggccgtggaaagctgtcttacccgggtaaccaagctcgaactgcagcagcagcaacagcaggtggtgcagctggaaggagttgaaaatgctaatgcaagagcgctgctgggaaagtttatcaatgtaattctcgcgttaatggctgttctgctagtcttcgtttccaccatcgccaacttcatcacacccttgatgaagacacgacttagaattaccagcactacgctgctggtgctggtgctgtttttgctgtggaagcactgggatagcctaacctacctcctcgagcacgtcctccttccctcttag

SEQ ID NO: 112017 - DNA, 771 bp, Artificial Sequence
  derived and/or modified sequence
atgaaccaggtggtgcaaccactgatgtcgcggcattccgcctgtaggggatcccaggcccacctgtcctggttgtggacgtcagtgcccctctgctggccgcttaccgagttcccggctggcaccgtgaagatgaagagcaaagaagaggagacagcggtggataaaggagaccttgtcgcgttatctctgccagccggtcacggggatactgatggtccgattagcttggacgtccccgacggcgctcctgacccccagcggaccaaagctgccattgaccacctgcatcagaagattctcaaaatcacagagcagatcaaaatcgagcaagaggctcgtgacgacaacgttgccgagtacctgaagctggcgaataacgctgacaagcagcaagtgtcccggattaaacaggtattcgaaaagaagaatcagaaatccgcacagacaatcgcccaactgcacaaaaaactggaacactaccgcagacgacttaaagagatagagcaaaatggcccaagccggcaaccaaaggatgtgctgagagacatgcaacagggactcaaggacgttggggcaaacgtgagggcaggtatttctggcttcggcggaggtgtggtcgaaggagtgaaggggtctctctccggactcagccaggccacgcacacagcagtggtgtctaagcccagggagttcgcgtccttaatcaggaataagttcggctcagcggataatatagcccatctcaaagatcccctggaggacggatag

SEQ ID NO: 112018 - DNA, 2674 bp, Artificial Sequence
  derived and/or modified sequence
atgaaccaggttgttcagcccttaatgagcagacactctgcatgtagaggcagccaggcccacctctcatgggtcgataagggagacctggtggccctgagcctccccgccggccatggtgacaccgacggccccatcagcctggacgtgcccgatggggcaccggacccccagcggaccaaggccgccattgaccacctgcaccagaagatcctgaagatcaccgagcagatcaagattgagcaggaggctcgcgacgacaatgtggcagagtatctgaaactggccaacaacgcggacaagcagcaggtgtcacgcatcaagcaagtgttcgagaagaagaaccagaagtcagcccagaccatcgcccagctgcacaagaagctggagcactaccgccggcgcctgaaggagattgagcagaacgggccctcgcggcagcccaaggacgtgctgcgggacatgcagcaggggctgaaggacgtgggcgccaacgtgcgcgcaggcatcagcggctttgggggcggcgtggtggagggcgtcaagggcagcctctctggcctctcacaggccacccacaccgccgtggtgtccaagccccgggagtttgccagcctcatccgcaacaagtttggcagtgctgacaacatcgcccacctgaaggaccccctggaagatgggccccctgaggaggcagcccgggcactgagcggcagtgccacactcgtctccagccccaagtatggcagcgatgatgagtgctccagcgccagcgccagctcagccggggcaggcagcaactctggggctgggcctggtggggcgctggggagccctaagtccaatgcactgtatggtgctcctggaaacctggatgctctgctggaagagctacgggagatcaaggagggacagtctcacctggaggactccatggaagacctgaagactcagctgcagagggactacacctacatgacccagtgcctgcaggaggagcgctacaggtacgagcggctggaggagcagctcaacgacctgactgagcttcatcagaacgagatgacgaacctgaagcaggagctggccagcatggaggagaaggtggcctaccagtcctatgagagggcacgggacatccaggaggccgtggagtcctgcctgacccgggtcaccaagctggagctgcagcagcaacagcagcaggtggtacagctggagggcgtggagaatgccaacgcgcgggcgctgctgggcaagttcatcaacgtgatcctggcgctcatggccgtgctgctggtgttcgtgtccaccatcgccaacttcatcacgcccctcatgaagacacgcctgcgcatcaccagcaccaccctcctggtcctcgtcctgttcctcctctggaagcactgggactccctcacctacctcctggagcacgtgttgctgcccagctgagtggccagccacaccaaccctgtgctctctggcccccagctggccacacttctccaggagggacccttggacttctttgtgtgtccagtttggcctcctgcccaaactgtccattccagcagctcctgcccccttctctgtacttgcttctgtctgacaccttctccctgttggcctgaagggagcttagaatgcagccctacctggagatagtgcgggcacctgtggccaagtggagcagaggtggacatggggttggattgttttgattatttatagttacacaaggacttctcccagctgaccctcaggatgccccaagtcaggaagaccattaagaataggaggagagggctctgcctcaactttcctaggaaagagcccacctcggagatagctacggttttctctggtggagatggtgaggatgaaggctggagagtgagggaggaggctctgctggccgcagagaacacagggatgggagggtccctagccttcgggcacctccagggccagagagcaggctcagagcagctagtgtggagctcagcatccccaccccacccctcctccctgtagagctgatttgaggcctccttctggggctgggctctgcaggccaggtgggtgtggcctgtgttttcccttctgttctttctgcctgtactggatctgttattttcagggaaacaggccccagggcccccctgagcctcaccctaagcccttaggcctctgagagtgctgttgggttctatttatttatttatttgttcctttgttccctacccgtgcccccagtgtcttccctgctgagtaccaggagaggtcctgccccatcctctctctgaagccagggcccttccattccatttagcctttggatcatcctggctgggagaagtgggaccgagccacccagccccactatccccaagcagccctacagccgggatgggaggcacgtggcctctcttttatccgtctatttattttgtaagtgtattcgtgtggaggaggttgttgctttatttttttaaggctctggagtgttgtgtatggtttcttttcacatcccagcctcccatgggcacttctaagaagagaggggatttcttggaaaaggagagaggaatcccctagagcagggaaagcagtgcctgccagctgttgtgcaccttcctgagaaataaatatcctctaaattttcaaacca

SEQ ID NO: 112019 - DNA, 892 bp, Artificial Sequence
  derived and/or modified sequence
tgaaccatttgcaagcctagcctccactggggagaagtctgttctcagagtgaggagctctgcacgcgttggctaaaagggtggcgtggctttgtgaaattgagagctggaggagcccagcagaatgaaccaggttgttcagcccttaatgagcagacactctgcatgtagaggcagccaggcccacctctcatggctgtggacctctgtccccctctgctggccactcacagaatttcctgctggcactgtcaagatgaagtccaaggaggaagagactgctgtcgataagggagacctggtggccctgagcctccccgccggccatggtgacaccgacggccccatcagcctggacgtgcccgatggggcaccggacccccagcggaccaaggccgccattgaccacctgcaccagaagatcctgaagatcaccgagcagatcaagattgagcaggaggctcgcgacgacaatgtggcagagtatctgaaactggccaacaacgcggacaagcagcaggtgtcacgcatcaagcaagtgttcgagaagaagaaccagaagtcagcccagaccatcgcccagctgcacaagaagctggagcactaccgccggcgcctgaaggagattgagcagaacgggccctcgcggcagcccaaggacgtgctgcgggacatgcagcaggggctgaaggacgtgggcgccaacgtgcgcgcaggcatcagcggctttgggggcggcgtggtggagggcgtcaagggcagcctctctggcctctcacaggccacccacaccgccgtggtgtccaagccccgggagtttgccagcctcatccgcaacaagtttggcagtgctgacaacatcgcccacctgaaggaccccctggaagatggg

SEQ ID NO: 112020 - protein, 469 aa, Artificial Sequence
  derived and/or modified sequence
MKSKEEETAVDKGDLVALSLPAGHGDTDGPISLDVPDGAPDPQRTKAAIDHLHQKILKITEQIKIEQEARDDNVAEYLKLANNADKQQVSRIKQVFEKKNQKSAQTIAQLHKKLEHYRRRLKEIEQNGPSRQPKDVLRDMQQGLKDVGANVRAGISGFGGGVVEGVKGSLSGLSQATHTAVVSKPREFASLIRNKFGSADNIAHLKDPLEDGPPEEAARALSGSATLVSSPKYGSDDECSSASASSAGAGSNSGAGPGGALGSPKSNALYGAPGNLDALLEELREIKEGQSHLEDSMEDLKTQLQRDYTYMTQCLQEERYRYERLEEQLNDLTELHQNEMTNLKQELASMEEKVAYQSYERARDIQEAVESCLTRVTKLELQQQQQQVVQLEGVENANARALLGKFINVILALMAVLLVFVSTIANFITPLMKTRLRITSTTLLVLVLFLLWKHWDSLTYLLEHVLLPS

SEQ ID NO: 112021 - protein, 256 aa, Artificial Sequence
  derived and/or modified sequence
MNQVVQPLMSRHSACRGSQAHLSWLWTSVPLCWPLTEFPAGTVKMKSKEEETAVDKGDLVALSLPAGHGDTDGPISLDVPDGAPDPQRTKAAIDHLHQKILKITEQIKIEQEARDDNVAEYLKLANNADKQQVSRIKQVFEKKNQKSAQTIAQLHKKLEHYRRRLKEIEQNGPSRQPKDVLRDMQQGLKDVGANVRAGISGFGGGVVEGVKGSLSGLSQATHTAVVSKPREFASLIRNKFGSADNIAHLKDPLEDG

SEQ ID NO: 112022 - DNA, 1410 bp, Artificial Sequence
  derived and/or modified sequence
atgaagagcaaggaggaggagaccgccgtggacaagggcgacctggtggccctgagcctgcccgccggccacggcgacaccgacggccccatcagcctggacgtgcccgacggcgcccccgacccccagagaaccaaggccgccatcgaccacctgcaccagaagatcctgaagatcaccgagcagatcaagatcgagcaggaggccagagacgacaacgtggccgagtacctgaagctggccaacaacgccgacaagcagcaggtgagcagaatcaagcaggtgttcgagaagaagaaccagaagagcgcccagaccatcgcccagctgcacaagaagctggagcactacagaagaagactgaaggagatcgagcagaacggccccagcagacagcccaaggacgtgctgagagacatgcagcagggcctgaaggacgtgggcgccaacgtgagagccggcatcagcggcttcggcggcggcgtggtggagggcgtgaagggcagcctgagcggcctgagccaggccacccacaccgccgtggtgagcaagcccagagagttcgccagcctgatcagaaacaagttcggcagcgccgacaacatcgcccacctgaaggaccccctggaggacggcccccccgaggaggccgccagagccctgagcggcagcgccaccctggtgagcagccccaagtacggcagcgacgacgagtgcagcagcgccagcgccagcagcgccggcgccggcagcaacagcggcgccggccccggcggcgccctgggcagccccaagagcaacgccctgtacggcgcccccggcaacctggacgccctgctggaggagctgagagagatcaaggagggccagagccacctggaggacagcatggaggacctgaagacccagctgcagagagactacacctacatgacccagtgcctgcaggaggagagatacagatacgagagactggaggagcagctgaacgacctgaccgagctgcaccagaacgagatgaccaacctgaagcaggagctggccagcatggaggagaaggtggcctaccagagctacgagagagccagagacatccaggaggccgtggagagctgcctgaccagagtgaccaagctggagctgcagcagcagcagcagcaggtggtgcagctggagggcgtggagaacgccaacgccagagccctgctgggcaagttcatcaacgtgatcctggccctgatggccgtgctgctggtgttcgtgagcaccatcgccaacttcatcacccccctgatgaagaccagactgagaatcaccagcaccaccctgctggtgctggtgctgttcctgctgtggaagcactgggacagcctgacctacctgctggagcacgtgctgctgcccagctag

SEQ ID NO: 112023 - DNA, 1410 bp, Artificial Sequence
  derived and/or modified sequence
atgaagtcaaaagaggaggagacagctgtggataaaggggatctagtagctctatccctacccgcaggtcacggagatactgatggccccatcagcttggacgtgcccgatggcgctccggacccccagcggaccaaagctgcaatagatcatctccaccagaagattttgaagatcacagagcaaataaagattgagcaggaagcccgcgatgataacgtggctgaatatttgaaactggcgaacaacgccgataaacaacaggtgtcaaggatcaaacaggtgtttgaaaagaagaaccagaaatccgcacaaacaattgcacagctgcacaaaaagctcgagcactacagacggagactcaaggagatcgagcagaacggtccatccagacagccgaaggatgtgctgcgcgacatgcagcagggcctcaaggatgtcggcgctaacgtacgcgccggcatttccggattcggcggaggggtagtcgagggggttaaaggtagcctcagcggcctgtcacaagccactcatacggccgtagtgtccaagccaagagagttcgcctcacttatccgtaataagtttggatccgccgataacatagctcacctcaaagatccacttgaggacggtccaccagaggaggctgcccgggctctgtccgggtccgcaaccctggtcagctcccccaagtacggtagcgacgatgagtgcagctctgctagtgcttcttcagcaggagcaggttcaaattcaggcgctggccccgggggcgcacttggtagccccaagagcaacgccctgtacggagctcccggcaatctggatgctttgttggaggagcttcgagagatcaaggaaggccagtctcacctggaggatagtatggaggatctgaaaacacaactgcagcgggattacacatacatgacccagtgtcttcaggaggagaggtacagatatgaacgcttagaagaacagttaaacgacctcaccgagctccaccagaatgagatgacaaatctgaagcaagagttggcaagtatggaagagaaggttgcttatcagagttacgaaagggccagagacatacaagaggccgtggaatcttgtctgacaagggtcaccaagttggaactgcagcagcaacagcaacaggtcgtgcagctggaaggggtcgagaacgctaacgccagagcactattgggcaagttcatcaatgtcatccttgccctaatggccgtgttactggtgttcgtctccaccatcgcaaacttcattaccccgcttatgaagacacggctgagaatcacctctaccacattgctcgtactggtcctctttctgctgtggaagcactgggatagcctcacttatctgctcgaacacgtcctcctgcctagttag

SEQ ID NO: 112024 - DNA, 1410 bp, Artificial Sequence
  derived and/or modified sequence
atgaagagcaaggaggaggagacagctgtggacaagggggacctggtggccctgagcctgcctgctggccacggggacacagatggccccatcagcctggatgtgcctgatggagccccagacccccagaggaccaaggccgccatcgaccacctgcaccagaagatcctgaagatcacagagcagatcaagattgagcaggaggccagagatgacaacgtggccgagtacctgaagctggccaacaatgctgacaagcagcaggtgagccgcatcaagcaggtgtttgagaagaagaaccagaagagcgcccagaccatcgcccagctgcacaagaagctggagcactacagaagaaggctgaaggagattgagcagaatggccccagccggcagcccaaggatgtgctgcgggacatgcagcagggcctgaaggatgtgggcgccaacgtgcgggccggcatcagcggctttggaggaggagtggtggagggcgtgaagggcagcctgagcggcctgagccaggccacccacacagctgtggtgtccaagccccgggagtttgccagcctcatccggaacaagtttggcagcgctgacaacatcgcccacctgaaggaccccctggaggatggccccccagaggaggccgcccgggccctgagcggcagcgccaccctggtgagcagccccaagtatggcagtgatgatgagtgcagcagcgccagcgccagcagcgctggagctggcagcaacagcggggccggccctggaggagccctgggcagccccaagagcaatgccctgtatggagcccctggcaacctggatgccctgctggaggagctgcgggagatcaaggagggccagagccacctggaggacagcatggaggacctgaagacccagctgcagagggactacacctacatgacccagtgcctgcaggaggagcgctaccgctatgaaaggctggaggagcagctgaatgacctgacagagctgcaccagaatgagatgaccaacctgaagcaggagctggcctccatggaggagaaggtggcctaccagagctatgagcgggcccgggacatccaggaggccgtggagagctgcctgaccagggtgaccaagctggagctgcagcagcagcagcagcaggtggtgcagctggagggcgtggagaatgccaatgcccgggccctgctgggcaagttcatcaacgtcatcctggccctgatggctgtgctgctggtgtttgtgtccaccatcgccaacttcatcacccccctgatgaagacccggctgcgcatcaccagcaccaccctgctggtgctggtgctcttcctgctgtggaagcactgggacagcctgacctacctgctggagcacgtgctgctgcccagctag

SEQ ID NO: 112025 - DNA, 1410 bp, Artificial Sequence
  derived and/or modified sequence
atgaagagcaaggaggaggagaccgccgtggacaagggcgacctggtcgctctcagcttgcctgccggccacggagacaccgacggtcccatctcattggatgtgcccgatggagcccccgacccacaacgaactaaagccgctatcgaccacctgcaccaaaagattctgaagatcacagaacagatcaaaatcgagcaggaggcccgggacgacaatgtcgccgaatatctgaagctggctaacaatgccgacaaacagcaggtatcccgcattaagcaggtcttcgagaagaagaatcagaagagtgcacaaacaatcgcccagctgcataaaaaactggaacactatcgccgtcggctgaaagagattgaacagaatggaccatcgaggcagccaaaggatgttttacgtgacatgcaacagggtttgaaggatgtgggggccaacgtaagggcggggatcagcggcttcggcggaggagtggtcgaaggggttaaggggagcctgagtggcctgtcccaggctacccacacagctgtagtgtctaaaccaagggagtttgcctctttgatccgaaacaagttcggtagtgccgacaacatagcccacctgaaagatccacttgaagatggtcctccagaagaggctgcccgggctttaagtggaagtgctaccttggttagttctccaaaatatggcagcgacgatgagtgttcgagtgctagtgcatcctccgcaggagcggggagcaactccggagcgggtcctggcggagcgctcggatcgcctaagagtaatgccttgtacggggctcctggaaacctcgacgccctcctcgaagagctccgggaaatcaaggaaggccagagccacctggaggattccatggaggatttgaagactcaactacagagagattatacttatatgacccagtgtctccaggaggagagatacaggtatgaaaggctcgaagagcaattgaatgacctgactgaactccatcagaatgaaatgacgaatctgaagcaagagttggccagcatggaagagaaggtggcttatcaatcatacgagcgggcacgcgatatccaagaagcagttgagtcctgtctcacacgggtgactaaactggagctccaacagcagcagcagcaggtcgtgcagcttgaaggtgtggaaaatgccaacgcgcgggcgttattggggaagtttatcaacgtgatcctggccctaatggcagtgctcctcgtatttgtgtctacaatcgctaactttatcaccccccttatgaaaacccggctcagaatcacatctacaaccctgctcgtgctcgtgctctttctcttgtggaagcactgggacagccttacctacctgctggaacacgtgctgctgccaagttag

SEQ ID NO: 112026 - DNA, 1410 bp, Artificial Sequence
  derived and/or modified sequence
atgaagagcaaggaggaggagacggctgttgacaagggggatctggtggctcttagcctgcccgctggtcatggcgacacagacgggccaatatctctcgacgtgcctgacggggcaccagatccccaacgcactaaggccgctatcgatcacctgcatcagaaaattctgaagattaccgaacagatcaaaatcgagcaggaggctagagacgacaatgtggctgagtatttaaagctggccaataatgcagacaaacaacaagtgagtaggatcaagcaggtgttcgaaaaaaaaaatcagaaatcagcacaaactattgcgcagctccacaagaaattagagcactatcgcagacgattgaaggaaatcgagcagaatggaccatcgagacagccaaaagatgtattgagagacatgcagcagggattaaaggacgttggggctaatgttcgcgcaggcatcagtggcttcggcggaggggtcgttgagggggtgaaggggagcctgagcggtctttctcaggcaactcatactgccgtggtgtctaagcccagagaatttgcatccctgatacgcaataaattcgggtcggccgacaacatcgctcacctcaaggatccacttgaagatggtccacctgaggaagctgcacgcgcattgtcaggatcagcgactctggtatcttcccctaagtacggatcagacgacgagtgcagctccgctagcgcgagctcagcaggcgcaggaagcaattccggggcagggccaggcggagcgctggggagtcctaagagtaacgccttgtatggcgctcctggtaatctggatgccctgctagaagaacttcgcgagatcaaggaggggcagtcccacctggaggatagcatggaggatttgaaaacacaattacagagagactatacttatatgactcaatgtctgcaagaagagcggtaccggtacgaaagactggaagagcaactgaatgacctcacagagcttcaccagaatgagatgactaatcttaaacaggaactggcctcaatggaagaaaaagtcgcttatcagtcttatgagagagctagggatatccaagaagctgtcgaatcttgcctaacccgcgtcacgaaacttgagcttcagcaacaacagcagcaggttgtgcagctggagggcgttgagaacgctaacgctagagctctcctgggcaaatttatcaatgttatactcgcattaatggcagtgctacttgtgtttgtctcgaccatcgctaatttcatcacgcctctgatgaagaccagattgcgaattaccagtactacactattggttctggtgttatttctcctgtggaaacattgggattctttgacgtatttgctagagcatgtgctgctgcccagctag

SEQ ID NO: 112027 - DNA, 2818 bp, Artificial Sequence
  derived and/or modified sequence
aagtgggtgcagaatccatgtctttctgaacgacagttctgctgtgagaagctgccattagagagatccagcaggccccaggactcagctggccagccggtgacactgctcactgctcattgtcctcagctgtggacctctgtccccctctgctggccactcacagaatttcctgctggcactgtcaagatgaagtccaaggaggaagagactgctgtcgataagggagacctggtggccctgagcctccccgccggccatggtgacaccgacggccccatcagcctggacgtgcccgatggggcaccggacccccagcggaccaaggccgccattgaccacctgcaccagaagatcctgaagatcaccgagcagatcaagattgagcaggaggctcgcgacgacaatgtggcagagtatctgaaactggccaacaacgcggacaagcagcaggtgtcacgcatcaagcaagtgttcgagaagaagaaccagaagtcagcccagaccatcgcccagctgcacaagaagctggagcactaccgccggcgcctgaaggagattgagcagaacgggccctcgcggcagcccaaggacgtgctgcgggacatgcagcaggggctgaaggacgtgggcgccaacgtgcgcgcaggcatcagcggctttgggggcggcgtggtggagggcgtcaagggcagcctctctggcctctcacaggccacccacaccgccgtggtgtccaagccccgggagtttgccagcctcatccgcaacaagtttggcagtgctgacaacatcgcccacctgaaggaccccctggaagatgggccccctgaggaggcagcccgggcactgagcggcagtgccacactcgtctccagccccaagtatggcagcgatgatgagtgctccagcgccagcgccagctcagccggggcaggcagcaactctggggctgggcctggtggggcgctggggagccctaagtccaatgcactgtatggtgctcctggaaacctggatgctctgctggaagagctacgggagatcaaggagggacagtctcacctggaggactccatggaagacctgaagactcagctgcagagggactacacctacatgacccagtgcctgcaggaggagcgctacaggtacgagcggctggaggagcagctcaacgacctgactgagcttcatcagaacgagatgacgaacctgaagcaggagctggccagcatggaggagaaggtggcctaccagtcctatgagagggcacgggacatccaggaggccgtggagtcctgcctgacccgggtcaccaagctggagctgcagcagcaacagcagcaggtggtacagctggagggcgtggagaatgccaacgcgcgggcgctgctgggcaagttcatcaacgtgatcctggcgctcatggccgtgctgctggtgttcgtgtccaccatcgccaacttcatcacgcccctcatgaagacacgcctgcgcatcaccagcaccaccctcctggtcctcgtcctgttcctcctctggaagcactgggactccctcacctacctcctggagcacgtgttgctgcccagctgagtggccagccacaccaaccctgtgctctctggcccccagctggccacacttctccaggagggacccttggacttctttgtgtgtccagtttggcctcctgcccaaactgtccattccagcagctcctgcccccttctctgtacttgcttctgtctgacaccttctccctgttggcctgaagggagcttagaatgcagccctacctggagatagtgcgggcacctgtggccaagtggagcagaggtggacatggggttggattgttttgattatttatagttacacaaggacttctcccagctgaccctcaggatgccccaagtcaggaagaccattaagaataggaggagagggctctgcctcaactttcctaggaaagagcccacctcggagatagctacggttttctctggtggagatggtgaggatgaaggctggagagtgagggaggaggctctgctggccgcagagaacacagggatgggagggtccctagccttcgggcacctccagggccagagagcaggctcagagcagctagtgtggagctcagcatccccaccccacccctcctccctgtagagctgatttgaggcctccttctggggctgggctctgcaggccaggtgggtgtggcctgtgttttcccttctgttctttctgcctgtactggatctgttattttcagggaaacaggccccagggcccccctgagcctcaccctaagcccttaggcctctgagagtgctgttgggttctatttatttatttatttgttcctttgttccctacccgtgcccccagtgtcttccctgctgagtaccaggagaggtcctgccccatcctctctctgaagccagggcccttccattccatttagcctttggatcatcctggctgggagaagtgggaccgagccacccagccccactatccccaagcagccctacagccgggatgggaggcacgtggcctctcttttatccgtctatttattttgtaagtgtattcgtgtggaggaggttgttgctttatttttttaaggctctggagtgttgtgtatggtttcttttcacatcccagcctcccatgggcacttctaagaagagaggggatttcttggaaaaggagagaggaatcccctagagcagggaaagcagtgcctgccagctgttgtgcaccttcctgagaaataaatatcctctaaattttcaaacca

SEQ ID NO: 112028 - protein, 937 aa, Artificial Sequence
  derived and/or modified sequence
MVPWVRTMGQKLKQRLRLDVGREICRQYPLFCFLLLCLSAASLLLNRYIHILMIFWSFVAGVVTFYCSLGPDSLLPNIFFTIKYKPKQLGLQELFPQGHSCAVCGKVKCKRHRPSLLLENYQPWLDLKISSKVDASLSEVLELVLENFVYPWYRDVTDDESFVDELRITLRFFASVLIRRIHKVDIPSIITKKLLKAAMKHIEVIVKARQKVKNTEFLQQAALEEYGPELHVALRSRRDELHYLRKLTELLFPYILPPKATDCRSLTLLIREILSGSVFLPSLDFLADPDTVNHLLIIFIDDSPPEKATEPASPLVPFLQKFAEPRNKKPSVLKLELKQIREQQDLLFRFMNFLKQEGAVHVLQFCLTVEEFNDRILRPELSNDEMLSLHEELQKIYKTYCLDESIDKIRFDPFIVEEIQRIAEGPYIDVVKLQTMRCLFEAYEHVLSLLENVFTPMFCHSDEYFRQLLRGAESPTRNSKLNRNTQKRGESFGISRIGSKIKGVFKSTTMEGAMLPNYGVAEGEDDFIEEGIVVMEDDSPVEAVSTPNTPRNLAAWKISIPYVDFFEDPSSERKEKKERIPVFCIDVERNDRRAVGHEPEHWSVYRRYLEFYVLESKLTEFHGAFPDAQLPSKRIIGPKNYEFLKSKREEFQEYLQKLLQHPELSNSQLLADFLSPNGGETQFLDKILPDVNLGKIIKSVPGKLMKEKGQHLEPFIMNFINSCESPKPKPSRPELTILSPTSENNKKLFNDLFKNNANRAENTERKQNQNYFMEVMTVEGVYDYLMYVGRVVFQVPDWLHHLLMGTRILFKNTLEMYTDYYLQCKLEQLFQEHRLVSLITLLRDAIFCENTEPRSLQDKQKGAKQTFEEMMNYIPDLLVKCIGEETKYESIRLLFDGLQQPVLNKQLTYVLLDIVIQELFPELNKVQKEVTSVTSWM

SEQ ID NO: 112029 - DNA, 2814 bp, Artificial Sequence
  derived and/or modified sequence
atggtgccctgggtgagaaccatgggccagaagctgaagcagagactgagactggacgtgggcagagagatctgcagacagtaccccctgttctgcttcctgctgctgtgcctgagcgccgccagcctgctgctgaacagatacatccacatcctgatgatcttctggagcttcgtggccggcgtggtgaccttctactgcagcctgggccccgacagcctgctgcccaacatcttcttcaccatcaagtacaagcccaagcagctgggcctgcaggagctgttcccccagggccacagctgcgccgtgtgcggcaaggtgaagtgcaagagacacagacccagcctgctgctggagaactaccagccctggctggacctgaagatcagcagcaaggtggacgccagcctgagcgaggtgctggagctggtgctggagaacttcgtgtacccctggtacagagacgtgaccgacgacgagagcttcgtggacgagctgagaatcaccctgagattcttcgccagcgtgctgatcagaagaatccacaaggtggacatccccagcatcatcaccaagaagctgctgaaggccgccatgaagcacatcgaggtgatcgtgaaggccagacagaaggtgaagaacaccgagttcctgcagcaggccgccctggaggagtacggccccgagctgcacgtggccctgagaagcagaagagacgagctgcactacctgagaaagctgaccgagctgctgttcccctacatcctgccccccaaggccaccgactgcagaagcctgaccctgctgatcagagagatcctgagcggcagcgtgttcctgcccagcctggacttcctggccgaccccgacaccgtgaaccacctgctgatcatcttcatcgacgacagcccccccgagaaggccaccgagcccgccagccccctggtgcccttcctgcagaagttcgccgagcccagaaacaagaagcccagcgtgctgaagctggagctgaagcagatcagagagcagcaggacctgctgttcagattcatgaacttcctgaagcaggagggcgccgtgcacgtgctgcagttctgcctgaccgtggaggagttcaacgacagaatcctgagacccgagctgagcaacgacgagatgctgagcctgcacgaggagctgcagaagatctacaagacctactgcctggacgagagcatcgacaagatcagattcgaccccttcatcgtggaggagatccagagaatcgccgagggcccctacatcgacgtggtgaagctgcagaccatgagatgcctgttcgaggcctacgagcacgtgctgagcctgctggagaacgtgttcacccccatgttctgccacagcgacgagtacttcagacagctgctgagaggcgccgagagccccaccagaaacagcaagctgaacagaaacacccagaagagaggcgagagcttcggcatcagcagaatcggcagcaagatcaagggcgtgttcaagagcaccaccatggagggcgccatgctgcccaactacggcgtggccgagggcgaggacgacttcatcgaggagggcatcgtggtgatggaggacgacagccccgtggaggccgtgagcacccccaacacccccagaaacctggccgcctggaagatcagcatcccctacgtggacttcttcgaggaccccagcagcgagagaaaggagaagaaggagagaatccccgtgttctgcatcgacgtggagagaaacgacagaagagccgtgggccacgagcccgagcactggagcgtgtacagaagatacctggagttctacgtgctggagagcaagctgaccgagttccacggcgccttccccgacgcccagctgcccagcaagagaatcatcggccccaagaactacgagttcctgaagagcaagagagaggagttccaggagtacctgcagaagctgctgcagcaccccgagctgagcaacagccagctgctggccgacttcctgagccccaacggcggcgagacccagttcctggacaagatcctgcccgacgtgaacctgggcaagatcatcaagagcgtgcccggcaagctgatgaaggagaagggccagcacctggagcccttcatcatgaacttcatcaacagctgcgagagccccaagcccaagcccagcagacccgagctgaccatcctgagccccaccagcgagaacaacaagaagctgttcaacgacctgttcaagaacaacgccaacagagccgagaacaccgagagaaagcagaaccagaactacttcatggaggtgatgaccgtggagggcgtgtacgactacctgatgtacgtgggcagagtggtgttccaggtgcccgactggctgcaccacctgctgatgggcaccagaatcctgttcaagaacaccctggagatgtacaccgactactacctgcagtgcaagctggagcagctgttccaggagcacagactggtgagcctgatcaccctgctgagagacgccatcttctgcgagaacaccgagcccagaagcctgcaggacaagcagaagggcgccaagcagaccttcgaggagatgatgaactacatccccgacctgctggtgaagtgcatcggcgaggagaccaagtacgagagcatcagactgctgttcgacggcctgcagcagcccgtgctgaacaagcagctgacctacgtgctgctggacatcgtgatccaggagctgttccccgagctgaacaaggtgcagaaggaggtgaccagcgtgaccagctggatgtag

SEQ ID NO: 112030 - DNA, 2814 bp, Artificial Sequence
  derived and/or modified sequence
atggtgccctgggtgcgaaccatggggcagaaattgaagcaaagactaagactggatgtggggcgtgagatctgcaggcaataccccctgttctgctttctgctcctctgcctgtcagcagcctcattacttctgaatcgctacatccatatcctcatgatattttggtcttttgtcgccggggtcgtgaccttctactgctctctcggtcccgacagcctgctgcccaacattttcttcacaatcaagtacaagcctaaacagctgggactgcaggaactgttcccacaggggcactcatgcgcagtatgtggcaaggtcaagtgcaagagacaccggcccagtctcctcttagagaattatcaaccttggctggatctcaagatcagtagtaaagtggacgccagcttgagcgaggtgcttgagctggtgctggaaaactttgtatacccctggtatagggatgtaaccgacgatgagagcttcgtggacgaactacggatcacactgagatttttcgcgagcgtgcttatacgccggatccataaagttgacatcccgagcatcattaccaagaaactgctaaaagccgccatgaagcatattgaggtgattgtgaaggcccgacagaaggtgaaaaatacagagttcctccagcaggccgccctcgaggaatatggcccagagctgcacgtcgcccttcgcagtaggagggacgagctccactaccttaggaaactaacagagctcctttttccctatattctgcctcccaaggctacggattgtcggtctctgacactgctgatccgcgaaatcctcagcggcagcgtcttcctgccatccttggatttcctggccgatcctgacactgtgaaccatttgttgatcatctttatcgatgattccccgcccgagaaggctacggaaccggcaagtcccctcgtgcccttcttacagaaattcgcggagccccggaataagaagccatcagtgctgaagctcgagctgaagcagatccgcgagcagcaagacctgttgtttagatttatgaacttccttaaacaggagggagctgtgcacgtgttgcagttttgcctaacagtcgaggaatttaacgatcgtatcctcaggccagagctgagcaatgacgagatgttgtcactgcacgaagaactgcagaagatttacaagacttattgtctggacgagtctatcgacaaaatccggttcgacccgtttatcgttgaggagattcaaaggattgcagaaggcccctatatcgatgtggttaagctccagaccatgaggtgcctctttgaggcttacgagcatgtcctgtccctgctggagaatgtgttcactcctatgttttgtcattctgatgagtatttccgacagttactgcgcggggccgagagccctacacggaattccaaacttaatcgaaacactcagaagaggggtgaatccttcggtatttctaggatcggatccaaaatcaagggagtgttcaagagcactactatggagggagcgatgctccctaattatggggtcgcagagggcgaggacgactttatcgaagagggcattgtggtcatggaagatgacagtccagtcgaggcagtgagcactccaaatactccccgaaatctggctgcctggaagatctctattccttacgtagatttcttcgaggatccctcaagcgagcggaaggagaaaaaggaaaggattccggttttctgtattgacgtggaacgtaatgatagacgcgccgtcggccacgaaccagaacactggagtgtctataggagatatctcgagttctatgtgttagagtccaaactcaccgaatttcatggcgcgttcccagacgcccagctaccttcaaagaggatcatcgggcccaaaaattatgagtttctgaagagcaaacgcgaggagtttcaggagtatcttcagaagctgctgcagcaccctgagctctcgaactctcagctcctcgcagattttctcagtcctaatggaggtgagactcagtttttagataagattctaccggatgtgaatctaggaaaaattattaagtcggtgcccggaaagcttatgaaagaaaagggacaacacctggaaccctttattatgaacttcattaactcatgtgaatcgcccaaaccaaaaccttctaggcccgagctgacaatattaagtcccacgtccgagaacaacaaaaaattgttcaatgatctgtttaagaacaatgctaacagagccgagaataccgaaagaaaacaaaatcagaactacttcatggaggtgatgaccgtagagggcgtctacgactacttaatgtacgtaggaagggttgtgtttcaagtgccagattggttacaccacctgttgatgggtactcggatcctgttcaaaaatacacttgaaatgtacaccgactactacctgcagtgcaagttggagcagttgtttcaggagcatcgtctggtctcactgatcaccctgctgagagacgccatcttctgcgaaaataccgagccacggtccctgcaggataaacaaaagggagctaagcagacattcgaggaaatgatgaactatatcccggacctcctggttaaatgtattggagaagagacaaaatatgagagtatacgcctactattcgacggtttacagcagccagtcctgaacaaacaactgacttatgtgctgcttgacatcgtcatccaggagttatttcccgagttgaacaaggtccagaaagaggtgacaagcgtgactagttggatgtag

SEQ ID NO: 112031 - DNA, 2814 bp, Artificial Sequence
  derived and/or modified sequence
atggtgccctgggtgaggaccatgggccagaagctgaagcagaggctgcggctggatgtgggccgggagatctgccggcagtaccccctcttctgcttcctgctgctgtgcctgtctgctgccagcctgctgctgaaccgctacatccacatcctgatgatcttctggagctttgtggccggcgtggtgaccttctactgcagcctgggccctgacagcctgctgcccaacatcttcttcaccatcaagtacaagcccaagcagctgggcctgcaggagctgttcccccagggccacagctgtgctgtgtgtgggaaggtgaagtgcaagaggcaccggcccagcctgctgctggagaactaccagccctggctggacctgaagatcagcagcaaggtggatgccagcctgtctgaggtgctggagctggtgctggagaactttgtgtacccctggtacagagatgtgacagatgatgagagctttgtggatgagctgcgcatcaccctgcgcttctttgcctctgtgctgatccgccgcatccacaaggtggacatccccagcatcatcaccaagaagctgctgaaggccgccatgaagcacatcgaggtgattgtgaaggcccggcagaaggtgaagaacacagagttcctgcagcaggccgccctggaggagtatggccctgagctgcacgtggccctgcggagcagaagagatgagctgcactacctgaggaagctgacagagctgctcttcccctacatcctgccccccaaggccacagactgccgcagcctgaccctgctgatccgggagatcctgagcggctctgtgttcctgcccagcctggacttcctggccgaccctgacacagtgaaccacctgctgatcatcttcattgatgacagccccccagagaaggccacagagcccgccagccccctggtgcccttcctgcagaagtttgctgagcccaggaacaagaagcccagcgtgctgaagctggagctgaagcagatccgggagcagcaggacctgctcttccgcttcatgaacttcctgaagcaggagggcgctgtgcacgtgctgcagttctgcctgactgtggaggagttcaatgaccgcatcctgcggcctgagctgagcaatgatgagatgctgagcctgcacgaggagctgcagaagatctacaagacctactgcctggatgagagcattgacaagatccgctttgaccccttcatcgtggaggagatccagagaattgctgagggcccctacattgatgtggtgaagctgcagaccatgcgctgcctgtttgaggcctatgaacatgtgctgagcctgctggagaatgtgttcacccccatgttctgccacagtgatgagtacttccggcagctgctgcggggagctgagagccccaccaggaacagcaagctgaacagaaacacccagaagagaggagagagctttggcatcagcagaattggcagcaagatcaagggcgtcttcaagagcaccaccatggagggcgccatgctgcccaactacggcgtggccgagggggaggatgacttcatcgaggagggcatcgtggtgatggaggatgacagccctgtggaggccgtgtccacccccaacaccccaagaaacctggccgcctggaagatcagcatcccctacgtggacttctttgaggaccccagcagcgagaggaaggagaagaaggagcgcatccctgtgttctgcattgatgtggagagaaatgaccggcgggctgtgggccacgagcctgagcactggagcgtgtaccgccgctacctggagttctacgtgctggagagcaagctgacagagttccacggggccttcccagatgcccagctgcccagcaagaggatcatcggccccaagaactatgagttcctgaagagcaagcgggaggagttccaggagtacctgcagaagctgctgcagcaccctgagctgagcaacagccagctgctggccgacttcctgagccccaatggaggagagacccagttcctggacaagatcctgcctgatgtgaacctgggcaagatcatcaagtctgtgcctgggaagctgatgaaggagaagggccagcacctggagcccttcatcatgaacttcatcaacagctgtgagagccccaagcccaagcccagcaggcctgagctgaccatcctgagccccaccagcgagaacaacaagaagctgttcaatgacctcttcaagaacaatgccaacagagcagaaaatacagagaggaagcagaaccagaactacttcatggaggtgatgacagtggagggcgtgtatgactacctgatgtatgtgggccgggtggtgttccaggtgcctgactggctgcaccacctgctgatgggcacccgcatcctcttcaagaacaccctggagatgtacacagactactacctgcagtgcaagctggagcagctgttccaggagcaccggctggtgtccctcatcaccctgctgagagatgccatcttctgtgaaaatacagagcccaggagcctgcaggacaagcagaagggggccaagcagacctttgaggagatgatgaactacatcccagacctgctggtgaagtgcatcggggaggagaccaagtatgagagcatccggctgctgtttgatggcctgcagcagcctgtgctgaacaagcagctgacctacgtgctgctggacatcgtcatccaggagctgtttcctgagctgaacaaggtgcagaaggaggtgacctctgtgacctcctggatgtag

SEQ ID NO: 112032 - DNA, 2814 bp, Artificial Sequence
  derived and/or modified sequence
atggtgccctgggtgcggaccatgggccagaagctgaagcagcggctgaggcttgacgtaggtcgggaaatatgcaggcagtatccccttttctgctttctccttctatgcttgagtgccgcatctttgctgttgaataggtatattcacattctgatgattttctggtcatttgtagccggcgtagtcactttctactgttccctgggtcccgacagtctgctccctaacatcttcttcaccataaaatataaaccaaaacagttgggactgcaggagctttttccgcagggccattcttgcgcagtgtgcggcaaggtcaagtgtaaaaggcacagaccttctttgctgttggaaaattatcagccgtggctggaccttaagatcagttcgaaagtcgacgcatctctgagtgaggtgctggaattggtcctcgaaaacttcgtctacccctggtatcgcgacgtgacggacgatgagtcattcgtggatgagctgcgcattaccctgcgtttttttgcaagtgttttaatccgaaggattcacaaggtggacataccaagtattataaccaagaaactccttaaagctgccatgaagcacattgaagtcatcgtcaaggctagacaaaaggttaagaacaccgagtttttgcagcaggctgctttagaggagtatggtcccgaactgcatgtggccctgcgatctcgacgtgacgaactgcactacctgcggaagctgacagaactgctctttccatacattttacctcccaaagccacagactgccgttcattgaccctgctcattagagagattctcagcggatctgttttcttgccgagtctcgatttcctcgcagatcccgataccgtcaaccatcttcttataatcttcatcgacgattcaccacctgagaaggcaacggaacctgcgtctcccctggtgccattcctccagaaattcgccgagccccggaacaaaaaacccagcgtgttaaagctggaactgaaacagattagagagcagcaagatctgttattcaggtttatgaatttcttaaagcaggagggcgctgtgcacgttttgcagttctgcctcacagtagaggaatttaacgataggattctccggcccgagcttagcaacgacgagatgttgagccttcatgaagagctccagaaaatctataagacttactgcctggatgagtctatcgacaaaatccgcttcgatccgttcatagtcgaggagattcagagaattgccgaaggcccatacatcgatgttgtcaagctccagacaatgagatgcctgttcgaggcatacgagcacgtactttcattgctggaaaacgtgtttactcccatgttttgccattccgatgagtacttccggcagctactacgtggagctgaatctcctacacgtaatagtaagctgaaccgtaacacacagaaacgaggagaatccttcggcatcagcaggatcggaagtaagatcaaaggcgtctttaagagtaccaccatggagggcgcgatgctccccaattacggtgtcgcagagggcgaggatgatttcattgaagaagggattgtagtgatggaggacgattctccagtcgaggccgtctccactcctaatactcccagaaacctggctgcgtggaagataagcattccttatgtcgactttttcgaggatccaagctccgaaaggaaggagaagaaagaacggatccctgtgttttgtatcgatgtggaacgtaatgacaggagagccgtgggccatgagccagaacactggtccgtctaccgtagatatctcgaattctacgtgctcgagtccaagctgaccgaatttcacggggccttccccgatgctcagctccccagtaagcggatcatcggaccaaagaattacgagtttctgaagtctaaacgagaagaatttcaggagtatttgcaaaagttgctccagcatcctgaactctccaacagtcagcttctggctgatttcctgtcacctaatgggggcgagacccagtttctcgataagatcctgcccgacgtcaacctgggtaaaattataaaatctgtgccaggcaagctaatgaaggagaagggtcagcacctggagcccttcataatgaacttcattaattcatgcgaaagtcccaagccaaagccatcgaggccagagcttacaattctaagtccaacgagtgagaacaataagaaactgttcaatgacttatttaagaacaacgcgaatagagctgagaatacggaacgcaagcagaaccaaaactacttcatggaggtaatgaccgttgaaggagtttacgactacctgatgtatgtaggcagggttgtattccaggtgcccgactggttgcatcacctgctgatgggaacaaggatcctgttcaagaatacattagagatgtacaccgattactatcttcagtgcaaactggagcagctcttccaggagcacaggctcgtgtccctaatcaccctacttcgagacgccatcttttgtgagaacaccgagccacgtagccttcaagataagcagaagggagccaagcagacattcgaagagatgatgaattacattcctgatctcctggtgaaatgcattggagaagagaccaaatatgagagcattcgcctcttattcgatgggctacaacagcctgtgctaaacaagcagctgacttacgtgcttctcgacatcgtgatccaggagttgtttcctgagctgaataaggttcagaaggaggtgacatccgttacttcttggatgtag

SEQ ID NO: 112033 - DNA, 2814 bp, Artificial Sequence
  derived and/or modified sequence
atggttccttgggtgcgtaccatggggcaaaaactgaaacaacggctgagactggacgttggccgtgaaatctgtcggcaatatcctctcttttgcttcctcctgctctgtctgtccgccgcatcactgctcctcaacagatacatacacatacttatgattttttggtcgtttgtcgctggggtcgtgactttctattgtagcttggggcctgattctctactgccaaatatcttttttacaattaaatacaagcccaagcaactgggtttgcaggagctgttcccgcagggccattcttgcgcagtgtgcggaaaggtgaaatgcaagaggcatagaccatctctactgctcgagaattatcagccttggctggacttaaagatttcctccaaagtggacgcaagcttgagcgaggttctagaactggtgcttgaaaatttcgtgtatccctggtatcgggatgtgacagatgacgagagctttgtagatgagctgcggattacacttcggttctttgcgagtgtgctcattaggcggatccacaaggtcgacattccatctatcatcacaaagaagttgctgaaagcagccatgaagcatattgaggtgatagtgaaggctcgccaaaaggttaagaacaccgaattcttacagcaagccgcacttgaggaatacggccctgagctccatgttgccctcagaagtaggagagacgaactgcattacctgcgcaagctaacagagctgctctttccttacatccttccacctaaagcaactgattgccgctcgttaactttactgattagagaaattctgtcagggagcgtgttcctcccctcccttgactttttagccgaccctgatacggttaaccacctgctaattatcttcatcgacgactctccacctgaaaaagcaactgaacctgctagccctctggtgccgtttctccaaaaatttgcagagcctcgcaataagaagccaagcgtattgaagctggagctgaaacagatccgagagcagcaagaccttcttttccgtttcatgaactttctaaaacaggagggagccgttcatgtgcttcaattttgtctcaccgttgaagagtttaacgatagaatcctcaggccagagctctccaatgacgaaatgctgtctctccacgaagagctgcagaagatttacaagacctattgtttggatgagagcatcgacaagatcaggtttgaccccttcattgtggaagagatccagcgcattgccgaggggccatatatagatgtggtgaaactgcaaacaatgcggtgcctgttcgaagcttacgagcacgtactgtctctgttagaaaacgtgtttacacccatgttttgccattctgacgagtacttcagacagctgctccggggtgcggagtcacccacaaggaacagcaagttaaacaggaacacccagaaaaggggggaatcctttggcatctcaaggataggatcaaaaatcaagggggtttttaagtccaccaccatggagggggctatgctaccgaattacggagttgccgaaggggaagatgacttcattgaggaaggtatagtggtgatggaagacgacagtcctgtggaggctgttagtactccaaatactccacgtaaccttgccgcttggaaaatctcaatcccttatgttgatttttttgaagatcctagctctgaaaggaaagaaaagaaggagcgaatacccgtgttctgtatcgacgtggagagaaacgatcgacgagcggtaggacatgaacctgaacactggagcgtataccgcagatacctcgaattctatgtccttgagagtaagctgaccgaatttcacggagccttccccgatgctcagctcccctcaaaaagaatcatcgggccaaagaattacgagttcctgaagagcaagcgggaggagttccaagaatacctgcagaaactgcttcagcatccagagttgtctaatagccagctcttggcagattttctcagtcccaatggcggagaaacacagttcctggataagattctgcctgacgtgaacctggggaaaattatcaagagtgtcccagggaaactgatgaaagagaaagggcagcacctcgagccttttatcatgaatttcattaactcttgtgaaagccctaagcccaaaccctcacggcctgagctgaccattctttcgcccaccagcgaaaataataaaaagttattcaacgatctattcaagaataatgccaaccgggcagaaaacacagaacgcaaacagaatcagaattacttcatggaagtaatgacggtagagggcgtgtacgattatctcatgtacgtcggcagggtggttttccaggttccggattggctgcaccacctgttaatgggaacccgcatcctgttcaaaaacaccctggagatgtataccgattactatctgcagtgtaagctggagcaactgtttcaagagcacaggctggtaagcctcatcactcttttaagggatgccatcttttgcgagaatacggaaccaaggtcgctacaagataagcaaaaaggagccaaacagacattcgaggagatgatgaactatatccccgatctgcttgtgaaatgtattggggaggagactaaatatgagtcaatccgattgttgtttgatggtctccagcaaccagtgctgaacaaacagctcacctacgtgttgctggatatagttatccaggagctgttccccgaacttaataaggtgcaaaaagaagtgacgtccgtgacatcatggatgtag

SEQ ID NO: 112034 - DNA, 3111 bp, Artificial Sequence
  derived and/or modified sequence
gcggcggctaactgccggtaggcgtctgtgtgcgccgccaagtcggtggggcggggacgcgaggtgtggatggggggtcgccttgacctctgcctcagccagtagcgcagtctcggcctcgccgttacggagatggtgccctgggtgcggacgatggggcagaagctgaagcagcggctgcgactggacgtgggacgcgagatctgccgccagtacccgctgttctgcttcctgctgctctgtctcagcgccgcctccctgcttcttaacaggtatattcatattttaatgatcttctggtcatttgttgctggagttgtcacattctactgctcactaggacctgattctctcttaccaaatatattcttcacaataaaatacaaacccaagcagttaggacttcaggaattatttcctcaaggtcatagctgtgctgtttgtggtaaagtgaaatgtaaacgacataggccttctttgctacttgaaaactaccagccatggctagacctgaaaatttcttccaaggttgatgcatctctctcagaggttcttgaattagtgttggaaaactttgtttatccgtggtacagggatgtgacagatgatgaatcctttgttgatgaactgagaataacattacgtttttttgcatctgtcttaataagaaggattcacaaggtggatattccatctattataaccaagaaactattaaaagcagcaatgaagcatatagaagtgatagttaaagccagacagaaagtaaaaaatacagagtttttacagcaagctgctttagaagaatatggtccagagcttcatgttgctttgagaagtcgaagagatgaattgcactatttaaggaaacttactgaactgctttttccttatattttgcctcctaaagcaacagactgcagatctctgaccttacttataagagagattctgtctggctctgtgttccttccttctttggatttcctagctgatccagatactgtgaatcatttgcttatcatcttcatagatgacagtccacctgaaaaagcaactgaaccggcttctcctttggttccattcttgcagaaatttgcagaacctagaaataaaaagccatctgtgctgaagttagaattgaagcaaatcagagagcaacaagatcttttatttcgttttatgaactttctgaaacaagaaggcgcagtgcacgtgttgcagttttgtttgactgtggaggaatttaatgatagaattttacgaccagaattatcaaatgatgaaatgctgtctcttcatgaagaattgcagaagatttataaaacatactgtttggatgaaagtattgacaaaattagatttgatcccttcattgtagaagagattcaaagaattgctgaaggcccatacatagatgttgtgaaacttcaaactatgagatgtctttttgaagcatatgaacatgttctttcccttttggagaatgtatttactcctatgttctgccatagtgatgagtatttcagacaacttttaagaggtgcagaatcaccaacacgcaattcaaaattgaacaggaacacacagaaaaggggagaatcatttggaatcagcagaataggtagcaaaattaaaggagtattcaaaagtaccacaatggagggagctatgttgcctaattatggtgtagctgaaggtgaagatgattttattgaagaaggtattgttgtaatggaagatgattctccagtggaggctgtgagcacacctaatactccccgaaaccttgctgcatggaaaattagcattccatatgtagacttttttgaggatccctcctctgaaaggaaggagaaaaaagaaagaattcctgtgttttgtattgatgttgaaagaaatgatagaagagcagttggacacgagcctgaacattggtctgtctatagaagatatcttgaattctatgtacttgaatcaaaactaacagaatttcatggtgcatttcctgatgcccagcttccttctaagaggatcattggccccaaaaattatgaattcttaaagtcaaagagggaagagttccaagaatatctacagaaacttctgcagcatccagaactgagtaatagtcaacttctggcagactttctttcccctaatggtggggaaacacaatttcttgataagatactaccagatgtaaatcttgggaaaattataaaatctgttcctggaaaactaatgaaagagaaaggtcagcatttggaaccttttatcatgaatttcattaattcttgtgagtctccaaagcctaaaccaagtagaccagaactgaccattctcagccctacttcagaaaacaacaagaagcttttcaatgatctgtttaaaaataatgcaaaccgtgctgaaaatacagagagaaagcaaaatcagaattattttatggaggtgatgactgtagaaggagtctatgattacctgatgtatgtaggacgggtagttttccaggttcctgactggcttcatcatctcttaatgggaactcgaatcctctttaaaaacaccctggaaatgtatactgattactatcttcagtgtaaactagaacagctatttcaggagcaccgtttggtctcactcataacacttctcagagatgctatattctgtgaaaacactgaacctcgctctctccaagataagcaaaaaggagcaaaacagacttttgaagaaatgatgaattacattccagatctgttagtcaagtgtattggtgaagaaaccaagtatgaaagcatcagacttctgtttgatggcttacagcaaccagtactcaacaagcagctgacttatgttttattggacattgtgatacaggaactgtttccagagctcaataaggtacaaaaggaagttacctctgtgacatcttggatgtaaacacttggatttggtatagaataacccattgaaatttctgctgtgcgagggtggtagaaatttacttttttgggtatattcttatatatattatgtacatcgctgtctgaaattttagttattttttgtttttaataaagactaacacaaacttaatgattaaaa

SEQ ID NO: 112035 - protein, 54 aa, Artificial Sequence
  derived and/or modified sequence
MSMKWTSALLLIQLSCYFSSGSCGKVLVWPTEFSHWMNIKTILDELVQRGHEVT

SEQ ID NO: 112036 - DNA, 165 bp, Artificial Sequence
  derived and/or modified sequence
atgagcatgaagtggaccagcgccctgctgctgatccagctgagctgctacttcagcagcggcagctgcggcaaggtgctggtgtggcccaccgagttcagccactggatgaacatcaagaccatcctggacgagctggtgcagagaggccacgaggtgacctag

SEQ ID NO: 112037 - DNA, 165 bp, Artificial Sequence
  derived and/or modified sequence
atgtccatgaaatggacatcagcgcttctactgatacaactgagctgctatttttccagcgggtcctgcgggaaagtgctcgtgtggcctacagagttttctcattggatgaatattaaaacaatcctggatgaattagtgcaacggggacatgaagttacctag

SEQ ID NO: 112038 - DNA, 165 bp, Artificial Sequence
  derived and/or modified sequence
atgtccatgaagtggaccagcgccctgctgctgatccagctgagctgctacttcagcagcggcagctgtgggaaggtgctggtgtggcccacagagttcagccactggatgaacatcaagaccatcctggatgagctggtgcagaggggccacgaggtgacctag

SEQ ID NO: 112039 - DNA, 165 bp, Artificial Sequence
  derived and/or modified sequence
atgagcatgaagtggaccagcgccctgctgctgatccagctgagctgctacttttctagcgggagctgtggtaaggttctggtatggcccaccgaattctcccattggatgaacattaagaccatcttagacgaactcgtccagagaggacacgaagtgacatag

SEQ ID NO: 112040 - DNA, 165 bp, Artificial Sequence
  derived and/or modified sequence
atgagcatgaagtggacgtccgcactcttgctgatacagttgtcctgttactttagttctggatcttgtgggaaagtcttggtgtggcccactgagttctcacactggatgaatattaaaactattctcgacgaactcgtgcagcgaggacacgaagtgacatag

SEQ ID NO: 112041 - DNA, 596 bp, Artificial Sequence
  derived and/or modified sequence
attctcctgcctcagactccggagtagctgggactacaggcgccggccaccaagcctggctaattttttgtatttttagtagagatggggtttcaccgtgttagccaggatggtctggatctcctgacctcttgatccacccgccttggcctcccaaagtgctgggattaacggtgtgagccacctcgcccagcctggagccctttctttaatataaacataaatgttagtcaacttgtttaaatataaacatgtgagctgcttgagcacagggactacatcataatgttttttgctctcttacatgtctcatcaacgaatggattagtgtaaaagttacattttaacttcttgactgatttatactggatgtcaccatgagaaatgacagaaaggagcagcaactggaaaacaagcattgcattgcatcaggatgtctatgaaatggacttcagctcttctgctgatacagctgagctgttactttagctctgggagttgtggaaaggtgctggtgtggcccacagaattcagccactggatgaatataaagacaatcctggatgaacttgtccagagaggtcatgaggtgactg

SEQ ID NO: 112042 - protein, 392 aa, Artificial Sequence
  derived and/or modified sequence
MFFALLHVSSTNGLDAVFPFGELLAELLKIPFVYSLRFSPGYAIEKHSGGLLFPPSYVPVVMSELSDQMTFIERVKNMIYVLYFEFWFQIFDMKKWDQFYSEVLGRPTTLSETMAKADIWLIRNYWDFQFPHPLLPNVEFVGGLHCKPAKPLPKEMEEFVQSSGENGVVVFSLGSMVSNTSEERANVIASALAKIPQKVLWRFDGNKPDTLGLNTRLYKWIPQNDLLGHPKTRAFITHGGANGIYEAIYHGIPMVGVPLFADQPDNIAHMKAKGAAVSLDFHTMSSTDLLNALKTVINDPLYKENAMKLSRIHHDQPVKPLDRAVFWIEFVMRHKGAKHLRVAAHDLTWFQYHSLDVTGFLLACVATVIFIITKCLFCVWKFVRTGKKGKRD

SEQ ID NO: 112043 - DNA, 1179 bp, Artificial Sequence
  derived and/or modified sequence
atgttcttcgccctgctgcacgtgagcagcaccaacggcctggacgccgtgttccccttcggcgagctgctggccgagctgctgaagatccccttcgtgtacagcctgagattcagccccggctacgccatcgagaagcacagcggcggcctgctgttcccccccagctacgtgcccgtggtgatgagcgagctgagcgaccagatgaccttcatcgagagagtgaagaacatgatctacgtgctgtacttcgagttctggttccagatcttcgacatgaagaagtgggaccagttctacagcgaggtgctgggcagacccaccaccctgagcgagaccatggccaaggccgacatctggctgatcagaaactactgggacttccagttcccccaccccctgctgcccaacgtggagttcgtgggcggcctgcactgcaagcccgccaagcccctgcccaaggagatggaggagttcgtgcagagcagcggcgagaacggcgtggtggtgttcagcctgggcagcatggtgagcaacaccagcgaggagagagccaacgtgatcgccagcgccctggccaagatcccccagaaggtgctgtggagattcgacggcaacaagcccgacaccctgggcctgaacaccagactgtacaagtggatcccccagaacgacctgctgggccaccccaagaccagagccttcatcacccacggcggcgccaacggcatctacgaggccatctaccacggcatccccatggtgggcgtgcccctgttcgccgaccagcccgacaacatcgcccacatgaaggccaagggcgccgccgtgagcctggacttccacaccatgagcagcaccgacctgctgaacgccctgaagaccgtgatcaacgaccccctgtacaaggagaacgccatgaagctgagcagaatccaccacgaccagcccgtgaagcccctggacagagccgtgttctggatcgagttcgtgatgagacacaagggcgccaagcacctgagagtggccgcccacgacctgacctggttccagtaccacagcctggacgtgaccggcttcctgctggcctgcgtggccaccgtgatcttcatcatcaccaagtgcctgttctgcgtgtggaagttcgtgagaaccggcaagaagggcaagagagactag

SEQ ID NO: 112044 - DNA, 1179 bp, Artificial Sequence
  derived and/or modified sequence
atgttcttcgcactgctgcatgtgtctagtaccaatggcctggacgcggtgttccctttcggcgaactcttggcggaactgttaaagatcccattcgtttactcactgcgcttcagccctggttatgctatcgaaaaacactcaggcggacttctattccctccgagctatgtcccggtcgttatgagtgagttgagcgatcagatgacctttatagaaagggtgaagaatatgatatatgttttgtatttcgaattttggttccagatcttcgacatgaagaagtgggaccagttctatagcgaggtgctgggaagacctactacgctatctgaaactatggccaaagcagatatttggttaatcaggaactactgggatttccaatttccgcaccctctgctgcccaacgttgagttcgtcggagggctgcattgcaagcccgctaaacctctcccaaaagagatggaggaattcgtgcaatcatcaggtgagaatggagtggtggtattttctctgggttcaatggtctcaaatacatcagaagagcgtgctaatgtgatcgcaagcgctcttgcaaaaatcccccagaaggtgctctggcggttcgatgggaacaagcctgatacactaggactgaacacccgactatacaaatggattcctcagaatgacctgctagggcacccaaagacaagagctttcattactcacggcggtgctaacgggatttacgaagccatctatcacggcatccccatggtgggtgtccctctgttcgccgatcagcccgataacatagctcatatgaaggcaaagggcgctgcagtcagccttgattttcatactatgagttcaactgacttattaaatgcactgaagaccgtgattaacgaccctttatacaaggagaacgcaatgaagttgagcagaatccatcatgatcagccagtgaagcccctcgacagagctgtgttttggatcgagttcgtcatgcggcacaaaggagctaagcaccttcgagtggccgctcatgacttgacttggtttcaatatcattccttagatgtgacagggtttctccttgcctgcgtggctaccgtgatcttcataattacaaagtgtctcttctgtgtatggaagtttgtgagaactggaaaaaagggcaagagagattag

SEQ ID NO: 112045 - DNA, 1179 bp, Artificial Sequence
  derived and/or modified sequence
atgttctttgccctgctgcacgtgagcagcaccaacggcctggatgctgtgttcccctttggagagctgctggccgagctgctgaagatcccctttgtgtacagcctgcgcttcagccctggctacgccatcgagaagcacagcggcggcctgctcttcccccccagctatgtgcctgtggtgatgtctgagctgagtgaccagatgaccttcatcgagcgggtgaagaacatgatctacgtgctgtactttgagttctggttccagatctttgacatgaagaagtgggaccagttctacagcgaggtgctgggccggcccaccaccctgtctgagaccatggccaaggctgacatctggctgatccggaactactgggacttccagttcccccaccccctgctgcccaacgtggagtttgtgggcggcctgcactgcaagccagccaagcccctgcccaaggagatggaggagtttgtgcagagcagtggagaaaatggagtggtggtgttcagcctgggctccatggtgagcaacaccagcgaggagcgggccaacgtcatcgccagcgccctggccaagatcccccagaaggtgctgtggaggtttgatggcaacaagccagacaccctgggcctgaacacccggctgtacaagtggatcccccagaatgacctgctgggccaccccaagacccgggccttcatcacccacggcggggccaacggcatctatgaggccatctaccacggcatccccatggtgggcgtgcccctgtttgctgaccagcctgacaacatcgcccacatgaaggccaagggagctgctgtgtccctggacttccacaccatgagcagcacagacctgctgaatgccctgaagacagtcatcaatgaccccctgtacaaggaaaatgccatgaagctgagccgcatccaccacgaccagcctgtgaagcccctggacagagctgtgttctggattgaatttgtgatgaggcacaagggggccaagcacctgcgggtggccgcccatgacctgacctggttccagtaccacagcctggatgtgacaggcttcctgctggcctgtgtggccaccgtcatcttcatcatcaccaagtgcctcttctgtgtgtggaagtttgtgaggacaggcaagaagggcaagagggactag

SEQ ID NO: 112046 - DNA, 1179 bp, Artificial Sequence
  derived and/or modified sequence
atgttcttcgccctgctgcacgtgagcagcaccaacggcctggacgccgtttttcctttcggcgagctcttagctgaactgctcaaaatccccttcgtatacagtttgaggttttctcccggctatgcaattgaaaagcattctggcggtttgctgttccctccgagttacgtccctgtggtgatgagcgagctctcagatcagatgacttttatagaaagggttaagaacatgatctacgtgttatattttgagttttggttccagatcttcgatatgaaaaaatgggatcagttctattcagaggttctgggccggcccacgacattgagcgagaccatggcaaaagccgatatatggttaattagaaattactgggactttcagtttccacacccgctcctgccaaatgtggagtttgtagggggtctgcattgtaaacccgccaagcccttgcccaaggaaatggaagaatttgtgcagtcttccggagagaatggagttgtcgtttttagtcttgggtcgatggtgtccaatactagcgaagagagggcaaatgtgattgctagtgccctggccaagatccctcaaaaagtcctgtggcgatttgacggcaacaaaccagacaccctagggctgaatactaggctctacaaatggatcccacaaaatgacctgctgggccaccccaagaccagagccttcattacccacggaggggcaaacggtatctacgaggccatctaccatggaattcccatggtgggagtgcctctgttcgccgatcagccagacaacattgcccatatgaaagctaaaggcgccgctgtgtctttggactttcataccatgagcagtaccgacttgctgaatgccttaaagaccgtaatcaacgatccactttacaaggagaatgctatgaagctgagcagaattcaccacgaccaaccagtgaaacccctggaccgcgctgtgttctggatagagtttgttatgcggcacaagggggctaagcaccttagagttgccgcacacgatctcacatggtttcagtatcattccttagacgtgaccggtttcctgctcgcctgtgtcgccactgtgatcttcatcatcaccaaatgcctgttttgcgtgtggaagtttgtgcgcaccggcaaaaaaggaaaaagagactag

SEQ ID NO: 112047 - DNA, 1179 bp, Artificial Sequence
  derived and/or modified sequence
atgttcttcgcactgctacacgtttcaagcacaaacggactggatgctgtcttccctttcggggaactcctcgcggagctcttaaaaatccctttcgtgtacagcctccggttctcaccagggtatgccattgaaaaacatagcggtggcctcttgttcccgccaagttatgtgccagtcgttatgagtgaattatccgaccagatgacattcattgaaagagtcaagaacatgatttatgtgctctactttgagttttggttccagatcttcgatatgaaaaagtgggatcaattttattctgaagtacttggacggcctactacactcagtgagacaatggccaaggctgacatctggctcatccgaaattattgggattttcagttcccacaccccctattacccaatgtagagtttgtgggtggactccattgtaagcccgctaagccattgcccaaggagatggaggagttcgtccagtcctccggcgagaacggcgtggtggtgtttagtctcggatctatggtttcgaacacaagcgaagagcgagcaaatgtgattgcctctgccttggcaaagattcctcagaaggtcctgtggagattcgacggtaataaacccgatactctcggcctgaacactagactctacaagtggattccgcagaatgacctccttggccatcccaagacccgagctttcatcacccatggcggagcaaacggcatttacgaagctatttatcacggcattccaatggtaggcgtgcctctattcgctgaccagcccgataatatcgcacatatgaaggccaaaggtgcagctgtgtccctcgactttcataccatgtcctcaacagacctgctcaatgccctcaagactgtcatcaacgatccgttatataaagagaacgccatgaaacttagccgaattcaccatgatcagccagttaagccattggaccgcgctgtcttctggatcgagtttgttatgcggcacaaaggtgcaaagcaccttagagtggcggctcatgaccttacctggtttcagtaccattcattagatgtgaccggttttctgctggcttgtgtggccacagttatcttcatcataactaaatgcctgttttgcgtctggaaattcgtgagaacagggaagaagggcaagagggattag

SEQ ID NO: 112048 - DNA, 1932 bp, Artificial Sequence
  derived and/or modified sequence
attctcctgcctcagactccggagtagctgggactacaggcgccggccaccaagcctggctaattttttgtatttttagtagagatggggtttcaccgtgttagccaggatggtctggatctcctgacctcttgatccacccgccttggcctcccaaagtgctgggattaacggtgtgagccacctcgcccagcctggagccctttctttaatataaacataaatgttagtcaacttgtttaaatataaacatgtgagctgcttgagcacagggactacatcataatgttttttgctctcttacatgtctcatcaacgaatggattagatgctgttttcccctttggtgagctgctggccgagttacttaaaataccctttgtctacagcctccgcttctctcctggctacgcaattgaaaagcatagtggaggacttctgttccctccttcctatgtgcctgttgttatgtcagaactaagtgaccaaatgactttcatagagagggtaaaaaatatgatctatgtgctttattttgaattttggttccaaatatttgacatgaagaagtgggatcagttctacagtgaagttctaggaagacccactacgttatctgagacaatggcaaaagctgacatatggcttattcgaaactactgggattttcaatttcctcacccactcttaccaaatgttgagttcgttggaggactccactgcaaacctgccaaacccctaccgaaggaaatggaagagtttgtccagagctctggagaaaatggtgttgtggtgttttctctggggtcgatggtcagtaacacatcagaagaaagggccaatgtaattgcatcagcccttgccaagatcccacaaaaggttctgtggagatttgatgggaataaaccagatactttaggactcaatactcggctgtacaagtggataccccagaatgatcttcttggtcacccaaaaaccagagcttttataactcatggtggagccaatggcatctatgaggcaatctaccatggaatccctatggtgggcgttccattgtttgcagatcaacctgataacattgcacacatgaaggccaagggagcagctgttagtttggacttccacacaatgtcgagtacagacttactcaatgcactgaagacagtaattaatgatcctttatataaagagaatgctatgaaattatcaagaattcatcatgatcaaccagtgaagccccttgatcgagcagtcttctggattgaatttgtcatgcgccataaaggagccaagcaccttcgggttgcagcccacgacctcacctggttccagtaccactctttggatgtgactgggttcctgctggcctgtgtggcaactgtgatattcatcatcacaaaatgtctgttttgtgtctggaagtttgttagaacaggaaagaaggggaaaagagattaattacgtctgaggctggaagctgggaaacccaataaatgaactcctttagtttattacaacaagaagacgttgtgatacaagagattcctttcttcttgtgacaaaacatctttcaaaacttaccttgtcaagtcaaaatttgttttagtacctgtttaaccattagaaatatttcatgtcaaggaggaaaacattagggaaaacaaaaatgatataaagccatatgaggttatattgaaatgtattgagcttatattgaaatttattgttccaattcacaggttacatgaaaaaaaatttactaagcttaactacatgtcacacattgtacatggaaacaagaacattaagaagtccactgacagtatcagtactgttttgcaaatactcagcatactttggatccatttcatgcaggattgtgttgttttaactgttgttgaggaagctaataaataattaaattgt

SEQ ID NO: 112049 - protein, 595 aa, Artificial Sequence
  derived and/or modified sequence
MANQVNGNAVQLKEEEEPMDTSSVTHTEHYKTLIEAGLPQKVAERLDEIFQTGLVAYVDLDERAIDALREFNEEGALSVLQQFKESDLSHVQNKSAFLCGVMKTYRQREKQGSKVQESTKGPDEAKIKVFVGKIPRDLYEDELVPLFEKAGPIWDLRLMMDPLSGQNRGYAFITFCGKEAAQEAVKLCDSYEIRPGKHLGVCISVANNRLFVGSIPKNKTKENILEEFSKVTEGLVDVILYHQPDDKKKNRGFCFLEYEDHKSAAQARRRLMSGKVKVWGNVVTVEWADPVEEPDPEVMAKVKVLFVRNLATTVTEEILEKSFSEFGKLERVKKLKDYAFVHFEDRGAAVKAMDEMNGKEIEGEEIEIVLAKPPDKKRKERQAARQASRSTAYEDYYYHPPPRMPPPIRGRGRGGGRGGYGYPPDYYGYEDYYDDYYGYDYHDYRGGYEDPYYGYDDGYAVRGRGGGRGGRGAPPPPRGRGAPPPRGRAGYSQRGAPLGPPRGSRGGRGGPAQQQRGRGSRGSRGNRGGNVGGKRKADGYNQPDSKRRQTNNQQNWGSQPIAQQPLQQGGDYSGNYGYNNDNQEFYQDTYGQQWK

SEQ ID NO: 112050 - DNA, 1788 bp, Artificial Sequence
  derived and/or modified sequence
atggctaatcaggtcaacggaaatgcagttcagctgaaggaggaggaggagcctatggatacctcgagtgttacccatacagaacactacaaaaccttgattgaggctggcctcccccagaaagttgccgagcggttggatgagatattccagaccggcttagtcgcttacgtggatctggacgaacgagcaatcgatgcactacgagaatttaatgaggagggcgcccttagtgtactccagcaatttaaggaatctgatctctcccacgtgcagaataagtctgccttcctgtgcggggtgatgaaaacatatagacagcgagaaaaacaaggctctaaggtccaggagagtaccaaggggccagatgaagcaaaaatcaaagtgtttgtaggaaaaatccctagagatctctatgaggacgaactcgtgccactgtttgaaaaggccgggcccatctgggacctccggctgatgatggacccactgtccggtcagaatcggggctacgcattcattacattctgtgggaaggaggccgcacaggaggctgtcaagctgtgcgacagctatgaaattcggcccggcaaacacctgggggtatgcattagtgtcgctaataataggctgttcgtgggatccattcccaaaaataaaactaaggagaatatcctggaggagttcagcaaggtaaccgaaggccttgttgatgtgattctctaccatcagccggacgataagaagaagaacagggggttctgtttcctggagtatgaggatcataagtcagcagctcaggctcggaggaggctcatgtccggaaaagtgaaagtctgggggaacgtggtgacagtcgagtgggcggatcctgtggaggaaccagacccagaggttatggctaaggtcaaagtcctctttgttaggaatttggcaactacagttaccgaggagattcttgagaaaagcttcagcgaatttggtaagctggagcgagtgaaaaaactgaaggattatgctttcgtgcactttgaggataggggagcagccgtaaaggctatggacgagatgaatggaaaggagattgaaggcgaagagattgaaatcgtgctcgctaaaccaccagacaagaagagaaaagagcgccaggctgcacggcaggcgtcaagaagtactgcttacgaagactattactaccaccctcctccccgcatgccccccccaattcgcggacgaggacgaggcggagggcgcgggggttatggatacccacctgattattacggctatgaagattattacgatgattactatgggtacgattaccacgattaccgcggggggtatgaggacccttactatgggtacgatgatgggtacgcggttaggggacggggcggggggcgaggggggcgaggcgcacccccgccacccaggggaaggggcgcccctcctcccaggggacgcgcaggatattctcagagaggcgcgccactcggaccccccagagggagtagagggggccgggggggccccgcacaacaacaaagaggccgtgggagcagaggaagtcggggcaacagggggggcaacgtgggtgggaaacgcaaggctgatggatataatcagcctgactcaaagcggagacagaccaacaaccagcagaattggggatcccagccgattgctcagcagcctctccagcaggggggggactattcgggcaattatggttataataacgacaatcaggaattctatcaggacacctacggccagcagtggaagtag

SEQ ID NO: 112051 - DNA, 2107 bp, Artificial Sequence
  derived and/or modified sequence
atttctagtcgttttcaaagcgcctcgcgctgattctcacgggcccggctgccggcccccgctctgccctgcataataaaatggctaatcaggtgaatggtaatgcggtacagttaaaagaagaggaagaaccaatggatacttccagtgtaactcacacagaacactacaagacactgatagaggcaggcctcccacagaaggtggcagaaagacttgatgaaatatttcagacaggattggtagcttatgtcgatcttgatgaaagagcaattgatgctctcagggaatttaatgaagaaggagctctgtctgtactacagcagttcaaggaaagtgacttatcacatgttcagaacaaaagtgcatttttatgtggagttatgaagacctacaggcagagagagaaacaggggagcaaggtgcaagagtccacaaagggacctgatgaagcgaagatcaaggtatttgtaggcaaaataccaagggatttatatgaggatgagttggtgcccctttttgagaaggccggacccatttgggatctacgtcttatgatggatccactgtccggtcagaatagagggtatgcatttatcaccttctgtggaaaggaagctgcacaggaagccgtgaaactgtgtgacagctatgaaattcgccctggtaaacaccttggagtgtgcatttctgtggcaaacaacagactttttgttggatccattccgaagaataagactaaagaaaacattttggaagaattcagtaaagtcacagagggtttggtggacgttattctctatcatcaacccgatgacaaaaagaagaatcgggggttctgcttccttgaatatgaggatcacaagtcagcagcacaagccagacgccggctgatgagtggaaaagtaaaagtgtggggaaatgtagttacagttgaatgggctgaccctgtggaagaaccagatccagaagtcatggctaaggtaaaagttttgtttgtgagaaacttggctactacggtgacagaagaaatattggaaaagtcattttctgaatttggaaaactcgaaagagtaaagaagttgaaagattatgcatttgttcattttgaagacagaggagcagctgttaaggctatggatgaaatgaatggcaaagaaatagaaggggaagaaattgaaatagtcttagccaagccaccagacaagaaaaggaaagagcgccaagctgctagacaggcctccagaagcactgcgtatgaagattattactaccaccctcctcctcgcatgccacctccaattagaggtcggggtcgtggtggggggagaggtggatatggctaccctccagattactacggctatgaagattactatgatgattactatggttatgattatcacgactatcgtggaggctatgaagatccctactacggctatgatgatggctatgcagtaagaggaagaggaggaggaaggggagggcgaggtgctccaccaccaccaagggggaggggagcaccacctccaagaggtagagctggctattcacagaggggggcacctttgggaccaccaagaggctctaggggtggcagagggggtcctgctcaacagcagagaggccgtggttcccgtggatctcggggcaatcgtgggggcaatgtaggaggcaagagaaaggcagatgggtacaaccagcctgattccaagcgtcgtcagaccaacaaccaacagaactggggttcccaacccatcgctcagcagccgcttcagcaaggtggtgactattctggtaactatggttacaataatgacaaccaggaattttatcaggatacttatgggcaacagtggaagtagacaagtaagggcttgaaaatgatactggcaagatacgattggctctagatctacattcttcaaaaaaaaaaattggcttaactgtttcatctttaagtagcattttgctgccatttgtattgggctgaagaaatcactattgtgtatatactcaagtctttttatttttcctcttttcataaatgctcttggacattattgggcttgcagagttcccttattctggggattacaatgct

SEQ ID NO: 112052 - DNA, 1788 bp, Artificial Sequence
  derived and/or modified sequence
atggccaaccaggtgaatggaaatgctgtgcagctgaaggaggaggaggagcccatggacaccagctctgtgacccacacagagcactacaagaccctcatcgaggccggcctgccccagaaggtggccgagcggctggatgagatcttccagacaggcctggtggcctacgtggacctggatgagcgggccattgatgccctgcgggagttcaatgaggagggcgccctgtctgtgctgcagcagttcaaggagagtgacctgagccacgtgcagaacaagagcgccttcctgtgtggggtgatgaagacctaccggcagcgggagaagcagggcagcaaggtgcaggagagcaccaagggcccagatgaggccaagatcaaggtgtttgtgggcaagatcccccgggacctgtatgaagatgagctggtgcccctgtttgagaaggccggccccatctgggacctgcggctgatgatggaccccctgagcggccagaacagaggctacgccttcatcaccttctgtgggaaggaggccgcccaggaggccgtgaagctgtgtgacagctatgagatccggcctgggaagcacctgggcgtgtgcatctctgtggccaacaaccggctgtttgtgggcagcatccccaagaacaagaccaaggagaacatcctggaggagttcagcaaggtgacagagggcctggtggatgtgatcctgtaccaccagccagatgacaagaagaagaacagaggcttctgcttcctggagtatgaggaccacaagtctgctgcccaggcccggcggcggctgatgtctgggaaggtgaaggtgtggggcaatgtggtgacagtggagtgggccgaccctgtggaggagccagaccctgaggtgatggccaaggtgaaggtgctgtttgtgaggaacctggccaccaccgtgacagaggagatcctggagaagagcttcagcgagtttgggaagctggagcgggtgaagaagctgaaggactatgcctttgtgcactttgaggacagaggagctgctgtgaaggccatggatgagatgaatggcaaggagattgaaggagaggagattgagatcgtgctggccaagcccccagacaagaagaggaaggagcggcaggccgcccggcaggccagccgcagcacagcctatgaggactactactaccaccccccacccaggatgcccccacccatccggggccggggccggggcggcggccggggcggctacggctaccccccagactactacggctatgaggactactatgatgactactacggctatgactaccatgactaccggggcggctatgaggacccctactacggctatgatgatggctatgctgtgcggggccggggcggcggccggggcggccgcggggcccctcctccaccccggggccgcggggcccccccaccccggggccgggccggctacagccagagaggagcccccctgggccccccccggggcagccggggcggccggggcggccctgcccagcagcagaggggccggggcagccggggcagccggggcaacagaggaggaaatgtgggcggcaagaggaaggcagatggctacaaccagcctgacagcaagaggcggcagaccaacaaccagcagaactggggcagccagcccatcgcccagcagcccctgcagcagggcggggactacagcggcaactacggctacaacaatgacaaccaggagttctaccaggacacctacggccagcagtggaagtag

SEQ ID NO: 112053 - DNA, 1788 bp, Artificial Sequence
  derived and/or modified sequence
atggccaaccaggtgaacggcaacgccgtgcagctgaaggaggaggaagaacctatggatacctcaagcgtgactcacacagagcactacaagacccttatcgaagctggcttaccacagaaagtcgcggaacgtctcgacgaaatcttccaaacaggacttgtcgcatacgtcgacctggatgagcgggcaatcgatgcacttagagaatttaatgaagagggagcactgagcgtactgcagcagtttaaggagagcgacctcagtcatgtccagaacaaatctgctttcctgtgcggcgtcatgaaaacttatcgccagcgggagaaacaaggctccaaggttcaagagtcaacaaaaggtcctgacgaagcgaagattaaggtgttcgtgggcaaaatcccgcgggacttgtatgaagatgagctggtcccgctgtttgagaaggctggccctatttgggatctccgcctgatgatggatccgttaagtggacagaacaggggttacgcatttatcaccttctgtgggaaagaagcagcccaagaagccgttaaactctgcgacagctacgaaatccgacccggtaagcacctgggggtgtgcatctccgttgccaataatcgattgttcgtgggaagcattcccaagaacaagaccaaagaaaatatcctggaggagttttctaaggtaactgaaggactggtcgatgtaatcctgtaccatcaacccgacgataaaaagaaaaatcggggattctgctttctagaatatgaggaccacaaatcagcagcgcaggcccgaaggcggctgatgagcggtaaggttaaggtttggggcaatgtggttacagtcgaatgggctgaccccgttgaagagcccgacccagaggtcatggctaaggtcaaggttttatttgtgcggaacctggctaccaccgtgacagaggagattctggagaaatcatttagtgagtttggcaaacttgaacgggtgaagaaactaaaggactatgccttcgtgcacttcgaggaccgcggagcggctgtgaaagcaatggatgagatgaacggaaaagaaatcgaaggcgaggagatcgagattgttttggcgaaacctccagataagaagagaaaggagcgccaagccgccaggcaggcatccaggtcaaccgcttacgaggactactattaccacccccccccacgaatgcctccaccgatcaggggacggggccgcggcgggggccgaggaggatacggctacccccctgattactacggctacgaggattactacgacgattactacggatacgattaccacgactaccgagggggttacgaggatccctattacggatacgatgatgggtatgccgttagaggcagaggaggtggcagggggggcagaggggcaccgcctcccccacgaggacgaggagcaccccctcccagggggagagcgggatacagccaacgcggagctccactggggccacctcgaggaagcaggggcgggcgaggcggcccagctcagcaacagagaggcaggggaagtcgaggtagcagagggaatagaggcggcaacgttggggggaaacggaaagccgacggatacaaccagcccgatagcaagagacgacagacgaacaaccagcagaattggggctcccagcccatcgcacagcaaccgttacaacagggcggcgactatagcggcaactatgggtacaacaatgataaccaggaattctatcaggatacttacgggcagcaatggaagtag

SEQ ID NO: 112054 - DNA, 1788 bp, Artificial Sequence
  derived and/or modified sequence
atggccaatcaggtgaacgggaacgccgtgcagctgaaagaggaggaggagcctatggatacctcaagtgtgacccacacagaacattacaagactctcattgaagcgggattaccccaaaaagtggccgaaaggctggatgagatattccaaactggtttagtcgcgtatgtggaccttgatgagcgtgcaatagatgccctccgcgagtttaatgaggaaggcgctctcagcgtgcttcaacagtttaaggagagcgacctgtcccacgtgcagaacaaatcagcatttctgtgcggtgtcatgaaaacctatcgccagcgcgagaaacaaggctcgaaagtgcaagagtcaactaaggggcctgatgaagcgaagataaaagtttttgtgggaaaaattcccagggatctgtacgaggatgagctggtccctctgtttgagaaagcagggccaatttgggacctcagacttatgatggatccgctcagtggccagaatagaggatacgcttttatcaccttctgtggaaaagaggccgcacaggaagccgtgaagctgtgcgatagttatgaaatccgcccaggcaagcacctgggggtatgtatttcagtggccaacaataggctttttgtaggctcaattcccaagaacaaaacaaaagagaatattctggaggaattttccaaagtcactgaaggtctggtggatgtaatcctgtaccaccagccggatgacaagaagaagaatagggggttctgttttcttgaatacgaggatcacaagagcgccgctcaggctcgaaggcggctcatgtccggtaaagtcaaggtgtggggaaacgtagttacagtggagtgggccgaccccgttgaggaaccagaccctgaggtcatggctaaagtcaaggtgcttttcgtgagaaatctagcaacaacagtgactgaggagattctggagaaatctttcagcgaatttggaaaactagaacgggtcaaaaagcttaaagattacgcattcgttcatttcgaggaccgaggcgctgcagtcaaggctatggacgaaatgaatgggaaagagattgagggggaagagattgagatcgtcttagctaagccccctgacaaaaagagaaaagagcgacaggcagcaagacaggcttcccgctctactgcctatgaggattattactaccatcctcccccaaggatgccccctccaatccgtggtcgcggaaggggcggaggaaggggcggttacgggtaccctcccgactattatgggtacgaagattactacgacgattattatgggtacgactaccacgactaccgcggaggctacgaagatccttattacggatatgacgatggatacgcagtgaggggcagaggaggcggtcgcggagggagaggcgcaccccctccgcctcgagggcgtggagccccaccccctcggggtagagccggttactctcagaggggggctcctttagggcctccaaggggcagcaggggcggtagaggagggcctgcccagcagcaaagaggtcgtgggagtagagggagtcgcggaaaccggggtgggaacgtgggtggcaaaagaaaggctgatggatacaaccaacccgatagtaagcgaagacaaaccaataaccagcaaaactgggggtcgcaacccatcgcacagcagcccctgcagcaggggggagattatagcggcaattacggctacaacaatgacaatcaggagttttatcaggacacatatggtcaacaatggaaatag

SEQ ID NO: 112055 - DNA, 1788 bp, Artificial Sequence
  derived and/or modified sequence
atggccaaccaggtgaacggcaacgccgtgcagctgaaggaggaggaggagcccatggacaccagcagcgtgacccacaccgagcactacaagaccctgatcgaggccggcctgccccagaaggtggccgagagactggacgagatcttccagaccggcctggtggcctacgtggacctggacgagagagccatcgacgccctgagagagttcaacgaggagggcgccctgagcgtgctgcagcagttcaaggagagcgacctgagccacgtgcagaacaagagcgccttcctgtgcggcgtgatgaagacctacagacagagagagaagcagggcagcaaggtgcaggagagcaccaagggccccgacgaggccaagatcaaggtgttcgtgggcaagatccccagagacctgtacgaggacgagctggtgcccctgttcgagaaggccggccccatctgggacctgagactgatgatggaccccctgagcggccagaacagaggctacgccttcatcaccttctgcggcaaggaggccgcccaggaggccgtgaagctgtgcgacagctacgagatcagacccggcaagcacctgggcgtgtgcatcagcgtggccaacaacagactgttcgtgggcagcatccccaagaacaagaccaaggagaacatcctggaggagttcagcaaggtgaccgagggcctggtggacgtgatcctgtaccaccagcccgacgacaagaagaagaacagaggcttctgcttcctggagtacgaggaccacaagagcgccgcccaggccagaagaagactgatgagcggcaaggtgaaggtgtggggcaacgtggtgaccgtggagtgggccgaccccgtggaggagcccgaccccgaggtgatggccaaggtgaaggtgctgttcgtgagaaacctggccaccaccgtgaccgaggagatcctggagaagagcttcagcgagttcggcaagctggagagagtgaagaagctgaaggactacgccttcgtgcacttcgaggacagaggcgccgccgtgaaggccatggacgagatgaacggcaaggagatcgagggcgaggagatcgagatcgtgctggccaagccccccgacaagaagagaaaggagagacaggccgccagacaggccagcagaagcaccgcctacgaggactactactaccaccccccccccagaatgcccccccccatcagaggcagaggcagaggcggcggcagaggcggctacggctacccccccgactactacggctacgaggactactacgacgactactacggctacgactaccacgactacagaggcggctacgaggacccctactacggctacgacgacggctacgccgtgagaggcagaggcggcggcagaggcggcagaggcgccccccccccccccagaggcagaggcgcccccccccccagaggcagagccggctacagccagagaggcgcccccctgggcccccccagaggcagcagaggcggcagaggcggccccgcccagcagcagagaggcagaggcagcagaggcagcagaggcaacagaggcggcaacgtgggcggcaagagaaaggccgacggctacaaccagcccgacagcaagagaagacagaccaacaaccagcagaactggggcagccagcccatcgcccagcagcccctgcagcagggcggcgactacagcggcaactacggctacaacaacgacaaccaggagttctaccaggacacctacggccagcagtggaagtag

SEQ ID NO: 112056 - DNA, 1422 bp, Artificial Sequence
  derived and/or modified sequence
atgaaaacataccgacaacgcgaaaaacagggttctaaagtgcaggagtcaacgaaaggtcctgacgaggcgaaaattaaggctttgctggaacgtaccggatatacactggatgtgacaaccggccaacggaagtatggcgggccaccacctgactctgtatactccggagttcagcctggaatcgggaccgagtgtgatagctacgagattcggcctggtaaacacctcggtgtctgcatatcagtcgcaaataataggttgttcgtgggcagcataccaaagaacaaaacaaaggagaacatattagaagagttcagtaaggtaaccgaaggactcgtcgacgtcatcctgtaccaccagcccgatgacaagaagaagaaccgtggattctgttttttagagtatgaagaccataagtctgcagctcaggctcgacgccgactaatgagcggaaaggtcaaagtgtggggaaacgtcgtgacagttgaatgggcggaccccgtggaagagcccgatccagaggttatggctaaggttaaggtgctattcgtgcggaacctggccaccacagtgacggaggagatcttagagaagtcgttcagcgagtttggcaaactcgaaagggtgaaaaagctgaaggactacgcattcgtccattttgaggataggggcgctgccgtcaaagcgatggacgagatgaatggtaaggagattgagggtgaagaaatcgaaatcgtgcttgccaagcctcccgataagaagagaaaggaaagacaggccgcacgccaagcctccaggtctacagcctatgaggactactactaccaccctccccctcgcatgcctccacccatccgcggccgcggacgaggcggaggtcgcggagggtatggctatcctcctgattattacgggtatgaagactactacgacgactactatgggtacgactatcacgactaccgaggggggtatgaggatccatattacgggtatgacgatggatatgccgtgcgtggccgaggaggtggcagagggggtcgcggcgctcctcctcctccaagaggccgcggggccccacctcccagaggcagagcgggctactcccaaaggggagcacccttaggtccccctcgcggatctagggggggtaggggcggacccgctcaacagcaacgcggccgaggtagccggggatctagagggaaccgcggcgggaatgtgggaggaaaaaggaaggctgacgggtataatcagcccgatagcaaacggcgccagactaataaccaacagaactggggctcacagcccattgcacaacaaccgctgcagcaggggggagactactctgggaactacggatacaataacgacaaccaagagttctatcaggacacatatggccagcaatggaagtag

SEQ ID NO: 112057 - DNA, 1422 bp, Artificial Sequence
  derived and/or modified sequence
atgaagacctaccggcagcgggagaagcagggcagcaaggtgcaggagagcaccaagggcccagatgaggccaagatcaaggccctgctggagaggacaggctacaccctggatgtgaccaccggccagaggaaatatggaggccccccaccagattctgtgtacagcggcgtgcagcccggcatcggcacagaatgtgacagctatgagatccggcctgggaagcacctgggcgtgtgcatctctgtggccaacaaccggctgtttgtgggcagcatccccaagaacaagaccaaggagaacatcctggaggagttcagcaaggtgacagagggcctggtggatgtgatcctgtaccaccagccagatgacaagaagaagaacagaggcttctgcttcctggagtatgaggaccacaagtctgctgcccaggcccggcggcggctgatgtctgggaaggtgaaggtgtggggcaatgtggtgacagtggagtgggccgaccctgtggaggagccagaccctgaggtgatggccaaggtgaaggtgctgtttgtgaggaacctggccaccaccgtgacagaggagatcctggagaagagcttcagcgagtttgggaagctggagcgggtgaagaagctgaaggactatgcctttgtgcactttgaggacagaggagctgctgtgaaggccatggatgagatgaatggcaaggagattgaaggagaggagattgagatcgtgctggccaagcccccagacaagaagaggaaggagcggcaggccgcccggcaggccagccgcagcacagcctatgaggactactactaccaccccccacccaggatgcccccacccatccggggccggggccggggcggcggccggggcggctacggctaccccccagactactacggctatgaggactactatgatgactactacggctatgactaccatgactaccggggcggctatgaggacccctactacggctatgatgatggctatgctgtgcggggccggggcggcggccggggcggccgcggggcccctcctccaccccggggccgcggggcccccccaccccggggccgggccggctacagccagagaggagcccccctgggccccccccggggcagccggggcggccggggcggccctgcccagcagcagaggggccggggcagccggggcagccggggcaacagaggaggaaatgtgggcggcaagaggaaggcagatggctacaaccagcctgacagcaagaggcggcagaccaacaaccagcagaactggggcagccagcccatcgcccagcagcccctgcagcagggcggggactacagcggcaactacggctacaacaatgacaaccaggagttctaccaggacacctacggccagcagtggaagtag

SEQ ID NO: 112058 - DNA, 1422 bp, Artificial Sequence
  derived and/or modified sequence
atgaagacctaccggcagcgggagaagcagggcagcaaggtgcaggaatcaacaaagggaccagacgaagctaagattaaagccttactggagcgtactggctataccctcgacgtgactacaggacagagaaaatatgggggcccaccacccgacagtgtatactccggcgtacagcctgggattggcactgagtgtgactcatatgaaatccggccgggcaagcacttaggtgtgtgcatctccgtagccaataaccgactcttcgtgggaagcatacctaagaataaaactaaggaaaatattttggaggaattctcaaaggtcactgaggggttggtggacgtgatcttataccaccagcccgacgataagaaaaagaatcggggcttttgtttccttgaatacgaagaccacaagtctgccgcacaagctaggagacgattgatgagcgggaaagtgaaggtttggggaaatgtggttactgtcgagtgggctgaccctgtcgaggaacctgacccagaagttatggccaaagttaaggtcctttttgtccgaaaccttgcgacaacagtgacggaagagatcctcgagaagtcattttctgagtttggcaagctggaacgcgtaaaaaagctaaaggattacgccttcgttcatttcgaagaccgtggagccgcagtgaaggcgatggatgagatgaacggtaaagaaattgaaggggaagagatcgagatagtgctggccaagccccccgacaagaagcggaaggaaagacaggcagctcgccaggcgtctaggagcactgcgtacgaggactactactaccacccaccacctagaatgcccccccccattcgcggcagaggacggggagggggccgagggggatacggatatcccccagactattacggctatgaagactactacgatgactactatggctatgactatcatgattatagaggagggtatgaggacccctattacggctacgatgatggttacgccgtacgagggcgaggcggtggaagggggggaagaggcgctccacctccacctagggggcggggcgctccccccccaaggggacgcgcgggttactctcagaggggggcaccgttaggcccccctcggggctcaagaggagggcgcggtggaccagcccagcagcagcgcgggcggggcagtcgcggatccaggggcaaccgtggaggaaatgtaggggggaaacgcaaggccgacggctacaaccagcctgactcaaaacgacgccagaccaataaccagcagaactggggctcccaaccaattgcgcagcagcccctccagcaggggggcgattactccggaaactacgggtacaacaatgacaaccaggagttctatcaagacacctacggccagcagtggaaatag

SEQ ID NO: 112059 - DNA, 1422 bp, Artificial Sequence
  derived and/or modified sequence
atgaagacataccgccagagagaaaagcagggctccaaagtacaggaaagtaccaagggcccagatgaggccaagatcaaggctctcctggaacgcacgggatacactttggatgtgactacaggacagagaaagtacggtggcccacctcctgacagcgtgtattcaggagttcagcctggtataggcaccgagtgcgatagttatgagatacggccaggcaagcatcttggcgtgtgtatttcagtagccaacaaccgcctgtttgtcggcagtatcccaaagaacaagacgaaagagaacattctcgaagagttttccaaagtcacagaaggactggtggacgtgatactatatcatcagccggacgacaagaagaaaaaccgcggattttgttttctggaatacgaggaccacaaatccgccgctcaggctagaaggagacttatgtccggcaaagtgaaagtgtggggcaatgtggtgactgtggagtgggcagatccagtcgaagaacccgacccagaggtgatggctaaggttaaggtattgtttgtccgtaacctcgcgactacggtgaccgaggagattctcgagaaatccttcagtgagtttggtaagctcgaacgggtcaagaagctcaaagattacgcttttgtgcacttcgaagatcgaggagcagccgtgaaagcgatggacgaaatgaatggaaaggaaattgagggcgaggagattgagatagtgctagcaaagcctcccgataaaaagagaaaggagagacaagcagccaggcaggcctctagaagtactgcttacgaagactattactatcaccctccccctaggatgcctccacctattcgcggacgaggaagaggaggtggtaggggcggatacggatatccaccagactactacggctatgaagactactacgacgactactatggctacgattaccacgattaccgaggcggttacgaagacccatattatgggtacgatgatggatacgcagtaaggggaagaggcggtggtagaggtggcaggggggcacccccacctccacgcggtcgcggagcccctcccccacgagggagagctggctacagccaaaggggtgctccgcttgggcctcctcgcggaagcaggggcggtcgcggagggccagcccagcagcagaggggacgaggctcaaggggttctagagggaacagaggtggaaatgtgggaggtaagcgtaaagcagatggctacaatcagcccgactcaaagagacgccaaacaaataaccaacagaactgggggtcacaacctattgcccagcagcccctgcagcaagggggagattactccggaaattacggttacaacaatgacaatcaagagttttaccaggacacctatggccagcagtggaaatag

SEQ ID NO: 112060 - DNA, 1422 bp, Artificial Sequence
  derived and/or modified sequence
atgaagacctacagacagagagagaagcagggcagcaaggtgcaggagagcaccaagggccccgacgaggccaagatcaaggccctgctggagagaaccggctacaccctggacgtgaccaccggccagagaaagtacggcggccccccccccgacagcgtgtacagcggcgtgcagcccggcatcggcaccgagtgcgacagctacgagatcagacccggcaagcacctgggcgtgtgcatcagcgtggccaacaacagactgttcgtgggcagcatccccaagaacaagaccaaggagaacatcctggaggagttcagcaaggtgaccgagggcctggtggacgtgatcctgtaccaccagcccgacgacaagaagaagaacagaggcttctgcttcctggagtacgaggaccacaagagcgccgcccaggccagaagaagactgatgagcggcaaggtgaaggtgtggggcaacgtggtgaccgtggagtgggccgaccccgtggaggagcccgaccccgaggtgatggccaaggtgaaggtgctgttcgtgagaaacctggccaccaccgtgaccgaggagatcctggagaagagcttcagcgagttcggcaagctggagagagtgaagaagctgaaggactacgccttcgtgcacttcgaggacagaggcgccgccgtgaaggccatggacgagatgaacggcaaggagatcgagggcgaggagatcgagatcgtgctggccaagccccccgacaagaagagaaaggagagacaggccgccagacaggccagcagaagcaccgcctacgaggactactactaccaccccccccccagaatgcccccccccatcagaggcagaggcagaggcggcggcagaggcggctacggctacccccccgactactacggctacgaggactactacgacgactactacggctacgactaccacgactacagaggcggctacgaggacccctactacggctacgacgacggctacgccgtgagaggcagaggcggcggcagaggcggcagaggcgccccccccccccccagaggcagaggcgcccccccccccagaggcagagccggctacagccagagaggcgcccccctgggcccccccagaggcagcagaggcggcagaggcggccccgcccagcagcagagaggcagaggcagcagaggcagcagaggcaacagaggcggcaacgtgggcggcaagagaaaggccgacggctacaaccagcccgacagcaagagaagacagaccaacaaccagcagaactggggcagccagcccatcgcccagcagcccctgcagcagggcggcgactacagcggcaactacggctacaacaacgacaaccaggagttctaccaggacacctacggccagcagtggaagtag

SEQ ID NO: 112061 - DNA, 528 bp, Artificial Sequence
  derived and/or modified sequence
atgagactacctggggctcccgcacttcccgatgcggattttcttgtgcacctgcactttctggtccaaacatcatggttcatctgcaatttcctagtcagaatcccatgggctagcgccttacccgatgctccagcactcttagtaatactggagaagactttccccgagcacgcgacctgcaggggttgttgggtttccggatatctgtgctggaccgctcccggtaattgcatctgcagcgcaaatgtggggtttctgaaaatcgaaaatacctaccggcaaatacaccacactcatatgcaccgccatacccacacccacactgacaagagcatcacgcacacatgcactgatacacacacacagtcacaaagacaccgactgacttctcgcgcactgcgcctgttcatcctgaacgcaattaccgacacatccaagtttggtgcagccgtgtttttctatgtatactgtttgttcgccgactcggtgtataaattttttccatttttgcccccatttagatag

SEQ ID NO: 112062 - protein, 390 aa, Artificial Sequence
  derived and/or modified sequence
MSNIYIQEPPTNGKVLLKTTAGDIDIELWSKEAPKACRNFIQLCLEAYYDNTIFHRVVPGFIVQGGDPTGTGSGGESIYGAPFKDEFHSRLRFNRRGLVAMANAGSHDNGSQFFFTLGRADELNNKHTIFGKVTGDTVYNMLRLSEVDIDDDERPHNPHKIKSCEVLFNPFDDIIPREIKRLKKEKPEEEVKKLKPKGTKNFSLLSFGEEAEEEEEEVNRVSQSMKGKSKSSHDLLKDDPHLSSVPVVESEKGDAPDLVDDGEDESAEHDEYIDGDEKNLMRERIAKKLKKDTSANVKSAGEGEVEKKSVSRSEELRKEARQLKRELLAAKQKKVENAAKQAEKRSEEEEAPPDGAVAEYRREKQKYEALRKQQSKKGTSREDQEITKSS

SEQ ID NO: 112063 - DNA, 1173 bp, Artificial Sequence
  derived and/or modified sequence
atgagcaatatctacatccaagagcccccaactaatggaaaggtgctgttgaaaacgactgccggggatatcgacatagagctttggtcaaaggaggcccccaaagcttgcagaaactttattcagctctgtctcgaagcctactacgataacaccatcttccacagagtggtgccgggtttcatagttcaggggggagatccgacggggaccggctccggcggtgagagtatatacggggctccctttaaggatgagttccactcacggctgaggtttaaccggcggggactggtggccatggctaacgccggcagtcacgataatggatcacagttcttcttcacactgggccgggcagacgaactgaacaacaagcacacgatcttcggaaaggtaacaggagacacggtgtataatatgttaaggctcagcgaggtagatatcgacgacgatgaacgcccgcacaatccacataagatcaaaagttgcgaagttttgttcaatcccttcgacgacatcatcccacgagagattaagcggcttaagaaggagaaacccgaggaggaagtcaagaagcttaagcctaaaggaacgaaaaacttctccctgctgtcattcggcgaggaggccgaggaagaggaagaggaggtgaaccgtgtgtcacagtccatgaagggtaagagtaagagctcacatgatcttctaaaggatgacccgcacctaagctccgtgcctgtcgtggagtctgaaaaaggagacgcccccgatctggtggatgatggcgaggacgagagcgctgagcacgacgagtacattgatggcgacgaaaagaacctgatgagagaaaggatcgcaaaaaagctgaagaaagacacttccgctaatgttaaaagcgcaggggagggcgaagtggaaaaaaaatcagttagccggagtgaggaactcaggaaggaagctagacagctgaagcgggagcttctggcagccaagcagaagaaggtggagaacgctgccaagcaggctgaaaagaggtccgaggaggaggaggccccccccgacggggcagtggccgagtacaggcgcgagaaacagaaatacgaggcactgagaaagcaacaatccaagaagggcacctcacgagaagatcaggaaattacaaagagctcgtag

SEQ ID NO: 112064 - DNA, 1173 bp, Artificial Sequence
  derived and/or modified sequence
atgagcaacatctacatccaggagccccccaccaacgggaaggtgctgctgaagaccacagctggggacatcgacatcgagctgtggagcaaggaggcccccaaggcctgcaggaacttcatccagctgtgcctggaggcctactatgacaacaccatcttccaccgggtggtgcccggcttcatcgtgcagggcggggaccccactggaactggaagtggaggagagagcatctatggagcccccttcaaggatgagttccacagccggctgcgcttcaacagaagaggcctggtggccatggccaatgccggcagccatgacaatggcagccagttcttcttcaccctgggccgggcagatgagctgaacaacaagcacaccatctttgggaaggtgactggagacacagtgtacaacatgctgcggctgtctgaggtggacattgatgatgatgagcggccccacaacccccacaagatcaagagctgtgaggtgctcttcaacccctttgatgacatcatcccccgggagatcaagaggctgaagaaggagaagccagaggaggaggtgaagaagctgaagcccaagggcaccaagaacttcagcctgctgagctttggagaggaggccgaggaggaggaggaggaggtgaacagagtgtcccagagcatgaagggcaagagcaagagcagccatgacctgctgaaggatgacccccacctgagctctgtgcctgtggtggagagcgagaagggagatgccccagacctggtggatgatggagaagatgagagcgctgagcatgatgagtacattgatggagatgagaagaacctgatgagggagagaattgccaagaagctgaagaaggacaccagcgccaacgtgaagtctgctggggagggggaggtggagaagaagtctgtgagccgctctgaggagctgaggaaggaggcccggcagctgaagcgggagctgctggccgccaagcagaagaaggtggagaatgctgccaagcaggccgagaagaggtctgaggaggaggaggcccccccagatggagctgtggccgagtacagaagagagaagcagaagtatgaggccctgaggaagcagcagagcaagaagggcaccagccgggaggaccaggagatcaccaagagcagctag

SEQ ID NO: 112065 - DNA, 1173 bp, Artificial Sequence
  derived and/or modified sequence
atgagcaacatctacatccaggagccccccaccaacggcaaggtgctgctgaaaactacagcgggtgatatcgacattgaattgtggagcaaggaagccccaaaagcttgccggaattttatccaactctgcctggaggcctattatgataacacaatttttcatcgagtcgtgcccggatttatcgttcaagggggagatcctactggcacgggctcagggggggaaagcatttatggggcacccttcaaagatgaatttcatagccgtcttcggttcaaccgaagggggctggtggcgatggcgaatgccggatcccacgataacggatcccaattcttctttacactcggaagagcagatgaactcaacaataagcacaccatctttggaaaggttacaggggatacagtgtacaacatgctgaggcttagcgaggtagatattgacgatgatgaaaggccgcacaacccccacaagataaaatcatgcgaggttctctttaacccttttgacgatattattcctagagagattaaacgactcaaaaaggagaaacccgaagaagaggtcaagaagttgaagccaaaaggtaccaaaaacttctcccttctcagtttcggggaggaagctgaagaagaggaagaggaggtgaacagggtgtcacaatcaatgaagggcaagagtaagagctcacacgatctgctcaaggacgaccctcatctaagcagcgtccccgtagttgaatcggagaaaggcgatgcacccgatttggttgacgacggggaggatgaatccgccgagcacgacgagtacattgacggcgacgaaaagaacctgatgcgcgagaggatcgcaaaaaagttgaaaaaagacacctccgccaacgtaaaaagtgcaggggaaggggaagtagagaaaaagagcgtgtcgagaagcgaggagttacggaaggaagcccgccagctgaagagagaattactggcagccaaacaaaagaaagtagagaacgcagccaaacaggcagagaagaggtcagaggaagaggaggctcctccagacggagccgtagccgagtatagacgcgaaaaacagaaatatgaggccctgcgcaagcagcagagtaagaaggggacatccagagaggaccaggagatcacaaaaagcagctag

SEQ ID NO: 112066 - DNA, 1173 bp, Artificial Sequence
  derived and/or modified sequence
atgagtaacatctatatacaggaacctccaactaatggcaaggtcctgctgaagacaactgcaggagacatcgatatagaactctggtcgaaagaagccccaaaggcatgtcgtaattttattcagctctgtctggaagcctactacgataacacaatcttccaccgcgttgtccccggatttatcgttcagggcggtgaccccactggaaccggtagtggaggggaatcaatttacggcgctccatttaaagacgaattccacagcaggctcaggttcaaccgacgaggcctggttgccatggctaatgcaggttcacatgataacgggagtcaattttttttcacactgggacgagctgacgagttaaacaataaacatacaatcttcgggaaggtcaccggagatacagtctacaacatgcttagattgagcgaggtagatatcgacgacgacgagaggcctcataacccccataagattaagagctgtgaggtgctgttcaacccattcgatgatattatcccacgagaaataaaacggctgaagaaggagaaacctgaagaagaagtgaaaaagctgaaacctaagggcacaaaaaacttctctctcctcagctttggggaggaagctgaagaagaggaggaagaggtgaaccgggtgagccaatcaatgaaaggtaagtctaaatcatcacacgatctgctgaaggatgatcctcacctgagcagcgtgccggtagttgagtccgaaaaaggcgatgctcctgacctggtggacgatggagaagatgagtccgccgagcacgatgagtacattgatggcgacgagaagaaccttatgagggagaggatcgcgaaaaaactgaagaaggacacctccgccaacgtgaaaagcgccggagagggagaggtcgagaaaaaaagcgtatcccgaagtgaggaactcagaaaagaggctcgtcaactgaagagggaactgcttgccgctaagcagaaaaaggtcgaaaatgccgctaagcaggcagagaaacgatcagaagaggaggaagcccctcctgacggggctgtagccgagtataggagggaaaagcagaagtacgaggcccttaggaagcagcagtccaagaagggaacatcccgtgaagaccaggaaatcactaagtcaagctag

SEQ ID NO: 112067 - DNA, 1368 bp, Artificial Sequence
  derived and/or modified sequence
aacaacatggcggcgtccgtgaggggctcctttgggcaggggtagtgtttggtgtccctgtcttgcgtgatattgacaaactgaagctttcctgcaccactggacttaaggaagagtgtactcgtaggcggacagctttagtggccggccggccgctctcatcccccgtaaggagcagagtcctttgtactgaccaagatgagcaacatctacatccaggagcctcccacgaatgggaaggttttattgaaaactacagctggagatattgacatagagttgtggtccaaagaagctcctaaagcttgcagaaattttatccaactttgtttggaagcttattatgacaataccatttttcatagagttgtgcctggtttcatagtccaaggcggagatcctactggcacagggagtggtggagagtctatctatggagcgccattcaaagatgaatttcattcacggttgcgttttaatcggagaggactggttgccatggcaaatgctggttctcatgataatggcagccagtttttcttcacactgggtcgagcagatgaacttaacaataagcataccatctttggaaaggttacaggggatacagtatataacatgttgcgactgtcagaagtagacattgatgatgacgaaagaccacataatccacacaaaataaaaagctgtgaggttttgtttaatccttttgatgacatcattccaagggaaattaaaaggctgaaaaaagagaaaccagaggaggaagtaaagaaattgaaacccaaaggcacaaaaaattttagtttactttcatttggagaggaagctgaggaagaagaggaggaagtaaatcgagttagtcagagcatgaagggcaaaagcaaaagtagtcatgacttgcttaaggatgatccacatctcagttctgttccagttgtagaaagtgaaaaaggtgatgcaccagatttagttgatgatggagaagatgaaagtgcagagcatgatgaatatattgatggtgatgaaaagaacctgatgagagaaagaattgccaaaaaattaaaaaaggacacaagtgcgaatgttaaatcagctggagaaggagaagtggagaagaaatcagtcagccgcagtgaagagctcagaaaagaagcaagacaattaaaacgggaactcttagcagcaaaacaaaaaaaagtagaaaatgcagcaaaacaagcagaaaaaagaagtgaagaggaagaagcccctccagatggtgctgttgccgaatacagaagagaaaagcaaaagtatgaagctttgaggaagcaacagtcaaagaagggaacttcccgggaagatcaggaaatcacaaagtcttct

SEQ ID NO: 112068 - DNA, 1173 bp, Artificial Sequence
  derived and/or modified sequence
atgagcaacatctacatccaggagccccccaccaacggcaaggtgctgctgaagaccaccgccggcgacatcgacatcgagctgtggagcaaggaggcccccaaggcctgcagaaacttcatccagctgtgcctggaggcctactacgacaacaccatcttccacagagtggtgcccggcttcatcgtgcagggcggcgaccccaccggcaccggcagcggcggcgagagcatctacggcgcccccttcaaggacgagttccacagcagactgagattcaacagaagaggcctggtggccatggccaacgccggcagccacgacaacggcagccagttcttcttcaccctgggcagagccgacgagctgaacaacaagcacaccatcttcggcaaggtgaccggcgacaccgtgtacaacatgctgagactgagcgaggtggacatcgacgacgacgagagaccccacaacccccacaagatcaagagctgcgaggtgctgttcaaccccttcgacgacatcatccccagagagatcaagagactgaagaaggagaagcccgaggaggaggtgaagaagctgaagcccaagggcaccaagaacttcagcctgctgagcttcggcgaggaggccgaggaggaggaggaggaggtgaacagagtgagccagagcatgaagggcaagagcaagagcagccacgacctgctgaaggacgacccccacctgagcagcgtgcccgtggtggagagcgagaagggcgacgcccccgacctggtggacgacggcgaggacgagagcgccgagcacgacgagtacatcgacggcgacgagaagaacctgatgagagagagaatcgccaagaagctgaagaaggacaccagcgccaacgtgaagagcgccggcgagggcgaggtggagaagaagagcgtgagcagaagcgaggagctgagaaaggaggccagacagctgaagagagagctgctggccgccaagcagaagaaggtggagaacgccgccaagcaggccgagaagagaagcgaggaggaggaggccccccccgacggcgccgtggccgagtacagaagagagaagcagaagtacgaggccctgagaaagcagcagagcaagaagggcaccagcagagaggaccaggagatcaccaagagcagctag

SEQ ID NO: 112069 - protein, 250 aa, Artificial Sequence
  derived and/or modified sequence
MSDEEVEQVEEQYEEEEEAQEEEEVQEEEKPRPKLTAPKIPEGEKVDFDDIQKKRQNKDLMELQALIDSHFEARKKEEEELVALKERIEKRRAERAEQQRIRAEKERERQNRLAEEKARREEEDAKRRAEDDLKKKKALSSMGANYSSYLAKADQKRGKKQTAREMKKKILAERRKPLNIDHLGEDKLRDKAKELWETLHQLEIDKFEFGEKLKRQKYDITTLRSRIDQAQKHSKKAGTPAKGKVGGRWK

SEQ ID NO: 112070 - protein, 720 aa, Artificial Sequence
  derived and/or modified sequence
MEPVETWTPGKVATWLRGLDDSLQDYPFEDWQLPGKNLLQLCPQSLEALAVRSLGHQELILGGVEQLQALSSRLQTENLQSLTEGLLGATHDFQSIVQGCLGDCAKTPIDVLCAAVELLHEADALLFWLSRYLFSHLNDFSACQEIRDLLEELSQVLHEDGPAAEKEGTVLRICSHVAGICHNILVCCPKELLEQKAVLEQVQLDSPLGLEIHTTSNCQHFVSQVDTQVPTDSRLQIQPGDEVVQINEQVVVREERDMVGWPRKNMVRELLREPAGLSLVLKKIPIPETPPQTPPQVLDSPHQRSPSLSLAPLSPRAPSEDVFAFDLSSNPSPGPSPAWTDSASLGPEPLPIPPEPPAILPAGVAGTPGLPESPDKSPVGRKKSKGLATRLSRRRVSCRELGRPDCDGWLLLRKAPGGFMGPRWRRRWFVLKGHTLYWYRQPQDEKAEGLINVSNYSLESGHDQKKKYVFQLTHDVYKPFIFAADTLTDLSMWVRHLITCISKYQSPGRAPPPREEDCYSETEAEDPDDEAGSHSASPSPAQAGSPLHGDTSPAATPTQRSPRTSFGSLTDSSEEALEGMVRGLRQGGVSLLGQPQPLTQEQWRSSFMRRNRDPQLNERVHRVRALQSTLKAKLQELQVLEEVLGDPELTGEKFRQWKEQNRELYSEGLGAWGVAQAEGSSHILTSDSTEQSPHSLPSDPEEHSHLCPLTSESSLRPPDL

SEQ ID NO: 112071 - protein, 311 aa, Artificial Sequence
  derived and/or modified sequence
MEPVETWTPGKVATWLRGLDDSLQDYPFEDWQLPGKNLLQLCPQSLEALAVRSLGHQELILGGVEQLQALSSRLQTENLQSLTEGLLGATHDFQSIVQGCLGDCAKTPIDVLCAAVELLHEADALLFWLSRYLFSHLNDFSACQEIRDLLEELSQVLHEDLQPRGWDLPQHPGLLPQGAAGTEGRARAGAAGQSIGPRNSHHHPHTCLQTPPNRHLPLLRPPSSLQTPPQVPAPAAPLPLLPPNLLSDPCLHCFVPGCSPDAPSGPGLPAPEEPITVSGPTVSQVTGSVQVCLGGETVGSSHPPCPPQGPI

SEQ ID NO: 112072 - DNA, 2538 bp, Artificial Sequence
  derived and/or modified sequence
ggcaaaacaggagctgattcgagctggcagagctgggccatggaaccggtagagacctggacccccggaaaggtggcaacttggctgagaggtcttgacgactccctgcaggactatccctttgaggactggcagctgcctggcaagaacctgctccagctctgcccccaaagcctcgaggctctggctgtgcggtctctgggacaccaggagctcatcctgggcggggtggaacagctccaggccctgagctccaggctacagacagagaacctgcaaagcctgacagagggacttctgggggcaacccatgacttccagagcatagtccaaggctgcctgggggactgtgccaagacccctattgatgtcctctgtgcagctgtggagctgttgcatgaagctgacgccctcctcttctggctcagcaggtacctcttctcccacttaaatgatttctcagcatgccaggagatccgagacttgttggaggagctgagccaggtcttgcatgaggatggtccagcggctgagaaggagggcacagtcctgaggatctgcagccacgtggctgggatctgccacaacatcctggtctgctgccccaaggagctgctggaacagaaggccgtgctcgagcaggtgcagctggacagtccattgggcctagaaattcacaccaccagcaattgccagcactttgtgtcccaagtggacacccaggttcccactgactcccgactgcagatccagcctggagacgaggttgtccagatcaacgagcaggtggtggtgcgtgaggagagggacatggtgggatggccccgtaagaacatggtgagggaactgctgcgggagccagccggactcagcttagtgctgaagaagatcccgataccggagacccccccacagacgccccctcaggtcctggactccccgcaccagaggagcccatcactgtctctggccccactgtctcccagggccccatctgaagacgtctttgcctttgacctgtcttcaaaccccagtcccggacccagccctgcctggacagactctgcctcccttggccctgagcccctgcccatccccccggaacccccagccatactcccagcaggggtagcagggactccagggctccctgaatcccctgacaagagtcctgttggtcggaagaaatcaaaaggcctggcgacccggctgagccgccggcgggtgtcatgccgtgagctgggccggccggactgtgacggctggctcctgttgcgaaaggcaccgggcggcttcatgggcccgcgctggcgccgccgctggtttgtgctcaagggacacacgctctactggtaccgccagccccaggatgagaaggctgagggcctcatcaatgtctccaactatagtctggaaagtggacatgatcagaagaagaaatatgtgtttcagctcacccatgatgtgtacaaacccttcatcttcgctgctgataccctgacagatctgagcatgtgggtgcgtcatctcattacctgcatctccaagtaccagtctccaggccgggcccccccaccccgagaggaagactgctacagtgagaccgaagcagaggacccggacgatgaggctgggtcccactcagcctcgcccagccctgctcaagctgggagtcccctccatggagacacatcacctgcagccacccccacacagcgcagcccacggacctcctttggctctctgacagacagcagtgaagaggcactggaaggaatggtacgggggctgaggcagggtggcgtgtccctcctaggccagccacagcccctgacccaggaacagtggcggagctctttcatgcggcgcaaccgagaccctcagctcaatgagcgagtgcaccgtgtgcgggcgctacagagcacactcaaggcaaagctgcaggagctgcaggtcctagaagaagtgctgggtgaccctgagctgacaggagagaagttccgccagtggaaggagcagaaccgggagctgtactcagagggcctgggggcctggggagtggcacaggctgaaggcagctcccacatcttgacctctgactccacagaacagtccccccactccctgccctctgaccctgaagagcactcccatctctgccccctgacctcagagagcagcctccgacctcctgacctctgaccctggccagcactctagctcctgacctttgacccgagggccacctcaaccccagcttctgacgtgtccaggacagagcatccctggattctgttcagggtgggaagtagtactgctagtcatggtctcaccccgagctgacccctctgcctgggctttgtgccaccctctcccttgccaaagaagaaactctccccccaaatcctccaacctctggggccacagccctgcccctccagttccttggcagttctcccccaaaccaggtctgtacaggtgttctttattttacatgagggctactttccaaccaaataaagtcaatttttctaagaa

SEQ ID NO: 112073 - DNA, 2163 bp, Artificial Sequence
  derived and/or modified sequence
atggagcccgtggagacctggacccccggcaaggtggccacctggctgagaggcctggacgacagcctgcaggactaccccttcgaggactggcagctgcccggcaagaacctgctgcagctgtgcccccagagcctggaggccctggccgtgagaagcctgggccaccaggagctgatcctgggcggcgtggagcagctgcaggccctgagcagcagactgcagaccgagaacctgcagagcctgaccgagggcctgctgggcgccacccacgacttccagagcatcgtgcagggctgcctgggcgactgcgccaagacccccatcgacgtgctgtgcgccgccgtggagctgctgcacgaggccgacgccctgctgttctggctgagcagatacctgttcagccacctgaacgacttcagcgcctgccaggagatcagagacctgctggaggagctgagccaggtgctgcacgaggacggccccgccgccgagaaggagggcaccgtgctgagaatctgcagccacgtggccggcatctgccacaacatcctggtgtgctgccccaaggagctgctggagcagaaggccgtgctggagcaggtgcagctggacagccccctgggcctggagatccacaccaccagcaactgccagcacttcgtgagccaggtggacacccaggtgcccaccgacagcagactgcagatccagcccggcgacgaggtggtgcagatcaacgagcaggtggtggtgagagaggagagagacatggtgggctggcccagaaagaacatggtgagagagctgctgagagagcccgccggcctgagcctggtgctgaagaagatccccatccccgagacccccccccagacccccccccaggtgctggacagcccccaccagagaagccccagcctgagcctggcccccctgagccccagagcccccagcgaggacgtgttcgccttcgacctgagcagcaaccccagccccggccccagccccgcctggaccgacagcgccagcctgggccccgagcccctgcccatcccccccgagccccccgccatcctgcccgccggcgtggccggcacccccggcctgcccgagagccccgacaagagccccgtgggcagaaagaagagcaagggcctggccaccagactgagcagaagaagagtgagctgcagagagctgggcagacccgactgcgacggctggctgctgctgagaaaggcccccggcggcttcatgggccccagatggagaagaagatggttcgtgctgaagggccacaccctgtactggtacagacagccccaggacgagaaggccgagggcctgatcaacgtgagcaactacagcctggagagcggccacgaccagaagaagaagtacgtgttccagctgacccacgacgtgtacaagcccttcatcttcgccgccgacaccctgaccgacctgagcatgtgggtgagacacctgatcacctgcatcagcaagtaccagagccccggcagagcccccccccccagagaggaggactgctacagcgagaccgaggccgaggaccccgacgacgaggccggcagccacagcgccagccccagccccgcccaggccggcagccccctgcacggcgacaccagccccgccgccacccccacccagagaagccccagaaccagcttcggcagcctgaccgacagcagcgaggaggccctggagggcatggtgagaggcctgagacagggcggcgtgagcctgctgggccagccccagcccctgacccaggagcagtggagaagcagcttcatgagaagaaacagagacccccagctgaacgagagagtgcacagagtgagagccctgcagagcaccctgaaggccaagctgcaggagctgcaggtgctggaggaggtgctgggcgaccccgagctgaccggcgagaagttcagacagtggaaggagcagaacagagagctgtacagcgagggcctgggcgcctggggcgtggcccaggccgagggcagcagccacatcctgaccagcgacagcaccgagcagagcccccacagcctgcccagcgaccccgaggagcacagccacctgtgccccctgaccagcgagagcagcctgagaccccccgacctgtag

SEQ ID NO: 112074 - DNA, 2163 bp, Artificial Sequence
  derived and/or modified sequence
atggagccagttgagacctggaccccggggaaagtcgcgacgtggctccgcggcctcgatgatagcctccaggattacccttttgaggattggcagttgccgggaaaaaatttgcttcagctgtgtcctcagtctcttgaggccctcgccgttcggtcactgggccaccaggagttgatcctgggcggagtcgagcagctccaggctctctcatctcgtctacagacagaaaacctgcaaagtctcactgagggcctcctgggtgctacacacgatttccagagcatcgttcaaggatgcctgggtgattgtgccaagaccccaatagacgtgctgtgtgctgccgtggagctgcttcacgaagctgacgccctgctgttctggcttagcaggtatctgttttcgcatcttaacgacttttcagcttgtcaggagatacgggatttattagaggaactgagccaagttctccatgaggacggccctgcagctgagaaggaaggaaccgtcctgcgcatctgctcccacgttgccggaatctgtcacaacattctggtgtgctgtccgaaagaattgctggaacagaaagccgtcctggaacaggtgcagctggacagccctctgggcttagagattcacacgacatcaaactgccagcacttcgtctcccaagttgacacacaggttcctaccgactccagattacagatccagccaggagacgaggttgtgcagataaatgagcaggtggtggttcgtgaggagagagacatggttggttggcccagaaagaatatggtgcgggagctgctgagggagcctgctggcttatctctggtccttaaaaagattcccatccctgaaacccccccccagacccccccccaggtcctggattcacctcaccagcgtagtccttcgctgagcctggcacctctcagtccccgagcaccatcagaggacgtgttcgcattcgacctgagttccaacccaagccccggcccgtctcccgcctggacagattccgcctctctgggacccgaaccacttccaatccctcccgaaccccccgccatattaccagcaggcgtcgccggaactcctgggctgcccgaatctcctgataagtctcctgtcggcaggaaaaaatcaaaaggacttgccacccggttatctcgaagacgtgtgtcttgccgcgagctggggcggcctgactgcgatgggtggctcctcctgcggaaggcacccggcggattcatgggaccccggtggcggcgccgctggttcgtgctcaaagggcatacactctactggtaccgccagcctcaggacgagaaagctgagggcctgatcaatgtgtccaactacagtttggaatcaggccatgaccagaaaaaaaaatacgtcttccagctgactcacgatgtgtacaaaccattcattttcgccgctgataccctaacagacctgtcgatgtgggtgaggcatctgattacctgtatttctaagtaccaaagtcctgggcgtgccccacctcccagggaggaggattgttacagcgaaaccgaggcagaagatcctgatgatgaggcaggatcacatagcgcctcaccctcccctgcccaggcgggcagccctttacacggggacacaagcccagcagccacccccacccaacgatctccacggactagtttcggttctctgaccgattcctccgaggaagctttggagggaatggtcagaggcctgaggcaaggcggagtgtcccttctgggccaaccacagccactcacacaggaacagtggagaagttcgtttatgcggagaaaccgggaccctcagctgaacgaacgcgtgcacagagtgcgggctttgcagagtactctgaaagcaaaattacaggagctccaagtgctggaggaggttctcggagaccctgagcttactggtgagaagtttcgccagtggaaagaacagaaccgggagctgtatagtgagggcctaggcgcctggggggtggcccaggctgagggtagttcgcacatcctgacaagcgactcaacggaacaaagcccacacagcctgccatccgatccggaggagcactctcacctttgccccctgaccagcgaaagtagcctgagaccccccgacctgtag

SEQ ID NO: 112075 - DNA, 2163 bp, Artificial Sequence
  derived and/or modified sequence
atggagcctgtggagacctggaccccaggcaaggtggccacctggctgcggggcctggatgacagcctgcaggactacccctttgaggactggcagctgcccgggaagaacctgctgcagctgtgcccccagagcctggaggccctggccgtgcgcagcctgggccaccaggagctgatcctgggcggcgtggagcagctgcaggccctgagcagccggctgcagacagagaacctgcagagcctgacagagggcctgctgggcgccacccatgacttccagagcatcgtgcagggctgcctgggggactgtgccaagacccccattgatgtgctgtgtgccgctgtggagctgctgcacgaggctgatgccctgctcttctggctgagccgctacctgttcagccacctgaatgacttcagcgcctgccaggagatccgggacctgctggaggagctgagccaggtgctgcatgaagatggccctgctgctgagaaggagggcaccgtgctgcgcatctgcagccacgtggccggcatctgccacaacatcctggtgtgctgccccaaggagctgctggagcagaaggctgtgctggagcaggtgcagctggacagccccctgggcctggagatccacaccaccagcaactgccagcactttgtgtcccaggtggacacccaggtgcccacagacagccggctgcagatccagcctggagatgaggtggtgcagatcaatgagcaggtggtggtgcgggaggagcgggacatggtgggctggcccaggaagaacatggtgcgggagctgctgcgggagcctgctggcctgagcctggtgctgaagaagatccccatccctgagaccccaccccagaccccaccccaggtgctggacagcccccaccagaggagccccagcctgagcctggcccccctgagcccccgggcccccagtgaagatgtgtttgcctttgacctgagcagcaaccccagccctggccccagccctgcctggacagacagcgccagcctgggccctgagcccctgcccatccccccagagcccccagccatcctgcctgctggggtggccggcaccccaggcctgcctgagagcccagacaagagccctgtgggcaggaagaagagcaagggcctggccacccggctgagcagaagaagagtgtcctgccgggagctgggccgcccagactgtgatggctggctgctgctgaggaaggcccctgggggcttcatgggcccccgctggaggcggcgctggtttgtgctgaagggccacaccctgtactggtaccggcagccccaggatgagaaggccgagggcctcatcaacgtgagcaactacagcctggagagcggccatgaccagaagaagaagtatgtgttccagctgacccatgatgtgtacaagcccttcatctttgctgctgacaccctgacagacctgtccatgtgggtgcgccacctgatcacctgcatcagcaagtaccagagccctggccgggcccccccaccccgggaggaggactgctacagcgagacagaagcagaagatcctgatgatgaagctggcagccacagcgccagccccagccctgcccaggccggcagccccctgcacggggacaccagccctgctgccacccccacccagaggagccccaggaccagctttggcagcctgacagacagcagcgaggaggccctggagggcatggtgcggggcctgcggcagggcggcgtgtccctgctgggccagccccagcccctgacccaggagcagtggaggagcagcttcatgagaagaaacagagacccccagctgaatgaaagagtgcaccgggtgcgggccctgcagagcaccctgaaggccaagctgcaggagctgcaggtgctggaggaggtgctgggggaccctgagctgaccggggagaagttccggcagtggaaggagcagaaccgggagctgtacagcgagggcctgggcgcctggggcgtggcccaggccgagggcagcagccacatcctgaccagtgacagcacagagcagagcccccacagcctgcccagcgaccctgaggagcacagccacctgtgccccctgaccagcgagagcagcctgcggcccccagacctgtag

SEQ ID NO: 112076 - DNA, 2163 bp, Artificial Sequence
  derived and/or modified sequence
atggagcccgtggagacctggacccccggcaaggtggccacctggctgagaggccttgatgacagcctgcaggactacccatttgaagactggcagttacccggtaaaaacctcctccagctatgcccccagtcactggaggccttggcagtgcgcagtttgggccatcaagaattaattctgggcggcgtggagcagttgcaggccttgagttcacgtctccaaaccgagaacctgcagagtttgacagagggcctccttggagctacgcatgacttccaatcaatcgtccagggctgtctgggcgattgtgccaagacccccatcgatgttctgtgcgcagcagtggaactcctgcatgaggccgatgcccttctcttctggttgagtcgatatttgttctctcacctgaatgacttctcagcctgtcaagaaattagggacctgctagaagaacttagtcaggtgcttcacgaggacgggcccgccgctgaaaaggagggaaccgttctgaggatttgtagtcacgtagcaggcatatgccacaatattcttgtatgttgtcccaaggaactgctcgagcagaaggccgtacttgaacaggtgcagctggactcgcctctgggtctagagatccatacaacaagcaactgccagcatttcgtgtctcaggttgatactcaggtgcccacggattctagactccagatccagcccggggacgaagtggtccagatcaatgagcaggtagttgtgagggaagagagagatatggtgggttggccccgcaaaaacatggtgcgagaactcctaagggagcccgctggcttgtcgctggtgctaaagaagattcccatccctgagactcctccacagacaccacctcaggtgttagatagcccacatcaacgctccccttccctatctctggcaccgctttcccctcgggcgcccagcgaagacgtgttcgcttttgacctttctagtaatccctcacccggaccttcccctgcctggactgactcagcctcactgggtccagaaccattgccaatcccaccggaaccaccagcaatcctacccgccggagttgccggtactcccggtttacctgaatctcccgacaaaagccccgttggtaggaaaaagtctaaggggttggccacaagactaagcaggagaagagtgtcttgccgggagttagggcgaccagattgcgacggctggcttctcttacgaaaggctcccggggggttcatgggcccccgctggcgccggcggtggtttgtgcttaaggggcacacactgtattggtatcgtcagcctcaggatgagaaagccgagggcttaatcaatgtgagcaattatagcttggagtcaggtcacgaccagaaaaaaaagtacgtgttccaactaacacacgacgtctacaagccatttattttcgccgccgatacactgaccgatctgagcatgtgggtgcgacacctcattacgtgtatctcaaaatatcaatcccccggacgagccccgcctcctcgcgaggaggactgttactcagagaccgaggctgaagatccagatgacgaggctgggtctcactctgcttctccgtctcccgcacaggctggttcacctctccacggtgacaccagcccggccgccactcccacccaacgaagtccacggacaagttttggctccctgactgatagcagcgaggaagcgttggagggtatggtgcgcgggctgcgtcaggggggagtgtcccttctgggacagccacagccactcactcaggagcagtggcgctcctcctttatgagaaggaatcgggaccctcagttgaatgaacgagtgcatcgggtgagggccctccagtccacccttaaagccaaactgcaggagctgcaagtgctggaggaagtactcggtgatcccgagctgacgggtgaaaagtttcgccagtggaaagagcagaacagggagctgtactcggagggtttaggtgcatggggcgttgcacaggcagagggatccagccacattctcacttctgatagcacggagcaatccccccactcacttccatctgaccctgaagagcactctcacctgtgtcctctgactagtgagagtagcctacgaccgccggatctgtag

SEQ ID NO: 112077 - DNA, 2163 bp, Artificial Sequence
  derived and/or modified sequence
atggaacccgtggaaacttggacgccaggcaaagtggcaacctggctaaggggcttagacgacagcctgcaggactacccatttgaggactggcaactgcccggtaagaacctactgcaattgtgtcctcaaagcctcgaggctctcgctgttaggagccttggtcatcaggagctcattctgggaggcgtagagcagctacaggccctgagcagtagattacagactgaaaacctgcagtctctcaccgagggtctgctaggcgctacgcacgattttcagtctatcgttcaagggtgtctaggggactgcgcaaaaacacccattgacgtgttgtgcgccgctgttgagcttttgcacgaggctgacgccctattgttttggctgagtaggtatctgtttagccacttgaatgacttcagtgcttgtcaagaaataagggacctgctcgaggaactgagtcaagtgctgcatgaagatggcccagccgcagaaaaggaaggcacggtgctgagaatttgttcacacgtcgcaggcatctgtcacaatattctggtgtgctgcccaaaggagcttctggagcaaaaggccgtattggaacaggtccaactggacagccccctgggtcttgagatacacacaacctcaaattgtcagcacttcgtctcccaggtcgatacacaggttccaactgactctcgtctgcagatacaaccaggcgacgaggtagtgcagatcaacgagcaagtggtagttagggaggagcgtgatatggtgggatggcccaggaagaatatggtaagggaactcttgagagaaccagctggcctgtcgcttgtcttgaagaagatcccaatccctgagactcctccccaaacacccccacaagtcctggatagcccacatcagaggtcacccagtcttagtcttgccccactgtcgcctcgagctccctctgaggacgtcttcgccttcgacctgagcagcaatccttccccagggccatcacccgcatggactgactcagcctctctagggcctgaacccctcccaataccccctgagccacccgcaatcctgcccgctggcgtcgcgggaactcctgggttaccagaatcaccagacaagagccctgtgggaagaaagaagagtaagggactcgcaacacggttgagtcgacgtcgggtttcatgtcgcgagctgggaagacccgattgcgacggatggttgttgttgagaaaagctcctggcggatttatgggtccgcgatggcggcgacggtggtttgtcctgaaggggcacaccctatactggtataggcagccccaggacgagaaagcagagggtttgattaacgtgtctaattactcactggagtccggacatgatcagaagaaaaagtatgtatttcagctgactcacgacgtgtataaaccctttattttcgcggctgacacattaacagacttgtctatgtgggtcaggcacctcattacttgcatatccaaataccagtctcctggccgtgcacctcccccacgggaggaggattgttacagtgagaccgaagccgaggacccggacgatgaagcaggcagccactctgcgagcccttccccagcgcaagcaggatcaccattacatggagataccagccctgctgccaccccgacccagaggagccctagaacatcttttggttcgttgactgacagctccgaggaggccctcgaagggatggttcggggactgagacagggtggagtgtcattgctagggcagcctcagccattaactcaggagcagtggagaagttctttcatgcgacgtaacagagatccccagctcaacgagagagtgcatagggtccgagctctgcaatccactctgaaagccaagcttcaggagctgcaggtgctggaagaagtcctgggcgacccagagctgaccggtgagaagttccgccaatggaaggagcagaaccgcgaattgtattcagaaggtctcggcgcttggggggtggctcaggccgaaggaagctcccatattctgacctcagacagcaccgagcagtctccccactccctacccagcgacccggaggaacatagccacttatgccctctcacttccgaaagttcgcttcgccctcccgacctatag

SEQ ID NO: 112078 - protein, 684 aa, Artificial Sequence
  derived and/or modified sequence
MAMDSSLQARLFPGLAIKIQRSNGLIHSANVRTVNLEKSCVSVEWAEGGATKGKEIDFDDVAAINPELLQLLPLHPKDNLPLQENVTIQKQKRRSVNSKIPAPKESLRSRSTRMSTVSELRITAQENDMEVELPAAANSRKQFSVPLRRKSCLVKEVEKMKNKREEKKAQNSEMRMKRAQEYDSSFPNWEFARMIKEFRATLECHPLTMTDPIEEHRICVCVRKRPLNKQELAKKEIDVISIPSKCLLLVHEPKLKVDLTKYLENQAFCFDFAFDETASNEVVYRFTARPLVQTIFEGGKATCFAYGQTGSGKTHTMGGDLSGKAQNASKGIYAMASRDVFLLKNQPCYRKLGLEVYVTFFEIYNGKLFDLLNKKAKLRVLEDGKQQVQVVGLQEHLVNSADDVIKMIDMGSACRTSGQTFANSNSSRSHACFQIILRAKGRMHGKFSLVDLAGNERGADTSSADRQTRMEGAEINKSLLALKECIRALGQNKAHTPFRESKLTQVLRDSFIGENSRTCMIATISPGISSCEYTLNTLRYADRVKELSPHSGPSGEQLIQMETEEMEACSNGALIPGNLSKEEEELSSQMSSFNEAMTQIRELEEKAMEELKEIIQQGPDWLELSEMTEQPDYDLETFVNKAESALAQQAKHFSALRDVIKALRLAMQLEEQASRQISSKKRPQ

SEQ ID NO: 112079 - protein, 107 aa, Artificial Sequence
  derived and/or modified sequence
  misc_feature (1)..(1): Xaa can be any naturally occurring amino acid
XKECIRALGQNKAHTPFRESKLTQVLRDSFIGENSRTCMIATISPGISSCEYTLNTLRYADRQGCHSIPLEPQASKPGRCHIPLLSKEEEELSSQMSSFNEAMTQIR

SEQ ID NO: 112080 - protein, 336 aa, Artificial Sequence
  derived and/or modified sequence
MAMDSSLQARLFPGLAIKIQRSNGLIHSANVRTVNLEKSCVSVEWAEGGATKGKEIDFDDVAAINPELLQLLPLHPKDNLPLQENVTIQKQKRRSVNSKIPAPKESLRSRSTRMSTVSELRITAQENDMEVELPAAANSRKQFSVPLRRKSCLVKEVEKMKNKREEKKAQNSEMRMKRAQEYDSSFPNWEFARMIKEFRATLECHPLTMTDPIEEHRICVCVRKRPLNKQELAKKEIDVISIPSKCLLLVHEPKLKVDLTKYLENQAFCFDFAFDETASNEVVYRFTARPLVQTIFEGGKATCFAYGQTGSGKTHTMGGDLSGKAQNASKGIYAMA

SEQ ID NO: 112081 - DNA, 2055 bp, Artificial Sequence
  derived and/or modified sequence
atggcaatggactcgagtcttcaggcccggctgttccccggacttgcaattaagatacagagatccaacgggttgatacactctgcaaatgtgcgcactgtgaacctggaaaaatcttgcgtatccgttgagtgggccgaaggcggagcgacaaagggtaaagagatcgactttgacgacgttgcagccatcaacccagagctgcttcagctgttacctctgcacccgaaggacaacctgccactgcaagaaaatgtcactattcagaagcaaaaaaggcgctcggtcaattccaagatacccgctcccaaggagtcacttcgctcgcggagcactcgtatgtcaactgttagcgagctgcggattacagcccaggagaatgacatggaggttgaactgcctgctgccgcaaatagccgaaagcagttcagcgtcccactcaggcggaagtcctgccttgtgaaggaagtagagaagatgaaaaacaaaagggaggagaaaaaggcccagaatagtgagatgagaatgaagagggcacaggagtacgattcatcctttccgaactgggaatttgctcggatgatcaaggagtttcgtgcgacccttgaatgccatccgctgactatgacagatccaatcgaggagcatagaatctgcgtctgtgtgcgcaagcgtcccctgaataaacaggagctggcgaaaaaagaaattgatgtgatttcgattccctcaaaatgtctattactggtacatgagcctaaattgaaggtggatctgaccaagtacttggaaaatcaagccttctgttttgatttcgctttcgatgaaacggcctctaatgaggtggtttatcgctttactgctagacctttggttcaaactattttcgaaggggggaaagcaacgtgcttcgcatacggacaaactggcagtggtaagacccatactatgggcggagatctgtccggaaaagcacagaatgcctccaagggaatctacgcgatggcctcacgggatgtctttctactgaagaaccagccctgttatcggaaactcgggctagaagtttacgtcacattttttgaaatttacaatggcaagctctttgacctcctgaataagaaggccaagttgcgggttcttgaagacggtaagcagcaggtgcaagtggtgggcctgcaggaacacctggtgaatagcgcagatgatgtgattaaaatgatcgacatggggtcagcctgcagaacctccgggcagacatttgccaattccaatagctcgagaagccacgcttgtttccaaattatacttcgcgctaagggtcgaatgcacggaaagtttagccttgttgacctggctggaaatgaacgtggtgccgacacatcatctgcggacagacagacacgaatggagggcgccgaaataaataaatcccttctggctctgaaggagtgtattcgggctctcggccagaataaagcacacacgccctttagagagtctaaactgactcaggtactgcgggactcctttattggcgagaattctagaacctgtatgatagcaactatttctccaggtatcagcagctgcgagtacacgttaaacacactgcgttacgcggaccgagtcaaggaattgagtccacattccggaccttcaggggagcaattgatccagatggagactgaggaaatggaagcatgtagcaatggagctctgatacctggcaacctttctaaagaagaggaagaactttcaagccagatgtcgtcatttaatgaagccatgactcagatccgagaattagaggagaaagccatggaagaactcaaagagatcatccaacagggacctgactggttggagttaagtgagatgactgaacaacccgattatgacctcgagacctttgtcaataaggctgagtcagctctggcacagcaagccaaacactttagtgctcttcgggatgtgattaaagctctccgcctggctatgcagcttgaggaacaagccagccgccaaatctcatccaaaaaacgaccccagtag

SEQ ID NO: 112082 - DNA, 1011 bp, Artificial Sequence
  derived and/or modified sequence
atggccatggattcctccttgcaggcccggttgttccccgggcttgctatcaagatacaaagatctaatggcctgatacactctgcaaatgtgcggacagttaatttagaaaagagctgtgtgtcagtggagtgggcggaagggggcgcgaccaagggcaaagaaattgacttcgacgatgtggctgcaatcaaccccgaactgctccagctgctaccacttcaccctaaagataaccttcctctgcaagaaaacgtgaccatccaaaagcaaaaacggcgcagcgttaattctaagatccccgcccctaaggagtcgctcaggtcaagatcaactaggatgagtacagtgtcggaactgagaattacagcccaagaaaatgatatggaggtagagttaccagctgcagctaactcaagaaaacaattcagcgtccccctcagaagaaaatcatgcctggtgaaggaggtcgaaaagatgaaaaacaaacgagaagaaaagaaagcccagaattcagagatgaggatgaaaagagcccaggagtatgattcctccttccctaattgggaatttgcaaggatgataaaagaatttcgggctaccctggaatgccatcccctcacgatgaccgaccctatagaagagcacagaatttgcgtgtgtgtacgcaaaagacccttgaataaacaggaacttgcaaaaaaggaaatcgatgtaatcagcattccaagcaagtgtctgcttcttgtccacgagcctaagttgaaggtggacttaaccaagtatctggaaaatcaggctttctgtttcgatttcgccttcgatgaaaccgcgtccaatgaagtcgtttaccgctttaccgcgcggcccctggtgcagaccatctttgagggcggaaaggccacatgcttcgcttatgggcagaccgggagcggcaagacgcataccatgggcggcgacttgagtggcaaagcacaaaacgcctcaaaaggcatttacgctatggcctag

SEQ ID NO: 112083 - DNA, 2711 bp, Artificial Sequence
  derived and/or modified sequence
aagacttcgtagggttagcgaaattgaggtttcttggtattgcgcgtttctcttccttgctgactctccgaatggccatggactcgtcgcttcaggcccgcctgtttcccggtctcgctatcaagatccaacgcagtaatggtttaattcacagtgccaatgtaaggactgtgaacttggagaaatcctgtgtttcagtggaatgggcagaaggaggtgccacaaagggcaaagagattgattttgatgatgtggctgcaataaacccagaactcttacagcttcttcccttacatccgaaggacaatctgcccttgcaggaaaatgtaacaatccagaaacaaaaacggagatccgtcaactccaaaattcctgctccaaaagaaagtcttcgaagccgctccactcgcatgtccactgtctcagagcttcgcatcacggctcaggagaatgacatggaggtggagctgcctgcagctgcaaactcccgcaagcagttttcagttcctcttcggaggaaatcatgtcttgtgaaggaagtggaaaaaatgaagaacaagcgagaagagaagaaggcccagaactctgaaatgagaatgaagagagctcaggagtatgacagtagttttccaaactgggaatttgcccgaatgattaaagaatttcgggctactttggaatgtcatccacttactatgactgatcctatcgaagagcacagaatatgtgtctgtgttaggaaacgcccactgaataagcaagaattggccaagaaagaaattgatgtgatttccattcctagcaagtgtctcctcttggtacatgaacccaagttgaaagtggacttaacaaagtatctggagaaccaagcattctgctttgactttgcatttgatgaaacagcttcgaatgaagttgtctacaggttcacagcaaggccactggtacagacaatctttgaaggtggaaaagcaacttgttttgcatatggccagacaggaagtggcaagacacatactatgggcggagacctctctgggaaagcccagaatgcatccaaagggatctatgccatggcctcccgggacgtcttcctcctgaagaatcaaccctgctaccggaagttgggcctggaagtctatgtgacattcttcgagatctacaatgggaagctgtttgacctgctcaacaagaaggccaagctgcgcgtgctggaggacggcaagcaacaggtgcaagtggtggggctgcaggagcatctggttaactctgctgatgatgtcatcaagatgatcgacatgggcagcgcctgcagaacctctgggcagacatttgccaactccaattcctcccgctcccacgcgtgcttccaaattattcttcgagctaaagggagaatgcatggcaagttctctttggtagatctggcagggaatgagcgaggcgcggacacttccagtgctgaccggcagacccgcatggagggcgcagaaatcaacaagagtctcttagccctgaaggagtgcatcagggccctgggacagaacaaggctcacaccccgttccgtgagagcaagctgacacaggtgctgagggactccttcattggggagaactctaggacttgcatgattgccacgatctcaccaggcataagctcctgtgaatatactttaaacaccctgagatatgcagacagggtcaaggagctgagcccccacagtgggcccagtggagagcagttgattcaaatggaaacagaagagatggaagcctgctctaacggggcgctgattccaggcaatttatccaaggaagaggaggaactgtcttcccagatgtccagctttaacgaagccatgactcagatcagggagctggaggagaaggctatggaagagctcaaggagatcatacagcaaggaccagactggcttgagctctctgagatgaccgagcagccagactatgacctggagacctttgtgaacaaagcggaatctgctctggcccagcaagccaagcatttctcagccctgcgagatgtcatcaaggccttgcgcctggccatgcagctggaagagcaggctagcagacaaataagcagcaagaaacggccccagtgacgactgcaaataaaaatctgtttggtttgacacccagcctcttccctggccctccccagagaactttgggtacctggtgggtctaggcagggtctgagctgggacaggttctggtaaatgccaagtatgggggcatctgggcccagggcagctggggagggggtcagagtgacatgggacactccttttctgttcctcagttgtcgccctcacgagaggaaggagctcttagttacccttttgtgttgcccttctttccatcaaggggaatgttctcagcatagagctttctccgcagcatcctgcctgcgtggactggctgctaatggagagctccctggggttgtcctggctctggggagagagacggagcctttagtacagctatctgctggctctaaaccttctacgcctttgggccgagcactgaatgtcttgtactttaaaaaaatgtttctgagacctctttctactttactgtctccctagagatcctagaggatccctactgttttctgttttatgtgtttatacattgtatgtaacaataaagagaaaaaataaatcagctgtttaagtgtgtgg

SEQ ID NO: 112084 - DNA, 1124 bp, Artificial Sequence
  derived and/or modified sequence
acgcttgcgcgcgggatttaaactgcggcggtttacgcggcgttaagacttcgtagggttagcgaaattgaggtttcttggtattgcgcgtttctcttccttgctgactctccgaatggccatggactcgtcgcttcaggcccgcctgtttcccggtctcgctatcaagatccaacgcagtaatggtttaattcacagtgccaatgtaaggactgtgaacttggagaaatcctgtgtttcagtggaatgggcagaaggaggtgccacaaagggcaaagagattgattttgatgatgtggctgcaataaacccagaactcttacagcttcttcccttacatccgaaggacaatctgcccttgcaggaaaatgtaacaatccagaaacaaaaacggagatccgtcaactccaaaattcctgctccaaaagaaagtcttcgaagccgctccactcgcatgtccactgtctcagagcttcgcatcacggctcaggagaatgacatggaggtggagctgcctgcagctgcaaactcccgcaagcagttttcagttcctcttcggaggaaatcatgtcttgtgaaggaagtggaaaaaatgaagaacaagcgagaagagaagaaggcccagaactctgaaatgagaatgaagagagctcaggagtatgacagtagttttccaaactgggaatttgcccgaatgattaaagaatttcgggctactttggaatgtcatccacttactatgactgatcctatcgaagagcacagaatatgtgtctgtgttaggaaacgcccactgaataagcaagaattggccaagaaagaaattgatgtgatttccattcctagcaagtgtctcctcttggtacatgaacccaagttgaaagtggacttaacaaagtatctggagaaccaagcattctgctttgactttgcatttgatgaaacagcttcgaatgaagttgtctacaggttcacagcaaggccactggtacagacaatctttgaaggtggaaaagcaacttgttttgcatatggccagacaggaagtggcaagacacatactatgggcggagacctctctgggaaagcccagaatgcatccaaagggatctatgccatggcct

SEQ ID NO: 112085 - DNA, 2055 bp, Artificial Sequence
  derived and/or modified sequence
atggccatggacagcagcctgcaggcccggctcttccctggcctggccatcaagatccagaggagcaatggcctcatccacagcgccaacgtgaggacagtgaacctggagaagagctgtgtgtctgtggagtgggccgagggcggggccaccaagggcaaggagattgactttgatgatgtggccgccatcaaccctgagctgctgcagctgctgcccctgcaccccaaggacaacctgcccctgcaggagaatgtgaccatccagaagcagaagagaagatctgtgaacagcaagatcccagcccccaaggagagcctgcggagccgcagcaccaggatgagcacagtgtctgagctgcgcatcacagcccaggagaatgacatggaggtggagctgcctgctgctgccaacagcaggaagcagttctctgtgcccctgcggaggaagagctgcctggtgaaggaggtggagaagatgaagaacaagcgggaggagaagaaggcccagaacagcgagatgaggatgaagagggcccaggagtatgacagcagcttccccaactgggagtttgccaggatgatcaaggagttccgggccaccctggagtgccaccccctgaccatgacagaccccatcgaggagcaccgcatctgtgtgtgtgtgaggaagaggcccctgaacaagcaggagctggccaagaaggagattgatgtgatcagcatccccagcaagtgcctgctgctggtgcatgagcccaagctgaaggtggacctgaccaagtacctggagaaccaggccttctgctttgattttgcctttgatgaaacagccagcaatgaggtggtgtaccgcttcaccgcccggcccctggtgcagaccatctttgagggcggcaaggccacctgctttgcctacggccagacaggcagcggcaagacccacaccatgggcggggacctgagcggcaaggcccagaatgccagcaagggcatctatgccatggccagcagagatgtgttcctgctgaagaaccagccctgctacaggaagctgggcctggaggtgtatgtgaccttctttgagatctacaacgggaagctgtttgacctgctgaacaagaaggccaagctgcgggtgctggaggatggcaagcagcaggtgcaggtggtgggcctgcaggagcacctggtgaacagcgcagatgatgtgatcaagatgattgacatgggcagcgcctgcaggaccagcggccagacctttgccaacagcaacagcagccgcagccacgcctgcttccagatcatcctgcgggccaagggccgcatgcacggcaagttcagcctggtggacctggccggaaatgaaagaggagctgacaccagcagcgctgaccggcagaccaggatggagggcgctgagatcaacaagagcctgctggccctgaaggagtgcatccgggccctgggccagaacaaggcccacacccccttccgggagagcaagctgacccaggtgctgcgggacagcttcatcggggagaacagcaggacctgcatgattgccaccatcagccctggcatcagcagctgtgagtacaccctgaacaccctgcgctatgctgacagagtgaaggagctgagcccccacagcggccccagcggggagcagctgatccagatggagacagaggagatggaggcctgcagcaatggagccctgatccctggcaacctgagcaaggaggaggaggagctgagcagccagatgagcagcttcaatgaggccatgacccagatccgggagctggaggagaaggccatggaggagctgaaggagatcatccagcagggccctgactggctggagctgtctgagatgacagagcagcctgactatgacctggagacctttgtgaacaaggccgagagcgccctggcccagcaggccaagcacttcagcgccctgagagatgtgatcaaggccctgcggctggccatgcagctggaggagcaggccagccggcagatcagcagcaagaagaggccccagtag

SEQ ID NO: 112086 - DNA, 1011 bp, Artificial Sequence
  derived and/or modified sequence
atggccatggacagcagcctgcaggcccggctcttccctggcctggccatcaagatccagaggagcaatggcctcatccacagcgccaacgtgaggacagtgaacctggagaagagctgtgtgtctgtggagtgggccgagggcggggccaccaagggcaaggagattgactttgatgatgtggccgccatcaaccctgagctgctgcagctgctgcccctgcaccccaaggacaacctgcccctgcaggagaatgtgaccatccagaagcagaagagaagatctgtgaacagcaagatcccagcccccaaggagagcctgcggagccgcagcaccaggatgagcacagtgtctgagctgcgcatcacagcccaggagaatgacatggaggtggagctgcctgctgctgccaacagcaggaagcagttctctgtgcccctgcggaggaagagctgcctggtgaaggaggtggagaagatgaagaacaagcgggaggagaagaaggcccagaacagcgagatgaggatgaagagggcccaggagtatgacagcagcttccccaactgggagtttgccaggatgatcaaggagttccgggccaccctggagtgccaccccctgaccatgacagaccccatcgaggagcaccgcatctgtgtgtgtgtgaggaagaggcccctgaacaagcaggagctggccaagaaggagattgatgtgatcagcatccccagcaagtgcctgctgctggtgcatgagcccaagctgaaggtggacctgaccaagtacctggagaaccaggccttctgctttgattttgcctttgatgaaacagccagcaatgaggtggtgtaccgcttcaccgcccggcccctggtgcagaccatctttgagggcggcaaggccacctgctttgcctacggccagacaggcagcggcaagacccacaccatgggcggggacctgagcggcaaggcccagaatgccagcaagggcatctatgccatggcctag

SEQ ID NO: 112087 - DNA, 2055 bp, Artificial Sequence
  derived and/or modified sequence
atggccatggacagcagcctgcaggcccggctgttccccggcctggctataaaaattcagcggtccaacgggttgattcacagcgcgaacgtaaggactgttaatctcgagaagagctgcgtgtctgttgagtgggccgagggcggggccacaaagggcaaagaaatagactttgacgatgtagcagcaatcaaccccgaattactccaactgctcccgctacacccaaaggacaacctgcctctccaggagaacgttaccatccagaagcagaaacgcaggagcgtgaactctaagattcccgcccccaaggaatcacttcgctctcgtagcacaagaatgtctaccgttagcgagctgcggattaccgcccaggagaacgatatggaggtggagctgccagccgctgcaaattcccggaaacagttttcagtgccactcaggcggaagagctgcctggttaaagaagtggaaaaaatgaagaataagagggaggagaagaaggctcagaactcggagatgcggatgaagcgcgcccaagaatacgactcctcctttccaaattgggaatttgctagaatgatcaaagaattccgtgctaccctggaatgccacccactgacgatgacggatccaattgaagagcataggatatgcgtatgtgtacgaaagaggccactgaacaaacaagaactggccaaaaaagaaatagatgtgatcagcattccctcgaaatgcctgttactggtgcatgagcctaaactgaaagtggacctcacgaaatacctggagaaccaggcattctgcttcgattttgcattcgatgagaccgccagcaatgaggtggtgtacagattcaccgcccggcctcttgtacagacaatatttgaaggaggcaaggccacctgcttcgcctacggacagacaggtagtgggaagacacataccatgggaggggacctctctggtaaagctcaaaacgcaagcaagggcatttatgcaatggccagccgcgacgtgttcctcctaaagaaccaaccctgctacagaaagcttggactggaggtatacgtgacgtttttcgaaatttataacggaaagctgttcgacctcctgaacaagaaggccaaactgagggtgttggaagatgggaaacaacaggtacaggtggtgggtctccaggagcacctggtgaacagtgccgatgacgtgataaagatgattgacatggggagcgcttgtagaacttctggccagacctttgccaactctaacagcagcaggagccacgcctgttttcagattatcttgcgcgccaaagggaggatgcatggcaaattttctcttgtcgacctggccgggaacgaacgtggcgcggacaccagctctgccgacaggcagactagaatggagggcgcagagatcaacaagtccctgttggcgttgaaggaatgcattcgggctctgggtcagaacaaagctcacacccccttccgcgagtctaaactgacccaagtcctgagagattccttcattggcgagaattcgagaacctgcatgattgccactatcagccctggcatctcatcatgcgagtacactctgaatacgttaaggtacgcagacagagttaaggaactctcaccgcacagcggaccctcaggcgagcagttaatccaaatggagaccgaagagatggaagcctgttctaacggggctttaataccagggaacctgtccaaagaggaggaggagctgagcagtcagatgtcatccttcaacgaagctatgacacagataagagaactggaggaaaaggcaatggaggagctcaaggagatcattcagcagggccctgattggctcgagttgtctgaaatgactgaacagcctgactatgatttggaaaccttcgtcaataaagctgagtccgcattggcccagcaggcaaagcacttctcagccttgcgtgatgtgatcaaggccctaaggctggccatgcagctggaggagcaggctagcaggcagatttcaagcaagaagcgccctcagtag

SEQ ID NO: 112088 - DNA, 1011 bp, Artificial Sequence
  derived and/or modified sequence
atggccatggacagcagcctgcaggcccggctgttccccggcctggccatcaaaattcagaggtcaaatggcctgattcactccgcaaatgtgaggacagtgaatcttgaaaagtcctgcgtgagtgtggagtgggcagaaggtggcgcaacaaagggaaaagagatcgacttcgacgatgtagctgccattaaccccgaactgctccagctgctgcccctgcatccgaaggataatctgcctctccaggagaatgttaccatacagaaacaaaaaaggcgaagtgttaacagtaagattcccgcgccaaaagaaagtctgcggagcaggtccactagaatgtccactgtcagcgaactccgaattacagcccaggagaacgacatggaggtggagctgccagccgcagcaaactccaggaaacaattttcagttcctttacgaaggaagtcctgcttggtaaaagaagtggaaaaaatgaagaataagcgtgaggaaaagaaagctcagaactcagaaatgagaatgaaacgagcccaagagtacgattcaagcttccccaattgggagtttgcgcggatgataaaggagttcagggctaccttagagtgccatccactcacaatgactgatcctatagaagagcacagaatttgtgtctgcgtgagaaagagaccccttaacaagcaagaactggcgaaaaaggaaatcgacgtgatttcaataccaagtaagtgtcttctgttggtgcatgaacccaagctgaaggttgaccttacaaaatatctagagaatcaggccttttgctttgacttcgcctttgacgaaacagctagcaatgaggttgtctaccgtttcaccgcccggccccttgtgcagacgatctttgaaggtggaaaagcaacgtgttttgcctacggccagactggcagcgggaaaacgcatacaatgggcggagatctttccggaaaggcccagaatgcgagtaagggtatctacgcaatggcttag

SEQ ID NO: 112089 - DNA, 2055 bp, Artificial Sequence
  derived and/or modified sequence
atggccatggattccagcctccaggcaaggctgttccctggtctggccatcaagatccagaggagtaatgggctgattcactctgctaacgtaaggactgttaatctcgaaaagtcatgcgtttcagtggagtgggcagagggcggtgctacaaaggggaaggagattgacttcgacgatgtggctgctattaatcccgaactcttacagctcctccccttgcacccaaaagacaacctgcccctgcaggaaaatgtcaccattcagaagcagaagagacgttctgtgaatagtaagatccccgctcccaaagaaagcttacgctcaagatcgacaaggatgagcacggttagcgaacttcgcataactgctcaggaaaatgatatggaggtggagctgccagccgctgcaaacagccgcaagcagttttctgtgccgctgcggaggaaaagctgcctggtgaaagaggtcgagaaaatgaagaacaaaagggaggagaagaaggcgcagaattctgaaatgaggatgaaacgggctcaagaatatgattccagttttcctaactgggagttcgcaaggatgattaaagagtttagggcaactctggaatgtcaccccttgacgatgaccgaccccattgaggagcataggatctgtgtttgtgtcagaaaacgccctctgaacaagcaggaattggccaaaaaagagatagatgtgatttcaataccaagcaagtgtctcctcctcgtccatgagcctaagctgaaggtggatctgactaagtatctagagaaccaggcattttgcttcgattttgccttcgacgagacagctagtaacgaggtggtatacaggttcacagccaggccactggtgcagacgatcttcgaaggaggaaaggctacgtgcttcgcatacgggcagacaggcagtggcaagacacacaccatgggcggagacctgtcaggcaaggctcagaacgctagcaagggcatttatgccatggcaagccgcgacgtcttcttgctcaagaatcaaccatgctaccgaaagctggggctggaggtgtatgttactttttttgaaatctacaatggcaagctgttcgatcttcttaacaaaaaagctaaactgcgtgtgctggaagatgggaaacagcaggttcaggtagtgggcctgcaggagcatctggttaactccgccgacgatgtgatcaaaatgattgacatggggtcagcctgtaggacttccgggcagactttcgctaacagtaacagttccaggagtcacgcctgctttcagatcattctgagagcgaagggcagaatgcatggcaagttcagtctggttgacctggccggaaacgaaaggggagcagataccagctcagctgataggcaaacgcggatggaaggagccgagattaataagagcctgctggcgctgaaggagtgtatacgagccttaggccaaaacaaagcccacacgccattccgtgagtctaaactcacgcaggtcttgagagattcttttataggtgagaacagcaggacctgtatgatcgccaccatctcacccggtatttcaagctgtgaatacactctgaatactctgcgctacgccgaccgggttaaggagctgagcccccactcagggccaagcggcgaacagctaattcagatggagactgaggagatggaggcctgttcaaacggcgcacttataccaggcaacctctctaaagaggaagaggaactgagctctcaaatgtcttctttcaatgaagccatgacgcaaatccgtgagttagaagaaaaagcaatggaagaactcaaagagatcatccaacaggggcctgattggctggagctttctgaaatgactgagcagccggactacgacctcgaaactttcgtgaacaaagccgagagcgcgttggcacagcaggctaagcatttctcagctctgcgcgacgttatcaaggcgcttagattagcgatgcaacttgaggagcaggctagcagacagattagcagcaagaaacggccacaatag

SEQ ID NO: 112090 - DNA, 1011 bp, Artificial Sequence
  derived and/or modified sequence
atggccatggactcaagtcttcaggcccgactgtttccagggcttgctataaagatccagcggtctaatggcctcattcacagcgcaaatgtcagaaccgtgaatttagaaaagtcatgtgtcagcgttgagtgggctgagggtggggcaaccaaaggaaaagagattgatttcgacgatgtcgccgctattaatcctgagttacttcagcttctgccactgcatcctaaggataacctacctctgcaggagaacgtcactatacagaaacagaagaggcgctccgtcaactccaagattccagctcccaaggaaagtctcaggtctcggtcaacgagaatgtccaccgtgagtgagctgagaattacagcccaggaaaacgatatggaagttgaactgccagccgcagcaaactcaagaaagcagttctccgttcctctccgaagaaagagctgcctggtaaaagaggtggaaaagatgaaaaataaacgcgaagaaaagaaggcacagaattccgagatgaggatgaaacgagcccaggaatacgattctagctttcctaactgggaattcgccaggatgataaaagagttcagggctacacttgagtgccaccctcttacaatgacagatcccattgaggagcatcgaatttgtgtttgcgtaagaaagaggccgctcaataaacaggaactggccaaaaaggagatcgatgttatcagtatccccagcaaatgccttctcttggttcatgaacctaagcttaaggtggatctgaccaagtacttggagaatcaggccttttgctttgactttgcctttgatgagactgcaagcaacgaagtggtgtacaggttcactgcgagacctctggtgcagaccatatttgagggtggtaaggctacatgtttcgcctacggacaaactggcagcggcaagactcatacaatggggggagatttatccggtaaagcacagaacgcatccaaaggtatctatgccatggcgtag

SEQ ID NO: 112091 - DNA, 2055 bp, Artificial Sequence
  derived and/or modified sequence
atggccatggacagcagcctgcaggccagactgttccccggcctggccatcaagatccagagaagcaacggcctgatccacagcgccaacgtgagaaccgtgaacctggagaagagctgcgtgagcgtggagtgggccgagggcggcgccaccaagggcaaggagatcgacttcgacgacgtggccgccatcaaccccgagctgctgcagctgctgcccctgcaccccaaggacaacctgcccctgcaggagaacgtgaccatccagaagcagaagagaagaagcgtgaacagcaagatccccgcccccaaggagagcctgagaagcagaagcaccagaatgagcaccgtgagcgagctgagaatcaccgcccaggagaacgacatggaggtggagctgcccgccgccgccaacagcagaaagcagttcagcgtgcccctgagaagaaagagctgcctggtgaaggaggtggagaagatgaagaacaagagagaggagaagaaggcccagaacagcgagatgagaatgaagagagcccaggagtacgacagcagcttccccaactgggagttcgccagaatgatcaaggagttcagagccaccctggagtgccaccccctgaccatgaccgaccccatcgaggagcacagaatctgcgtgtgcgtgagaaagagacccctgaacaagcaggagctggccaagaaggagatcgacgtgatcagcatccccagcaagtgcctgctgctggtgcacgagcccaagctgaaggtggacctgaccaagtacctggagaaccaggccttctgcttcgacttcgccttcgacgagaccgccagcaacgaggtggtgtacagattcaccgccagacccctggtgcagaccatcttcgagggcggcaaggccacctgcttcgcctacggccagaccggcagcggcaagacccacaccatgggcggcgacctgagcggcaaggcccagaacgccagcaagggcatctacgccatggccagcagagacgtgttcctgctgaagaaccagccctgctacagaaagctgggcctggaggtgtacgtgaccttcttcgagatctacaacggcaagctgttcgacctgctgaacaagaaggccaagctgagagtgctggaggacggcaagcagcaggtgcaggtggtgggcctgcaggagcacctggtgaacagcgccgacgacgtgatcaagatgatcgacatgggcagcgcctgcagaaccagcggccagaccttcgccaacagcaacagcagcagaagccacgcctgcttccagatcatcctgagagccaagggcagaatgcacggcaagttcagcctggtggacctggccggcaacgagagaggcgccgacaccagcagcgccgacagacagaccagaatggagggcgccgagatcaacaagagcctgctggccctgaaggagtgcatcagagccctgggccagaacaaggcccacacccccttcagagagagcaagctgacccaggtgctgagagacagcttcatcggcgagaacagcagaacctgcatgatcgccaccatcagccccggcatcagcagctgcgagtacaccctgaacaccctgagatacgccgacagagtgaaggagctgagcccccacagcggccccagcggcgagcagctgatccagatggagaccgaggagatggaggcctgcagcaacggcgccctgatccccggcaacctgagcaaggaggaggaggagctgagcagccagatgagcagcttcaacgaggccatgacccagatcagagagctggaggagaaggccatggaggagctgaaggagatcatccagcagggccccgactggctggagctgagcgagatgaccgagcagcccgactacgacctggagaccttcgtgaacaaggccgagagcgccctggcccagcaggccaagcacttcagcgccctgagagacgtgatcaaggccctgagactggccatgcagctggaggagcaggccagcagacagatcagcagcaagaagagaccccagtag

SEQ ID NO: 112092 - DNA, 1011 bp, Artificial Sequence
  derived and/or modified sequence
atggccatggacagcagcctgcaggccagactgttccccggcctggccatcaagatccagagaagcaacggcctgatccacagcgccaacgtgagaaccgtgaacctggagaagagctgcgtgagcgtggagtgggccgagggcggcgccaccaagggcaaggagatcgacttcgacgacgtggccgccatcaaccccgagctgctgcagctgctgcccctgcaccccaaggacaacctgcccctgcaggagaacgtgaccatccagaagcagaagagaagaagcgtgaacagcaagatccccgcccccaaggagagcctgagaagcagaagcaccagaatgagcaccgtgagcgagctgagaatcaccgcccaggagaacgacatggaggtggagctgcccgccgccgccaacagcagaaagcagttcagcgtgcccctgagaagaaagagctgcctggtgaaggaggtggagaagatgaagaacaagagagaggagaagaaggcccagaacagcgagatgagaatgaagagagcccaggagtacgacagcagcttccccaactgggagttcgccagaatgatcaaggagttcagagccaccctggagtgccaccccctgaccatgaccgaccccatcgaggagcacagaatctgcgtgtgcgtgagaaagagacccctgaacaagcaggagctggccaagaaggagatcgacgtgatcagcatccccagcaagtgcctgctgctggtgcacgagcccaagctgaaggtggacctgaccaagtacctggagaaccaggccttctgcttcgacttcgccttcgacgagaccgccagcaacgaggtggtgtacagattcaccgccagacccctggtgcagaccatcttcgagggcggcaaggccacctgcttcgcctacggccagaccggcagcggcaagacccacaccatgggcggcgacctgagcggcaaggcccagaacgccagcaagggcatctacgccatggcctag

SEQ ID NO: 112093 - protein, 671 aa, Artificial Sequence
  derived and/or modified sequence
MIDFDDVAAINPELLQLLPLHPKDNLPLQENVTIQKQKRRSVNSKIPAPKESLRSRSTRMSTVSELRITAQENDMEVELPAAANSRKQFSVPPAPTRPSCPAVAEIPLRMVSEEMEEQVHSIRGSSSANPVNSVRRKSCLVKEVEKMKNKREEKKAQNSEMRMKRAQEYDSSFPNWEFARMIKEFRATLECHPLTMTDPIEEHRICVCVRKRPLNKQELAKKEIDVISIPSKCLLLVHEPKLKVDLTKYLENQAFCFDFAFDETASNEVVYRFTARPLVQTIFEGGKATCFAYGQTGSGKTHTMGGDLSGKAQNASKGIYAMASRDVFLLKNQPCYRKLGLEVYVTFFEIYNGKLFDLLNKKAKLRVLEDGKQQVQVVGLQEHLVNSADDVIKMIDMGSACRTSGQTFANSNSSRSHACFQIILRAKGRMHGKFSLVDLAGNERGADTSSADRQTRMEGAEINKSLLALKECIRALGQNKAHTPFRESKLTQVLRDSFIGENSRTCMIATISPGISSCEYTLNTLRYADRVKELSPHSGPSGEQLIQMETEEMEACSNGALIPGNLSKEEEELSSQMSSFNEAMTQIRELEEKAMEELKEIIQQGPDWLELSEMTEQPDYDLETFVNKAESALAQQAKHFSALRDVIKALRLAMQLEEQASRQISSKKRPQ

SEQ ID NO: 112094 - DNA, 2016 bp, Artificial Sequence
  derived and/or modified sequence
atgattgatttcgacgacgtggccgccattaatccagaactcctgcaattactgccattgcaccccaaggacaacttgcctctccaggagaacgtgacaattcagaaacagaaacgcaggtctgtaaatagcaaaattcctgctccgaaagaaagtcttcgctcccgctccacacgaatgagcactgtgtctgagcttaggatcacagcacaggaaaatgatatggaagttgagttaccagccgccgctaactcacggaagcaattctcagtccctcccgcccccacccggcccagttgccccgccgtggctgaaattcccctgcgcatggtgtcagaggagatggaggaacaagtgcattccattcgcggaagctcgagcgcaaatcccgtaaattcagtacgacggaagtcatgcctcgtgaaggaagtggaaaagatgaaaaacaagagagaagaaaaaaaagcccagaactccgaaatgcggatgaagcgggcccaggaatacgactccagcttccctaactgggaatttgcacgcatgatcaaggagttcagggcgactctggagtgccaccccctcaccatgaccgaccccatagaggagcaccgcatctgcgtttgtgtgaggaaacggcctctgaacaaacaggagcttgccaaaaaagaaatagacgttatttccattcctagcaagtgcttgctcctggtgcacgaaccaaaacttaaggttgatctgactaaatatctcgagaatcaagccttttgtttcgattttgcatttgatgaaactgcttcgaacgaagtggtctaccggttcaccgcgagacctttggtgcagaccatctttgagggaggcaaggccacgtgttttgcatacggacagaccggatccggaaaaactcacacaatgggcggagacctatcaggcaaagctcaaaacgccagcaagggcatttacgccatggctagcagggatgtgttcctcctcaagaaccagccttgttaccggaagctgggtctggaggtctacgtgaccttttttgaaatatataacggcaagttattcgatctccttaacaagaaagccaagctgagagtgttagaggacggcaagcagcaggtgcaagtcgttgggctgcaggagcatctggttaacagcgctgacgacgtgatcaaaatgatagatatggggtcagcatgccgaacgtccgggcagacttttgcaaacagcaattccagccgtagccacgcgtgcttccagattattcttcgggcaaaagggcgtatgcacggcaagttctctttagtcgacctagctggcaacgagcggggagcagacacttcctctgccgaccggcagacaaggatggagggagccgaaataaacaaatctctgctggctctgaaagaatgtatccgcgcacttggacagaataaggcacatacacctttccgagaaagcaaactaactcaagtgctacgcgactcgttcatcggagagaatagccgcacctgcatgatcgccacgatatctcctggtatcagctcctgtgagtatacactgaatacactaagatatgccgaccgggtgaaggaattgtctccccacagtgggccttccggcgaacagctcatacaaatggaaaccgaggagatggaggcctgttcaaacggcgcgctcatccctggaaatctgtccaaagaagaggaggaactgtccagccagatgagttctttcaatgaggctatgactcagataagggagctggaagagaaggcaatggaggagttaaaagagattattcagcagggaccagactggctggagttgtctgaaatgaccgaacagccagattatgatctggaaaccttcgttaacaaggctgagtctgcgcttgcgcaacaggcaaagcactttagcgctcttagggatgttataaaagcactgaggctcgcaatgcagctggaagaacaagcctctcggcagatctctagtaaaaaacgacctcagtag

SEQ ID NO: 112095 - DNA, 2955 bp, Artificial Sequence
  derived and/or modified sequence
ggaagccgtaactggggaagtttctgggcccagaagaaaatgtaggtagtcttagggttaggtagcagctgtcaggaacttgcccctgcccataagatcctaaagggcccccatttgactctcaccagacagttagaacttgtttcctcctccgtgtcagccatcaagaggtgcttggggggctgtgcccagcaggacctcactgcccagcagatcagcaggggagccaagtggcctagatctgctgtggagtacccgactgtttgcctgcctgtctgccctcctcttcacctcattctcatcactgacgtctaccattggcttggaaatcagaaacccatatccatctagatgattgattttgatgatgtggctgcaataaacccagaactcttacagcttcttcccttacatccgaaggacaatctgcccttgcaggaaaatgtaacaatccagaaacaaaaacggagatccgtcaactccaaaattcctgctccaaaagaaagtcttcgaagccgctccactcgcatgtccactgtctcagagcttcgcatcacggctcaggagaatgacatggaggtggagctgcctgcagctgcaaactcccgcaagcagttttcagttcctcctgcccccactaggccttcctgccctgcagtggctgaaataccattgaggatggtcagcgaggagatggaagagcaagtccattccatccgaggcagctcttctgcaaaccctgtgaactcagttcggaggaaatcatgtcttgtgaaggaagtggaaaaaatgaagaacaagcgagaagagaagaaggcccagaactctgaaatgagaatgaagagagctcaggagtatgacagtagttttccaaactgggaatttgcccgaatgattaaagaatttcgggctactttggaatgtcatccacttactatgactgatcctatcgaagagcacagaatatgtgtctgtgttaggaaacgcccactgaataagcaagaattggccaagaaagaaattgatgtgatttccattcctagcaagtgtctcctcttggtacatgaacccaagttgaaagtggacttaacaaagtatctggagaaccaagcattctgctttgactttgcatttgatgaaacagcttcgaatgaagttgtctacaggttcacagcaaggccactggtacagacaatctttgaaggtggaaaagcaacttgttttgcatatggccagacaggaagtggcaagacacatactatgggcggagacctctctgggaaagcccagaatgcatccaaagggatctatgccatggcctcccgggacgtcttcctcctgaagaatcaaccctgctaccggaagttgggcctggaagtctatgtgacattcttcgagatctacaatgggaagctgtttgacctgctcaacaagaaggccaagctgcgcgtgctggaggacggcaagcaacaggtgcaagtggtggggctgcaggagcatctggttaactctgctgatgatgtcatcaagatgatcgacatgggcagcgcctgcagaacctctgggcagacatttgccaactccaattcctcccgctcccacgcgtgcttccaaattattcttcgagctaaagggagaatgcatggcaagttctctttggtagatctggcagggaatgagcgaggcgcggacacttccagtgctgaccggcagacccgcatggagggcgcagaaatcaacaagagtctcttagccctgaaggagtgcatcagggccctgggacagaacaaggctcacaccccgttccgtgagagcaagctgacacaggtgctgagggactccttcattggggagaactctaggacttgcatgattgccacgatctcaccaggcataagctcctgtgaatatactttaaacaccctgagatatgcagacagggtcaaggagctgagcccccacagtgggcccagtggagagcagttgattcaaatggaaacagaagagatggaagcctgctctaacggggcgctgattccaggcaatttatccaaggaagaggaggaactgtcttcccagatgtccagctttaacgaagccatgactcagatcagggagctggaggagaaggctatggaagagctcaaggagatcatacagcaaggaccagactggcttgagctctctgagatgaccgagcagccagactatgacctggagacctttgtgaacaaagcggaatctgctctggcccagcaagccaagcatttctcagccctgcgagatgtcatcaaggccttgcgcctggccatgcagctggaagagcaggctagcagacaaataagcagcaagaaacggccccagtgacgactgcaaataaaaatctgtttggtttgacacccagcctcttccctggccctccccagagaactttgggtacctggtgggtctaggcagggtctgagctgggacaggttctggtaaatgccaagtatgggggcatctgggcccagggcagctggggagggggtcagagtgacatgggacactccttttctgttcctcagttgtcgccctcacgagaggaaggagctcttagttacccttttgtgttgcccttctttccatcaaggggaatgttctcagcatagagctttctccgcagcatcctgcctgcgtggactggctgctaatggagagctccctggggttgtcctggctctggggagagagacggagcctttagtacagctatctgctggctctaaaccttctacgcctttgggccgagcactgaatgtcttgtactttaaaaaaatgtttctgagacctctttctactttactgtctccctagagatcctagaggatccctactgttttctgttttatgtgtttatacattgtatgtaacaataaagagaaaaaataaatcagctgtttaagtgtgtggaaa

SEQ ID NO: 112096 - DNA, 2016 bp, Artificial Sequence
  derived and/or modified sequence
atgattgactttgatgatgtggccgccatcaaccctgagctgctgcagctgctgcccctgcaccccaaggacaacctgcccctgcaggagaatgtgaccatccagaagcagaagagaagatctgtgaacagcaagatcccagcccccaaggagagcctgcggagccgcagcaccaggatgagcacagtgtctgagctgcgcatcacagcccaggagaatgacatggaggtggagctgcctgctgctgccaacagcaggaagcagttctctgtgcccccagcccccacccggcccagctgcccagctgtggccgagatccccctgaggatggtgtctgaggagatggaggagcaggtgcacagcatccggggcagcagcagcgccaaccctgtgaacagcgtgcggaggaagagctgcctggtgaaggaggtggagaagatgaagaacaagcgggaggagaagaaggcccagaacagcgagatgaggatgaagagggcccaggagtatgacagcagcttccccaactgggagtttgccaggatgatcaaggagttccgggccaccctggagtgccaccccctgaccatgacagaccccatcgaggagcaccgcatctgtgtgtgtgtgaggaagaggcccctgaacaagcaggagctggccaagaaggagattgatgtgatcagcatccccagcaagtgcctgctgctggtgcatgagcccaagctgaaggtggacctgaccaagtacctggagaaccaggccttctgctttgattttgcctttgatgaaacagccagcaatgaggtggtgtaccgcttcaccgcccggcccctggtgcagaccatctttgaaggaggcaaggccacctgctttgcctacggccagacaggcagcggcaagacccacaccatgggcggggacctgagcggcaaggcccagaatgccagcaagggcatctatgccatggccagcagagatgtgttcctgctgaagaaccagccctgctacaggaagctgggcctggaggtgtatgtgaccttctttgagatctacaacgggaagctgtttgacctgctgaacaagaaggccaagctgcgggtgctggaggatggcaagcagcaggtgcaggtggtgggcctgcaggagcacctggtgaacagcgcagatgatgtgatcaagatgattgacatgggcagcgcctgcaggaccagcggccagacctttgccaacagcaacagcagccgcagccacgcctgcttccagatcatcctgcgggccaagggccgcatgcacggcaagttcagcctggtggacctggccggaaatgaaagaggagctgacaccagcagcgctgaccggcagaccaggatggagggcgctgagatcaacaagagcctgctggccctgaaggagtgcatccgggccctgggccagaacaaggcccacacccccttccgggagagcaagctgacccaggtgctgcgggacagcttcatcggggagaacagcaggacctgcatgattgccaccatcagccctggcatcagcagctgtgagtacaccctgaacaccctgcgctatgctgacagagtgaaggagctgagcccccacagcggccccagcggggagcagctgatccagatggagacagaggagatggaggcctgcagcaatggagccctgatccctggcaacctgagcaaggaggaggaggagctgagcagccagatgagcagcttcaatgaggccatgacccagatccgggagctggaggagaaggccatggaggagctgaaggagatcatccagcagggccctgactggctggagctgtctgagatgacagagcagcctgactatgacctggagacctttgtgaacaaggccgagagcgccctggcccagcaggccaagcacttcagcgccctgagagatgtgatcaaggccctgcggctggccatgcagctggaggagcaggccagccggcagatcagcagcaagaagaggccccagtag

SEQ ID NO: 112097 - DNA, 2016 bp, Artificial Sequence
  derived and/or modified sequence
atgatcgacttcgacgacgtggccgccatcaaccccgagctgctgcagttactacccctgcatccaaaggacaacctccctctgcaggagaacgtcactatacaaaaacagaagcgccggtccgtaaactctaagattccagcgcccaaggagtcgttgcgcagcagaagcacccggatgagtactgtcagtgagcttcggatcacagctcaagaaaatgacatggaagtggagctcccagcggccgcaaattccaggaaacaattttcggtccctccggctccaacccggccgtcctgccctgcagtcgctgaaatacccctgagaatggtctctgaggaaatggaggagcaggttcactctattcgcgggtcatcctcagctaatcccgtcaacagcgtccgacggaagtcttgcctggtgaaggaggtcgaaaagatgaaaaacaaaagagaggagaaaaaggcccaaaattccgagatgcggatgaagcgggcccaagagtatgattcttccttccccaactgggagttcgcaaggatgattaaagagtttcgggccacactcgagtgtcatcccctcaccatgactgatcccattgaggagcaccgcatttgtgtatgcgtgcggaagaggccactgaataagcaggagctggcaaaaaaggagatcgacgtcatatccatcccatccaagtgcttgcttttagttcatgagccaaagctgaaggtggacctgaccaagtatcttgagaaccaggctttttgcttcgacttcgcctttgacgagacagcatctaatgaggtggtctaccgatttacggcaaggcccctcgtgcagacaattttcgaaggcgggaaggccacatgctttgcctatggccagaccggttcaggcaagacgcatactatgggcggtgatcttagcgggaaggctcagaatgcaagtaaaggcatatacgcaatggcgagcagagacgttttcctgctgaagaatcagccctgttacagaaaactcgggcttgaagtgtatgtgacctttttcgagatttataacgggaaactgttcgacctgctgaataagaaagcgaaactaagggtcctggaagacggcaagcaacaggttcaggtcgtaggactgcaggaacatcttgtcaattcagccgacgacgtcatcaaaatgattgacatgggatccgcatgccggacctcaggccagacatttgccaatagcaatagcagccgaagccacgcatgttttcagatcatccttagagcaaaagggcgaatgcatggaaagttctctctggtcgaccttgccgggaacgagcgcggcgccgacactagtagcgctgataggcagaccagaatggagggtgccgaaatcaacaaaagtctgttggccctcaaggagtgtatccgtgctcttggacagaacaaagcacacacgccatttagggaatccaaacttacccaggtactcagagactctttcattggcgaaaacagcaggacttgtatgatcgcaacaatttcgcccgggattagctcctgcgaatacaccctgaacacacttcgctacgccgatcgagtgaaggaattgagccctcacagtggcccatctggtgagcaactcatccagatggagaccgaggagatggaggcctgctcaaacggggcgttgatcccaggaaacttatctaaggaggaggaggagctctccagccaaatgtcaagctttaacgaggcaatgacccagatccgcgaactcgaggaaaaagctatggaggagctgaaagaaattatccagcaggggcctgactggctggaactatcagaaatgactgagcagccagattacgacctggagactttcgtgaacaaagcggagagtgccctggcacagcaggccaaacacttctccgcactgagagatgtcatcaaggccctcagactcgcaatgcaactcgaagagcaggcctcacgacagatcagctccaagaaacgcccacagtag

SEQ ID NO: 112098 - DNA, 2016 bp, Artificial Sequence
  derived and/or modified sequence
atgatagacttcgacgacgtcgccgcaatcaatccagagctattgcagctcctacccctgcaccctaaagataacttgccccttcaggagaacgtcactattcagaaacagaagcgcagatcagtgaactccaagatccctgctccaaaagagtctctccgtagcagaagtaccagaatgtcaacggtaagtgagttgagaatcaccgcacaggaaaatgacatggaagtcgaactgcctgctgcagctaactcccgcaagcaattctccgtccctccggctcccacgcgtcctagctgccctgctgtggctgagataccactgcgtatggttagcgaggagatggaggagcaagtacactcgattcgcggatcaagttcagctaatcccgtgaatagcgtccgcaggaaatcctgtttagtgaaggaggtcgaaaaaatgaagaataaaagggaggagaaaaaagcacaaaactctgagatgcgcatgaagagggctcaggaatacgatagctcattccctaactgggagttcgctcggatgattaaggaatttcgtgccaccttggaatgccaccctctaacaatgactgacccaatcgaagaacaccgcatctgcgtttgcgtgcggaagcgtcctttgaataaacaggaactggccaaaaaggagatcgacgtaattagtatcccgtctaaatgccttctactggtgcatgagccaaaacttaaggttgacttaaccaaatatttggaaaatcaggcattctgcttcgatttcgcctttgatgaaacagccagtaacgaggtcgtgtaccgtttcaccgcccgtcctctggtccagactatatttgagggcggaaaggccacctgctttgcttacgggcagaccggcagcggaaagacccacactatgggaggggatttgtccggaaaggcacaaaatgcctccaagggtatttatgcgatggcttcaagggatgtcttcctgttgaaaaatcaaccttgctatcgtaaactggggctggaggtttatgttactttctttgagatttataatggcaagctttttgacctattaaataagaaagctaaactaagagtgttagaggacggcaaacaacaggtacaggtggtaggcctgcaggaacacctggttaattctgcagacgatgtgattaagatgatcgacatggggtctgcatgtaggacatccgggcaaacatttgctaatagcaacagcagtcggtctcacgcttgtttccagattatccttagggctaaggggagaatgcacgggaaatttagtttggtggatctggcaggtaatgagcgcggagccgataccagtagcgcagacaggcaaacgcgtatggagggtgctgagataaacaagtctctactggcattgaaggaatgtatccgagctcttgggcagaacaaagcacatacacctttccgggaatccaagctcacccaggtgctgagggacagtttcatcggtgagaatagccgaacctgtatgattgctaccatcagtcccggaataagcagctgcgaatataccctcaacacactcagatacgccgatcgcgtgaaagagctgtctcctcacagtggtccctcaggagagcagctgatacagatggagaccgaagagatggaagcatgttctaacggagccttaatacccggtaatctatcgaaggaagaggaagaactgtcttcccagatgtcttcctttaacgaagcgatgacccagataagggagctggaagagaaggcaatggaggagctgaaagagattattcagcaggggcctgactggttagagctatcagagatgaccgagcagcccgactacgatctcgagacttttgtgaacaaagcagagagtgctctggcacaacaggccaagcacttttctgccctgagggacgtgatcaaagcacttaggctggcgatgcagctcgaggaacaggccagtcgacagataagctccaaaaagcgccctcagtag

SEQ ID NO: 112099 - DNA, 2016 bp, Artificial Sequence
  derived and/or modified sequence
atgatcgacttcgacgacgtggccgccatcaaccccgagctgctgcagctgctgcccctgcaccccaaggacaacctgcccctgcaggagaacgtgaccatccagaagcagaagagaagaagcgtgaacagcaagatccccgcccccaaggagagcctgagaagcagaagcaccagaatgagcaccgtgagcgagctgagaatcaccgcccaggagaacgacatggaggtggagctgcccgccgccgccaacagcagaaagcagttcagcgtgccccccgcccccaccagacccagctgccccgccgtggccgagatccccctgagaatggtgagcgaggagatggaggagcaggtgcacagcatcagaggcagcagcagcgccaaccccgtgaacagcgtgagaagaaagagctgcctggtgaaggaggtggagaagatgaagaacaagagagaggagaagaaggcccagaacagcgagatgagaatgaagagagcccaggagtacgacagcagcttccccaactgggagttcgccagaatgatcaaggagttcagagccaccctggagtgccaccccctgaccatgaccgaccccatcgaggagcacagaatctgcgtgtgcgtgagaaagagacccctgaacaagcaggagctggccaagaaggagatcgacgtgatcagcatccccagcaagtgcctgctgctggtgcacgagcccaagctgaaggtggacctgaccaagtacctggagaaccaggccttctgcttcgacttcgccttcgacgagaccgccagcaacgaggtggtgtacagattcaccgccagacccctggtgcagaccatcttcgagggcggcaaggccacctgcttcgcctacggccagaccggcagcggcaagacccacaccatgggcggcgacctgagcggcaaggcccagaacgccagcaagggcatctacgccatggccagcagagacgtgttcctgctgaagaaccagccctgctacagaaagctgggcctggaggtgtacgtgaccttcttcgagatctacaacggcaagctgttcgacctgctgaacaagaaggccaagctgagagtgctggaggacggcaagcagcaggtgcaggtggtgggcctgcaggagcacctggtgaacagcgccgacgacgtgatcaagatgatcgacatgggcagcgcctgcagaaccagcggccagaccttcgccaacagcaacagcagcagaagccacgcctgcttccagatcatcctgagagccaagggcagaatgcacggcaagttcagcctggtggacctggccggcaacgagagaggcgccgacaccagcagcgccgacagacagaccagaatggagggcgccgagatcaacaagagcctgctggccctgaaggagtgcatcagagccctgggccagaacaaggcccacacccccttcagagagagcaagctgacccaggtgctgagagacagcttcatcggcgagaacagcagaacctgcatgatcgccaccatcagccccggcatcagcagctgcgagtacaccctgaacaccctgagatacgccgacagagtgaaggagctgagcccccacagcggccccagcggcgagcagctgatccagatggagaccgaggagatggaggcctgcagcaacggcgccctgatccccggcaacctgagcaaggaggaggaggagctgagcagccagatgagcagcttcaacgaggccatgacccagatcagagagctggaggagaaggccatggaggagctgaaggagatcatccagcagggccccgactggctggagctgagcgagatgaccgagcagcccgactacgacctggagaccttcgtgaacaaggccgagagcgccctggcccagcaggccaagcacttcagcgccctgagagacgtgatcaaggccctgagactggccatgcagctggaggagcaggccagcagacagatcagcagcaagaagagaccccagtag

SEQ ID NO: 112100 - protein, 577 aa, Artificial Sequence
  derived and/or modified sequence
MTSAGGAPGALPAGTPESSLHEALDQCMTALDLFLTNQFSEALSYLKPRTKESMYHSLTYATILEMQAMMTFDPQDILLAGNMMKEAQMLCQRHRRKSSVTDSFSSLVNRPTLGQFTEEEIHAEVCYAECLLQRAALTFLQDENMVSFIKGGIKVRNSYQTYKELDSLVQSSQYCKGENHPHFEGGVKLGVGAFNLTLSMLPTRILRLLEFVGFSGNKDYGLLQLEEGASGHSFRSVLCVMLLLCYHTFLTFVLGTGNVNIEEAEKLLKPYLNRYPKGAIFLFFAGRIEVIKGNIDAAIRRFEECCEAQQHWKQFHHMCYWELMWCFTYKGQWKMSYFYADLLSKENCWSKATYIYMKAAYLSMFGKEDHKPFGDDEVELFRAVPGLKLKIAGKSLPTEKFAIRKSRRYFSSNPISLPVPALEMMYIWNGYAVIGKQPKLTDGILEIITKAEEMLEKGPENEYSVDDECLVKLLKGLCLKYLGRVQEAEENFRSISANEKKIKYDHYLIPNALLELALLLMEQDRNEEAIKLLESAKQNYKNYSMESRTHFRIQAATLQAKSSLENSSRSMVSSVSL

SEQ ID NO: 112101 - DNA, 1734 bp, Artificial Sequence
  derived and/or modified sequence
atgaccagcgccggcggcgcccccggcgccctgcccgccggcacccccgagagcagcctgcacgaggccctggaccagtgcatgaccgccctggacctgttcctgaccaaccagttcagcgaggccctgagctacctgaagcccagaaccaaggagagcatgtaccacagcctgacctacgccaccatcctggagatgcaggccatgatgaccttcgacccccaggacatcctgctggccggcaacatgatgaaggaggcccagatgctgtgccagagacacagaagaaagagcagcgtgaccgacagcttcagcagcctggtgaacagacccaccctgggccagttcaccgaggaggagatccacgccgaggtgtgctacgccgagtgcctgctgcagagagccgccctgaccttcctgcaggacgagaacatggtgagcttcatcaagggcggcatcaaggtgagaaacagctaccagacctacaaggagctggacagcctggtgcagagcagccagtactgcaagggcgagaaccacccccacttcgagggcggcgtgaagctgggcgtgggcgccttcaacctgaccctgagcatgctgcccaccagaatcctgagactgctggagttcgtgggcttcagcggcaacaaggactacggcctgctgcagctggaggagggcgccagcggccacagcttcagaagcgtgctgtgcgtgatgctgctgctgtgctaccacaccttcctgaccttcgtgctgggcaccggcaacgtgaacatcgaggaggccgagaagctgctgaagccctacctgaacagataccccaagggcgccatcttcctgttcttcgccggcagaatcgaggtgatcaagggcaacatcgacgccgccatcagaagattcgaggagtgctgcgaggcccagcagcactggaagcagttccaccacatgtgctactgggagctgatgtggtgcttcacctacaagggccagtggaagatgagctacttctacgccgacctgctgagcaaggagaactgctggagcaaggccacctacatctacatgaaggccgcctacctgagcatgttcggcaaggaggaccacaagcccttcggcgacgacgaggtggagctgttcagagccgtgcccggcctgaagctgaagatcgccggcaagagcctgcccaccgagaagttcgccatcagaaagagcagaagatacttcagcagcaaccccatcagcctgcccgtgcccgccctggagatgatgtacatctggaacggctacgccgtgatcggcaagcagcccaagctgaccgacggcatcctggagatcatcaccaaggccgaggagatgctggagaagggccccgagaacgagtacagcgtggacgacgagtgcctggtgaagctgctgaagggcctgtgcctgaagtacctgggcagagtgcaggaggccgaggagaacttcagaagcatcagcgccaacgagaagaagatcaagtacgaccactacctgatccccaacgccctgctggagctggccctgctgctgatggagcaggacagaaacgaggaggccatcaagctgctggagagcgccaagcagaactacaagaactacagcatggagagcagaacccacttcagaatccaggccgccaccctgcaggccaagagcagcctggagaacagcagcagaagcatggtgagcagcgtgagcctgtag

SEQ ID NO: 112102 - DNA, 1734 bp, Artificial Sequence
  derived and/or modified sequence
atgacatcagctgggggagcgccaggtgccctgcccgctgggaccccagaaagttccctgcatgaggcacttgaccagtgtatgactgcactagatctgtttttgacaaaccagtttagcgaagcccttagctacctgaaacctagaaccaaggaatcgatgtatcactcgctgacttatgcaaccatcctggagatgcaggcaatgatgacattcgatccacaggacatactgctggctgggaatatgatgaaggaagcccagatgttatgccagagacacagaaggaaatctagtgtgacggattccttcagttcattggttaatcggcctactctgggacagttcaccgaggaggaaatacacgccgaggtctgctatgccgaatgcctgttacagagggcagctctgactttcctgcaagatgagaacatggtgtctttcatcaaaggggggattaaggttcgaaatagttatcagacctacaaggagttagacagtctcgtgcagtcttcccagtattgcaaaggagagaaccaccctcatttcgaggggggggtgaaattaggtgttggggcattcaatttgaccctgagcatgctgcctactagaatactgagactgctagaattcgtgggcttctctggaaacaaggattacggcctgctgcaacttgaggaaggggcctctggacattccttcagatccgtgctgtgtgtgatgctcctcctttgctaccacacctttttgacattcgtgcttggtaccggcaacgtgaacatcgaggaagccgagaagcttttgaagccatatcttaaccgttatcctaaaggcgctattttcctgtttttcgccggaaggatcgaggtgattaaaggcaatatcgatgccgcaatacgccggtttgaagagtgctgcgaggctcagcaacattggaaacagtttcaccatatgtgttattgggaactgatgtggtgctttacctataaagggcagtggaaaatgagctatttctatgccgacctcctgagtaaggaaaattgttggagcaaggccacatacatttacatgaaggcagcttacctgtccatgtttggcaaagaagatcacaagcccttcggtgacgacgaggtggagctgttccgtgctgttcccgggctgaaactcaaaattgcgggaaaatccctaccaacagagaaattcgctattagaaaaagccggcgctatttctcaagcaatccgatttctctccccgtgccagcgctggagatgatgtacatttggaatggctatgccgtgatagggaagcagcccaaacttaccgatggaattttggagatcattacgaaagcagaagagatgttggaaaagggcccagagaacgagtactcggtggacgacgagtgtcttgttaagttattgaaaggattgtgcctgaagtacctgggacgggttcaggaagctgaagagaacttccggagcatttccgcaaatgaaaaaaagatcaagtacgaccactatttaattccaaacgccctgctcgagctggctctccttctcatggaacaggaccgaaacgaagaagcgataaagctactggagtctgccaagcagaactataagaactacagcatggaatcccgtacacatttccgtattcaggctgcaacactgcaggctaaatccagtctggagaacagttctagatccatggtttcatccgtaagcctatag

SEQ ID NO: 112103 - DNA, 1734 bp, Artificial Sequence
  derived and/or modified sequence
atgaccagcgctgggggcgcccctggggccctgcctgctggcaccccagagagcagcctgcacgaggccctggaccagtgcatgacagccctggacctcttcctgaccaaccagttcagcgaggccctgagctacctgaagcccaggaccaaggagagcatgtaccacagcctgacctacgccaccatcctggagatgcaggccatgatgacctttgacccccaggacatcctgctggccggcaacatgatgaaggaggcccagatgctgtgccagaggcacaggaggaagagctctgtgacagacagcttcagcagcctggtgaaccggcccaccctgggccagttcacagaggaggagatccatgctgaggtgtgctacgcagaatgtctgctgcagagagctgccctgaccttcctgcaggatgagaacatggtgtccttcatcaagggcggcatcaaggtgaggaacagctaccagacctacaaggagctggacagcctggtgcagagcagccagtactgcaagggggagaaccacccccactttgaaggaggagtgaagctgggcgtgggcgccttcaacctgaccctgtccatgctgcccacccgcatcctgcggctgctggagtttgtgggcttcagcggcaacaaggactatggcctgctgcagctggaggagggcgccagcggccacagcttccgctctgtgctgtgtgtgatgctgctgctgtgctaccacaccttcctgacctttgtgctgggcactggaaatgtgaacatcgaggaggccgagaagctgctgaagccctacctgaaccgctaccccaagggggccatcttcctgttctttgctggccgcatcgaggtgatcaagggcaacattgatgctgccatccgccgctttgaggagtgctgtgaggcccagcagcactggaagcagttccaccacatgtgctactgggagctgatgtggtgcttcacctacaagggccagtggaagatgagctacttctacgccgacctgctgagcaaggagaactgctggagcaaggccacctacatctacatgaaggccgcctacctgtccatgtttgggaaggaggaccacaagccctttggagatgatgaggtggagctgttccgggctgtgcccggcctgaagctgaagattgctgggaagagcctgcccacagagaagtttgccatcaggaagagccgccgctacttcagcagcaaccccatcagcctgcctgtgcctgccctggagatgatgtacatctggaatggctacgccgtcatcggcaagcagcccaagctgacagatggcatcctggagatcatcaccaaggccgaggagatgctggagaagggcccagaaaatgagtacagcgtggatgatgagtgcctggtgaagctgctgaagggcctgtgcctgaagtacctgggccgggtgcaggaggccgaggagaacttccgcagcatcagcgccaatgagaagaagatcaagtatgaccactacctgatccccaatgccctgctggagctggccctgctgctgatggagcaggacagaaatgaggaggccatcaagctgctggagagcgccaagcagaactacaagaactacagcatggagagcaggacccacttccgcatccaggccgccaccctgcaggccaagagcagcctggagaacagcagccgctccatggtgtcctctgtgtccctgtag

SEQ ID NO: 112104 - DNA, 1734 bp, Artificial Sequence
  derived and/or modified sequence
atgaccagcgccggcggcgcccccggcgccctgcccgccggcaccccggaatcttccctccatgaggccctcgatcaatgtatgaccgcactggatctttttctaacgaaccagttttctgaagccttgagctatttgaaaccccgaaccaaagaaagcatgtaccacagtttaacttacgccaccatactggaaatgcaggcaatgatgacttttgacccacaggacattctactagcaggcaatatgatgaaggaggcgcagatgctgtgtcagcggcatagacgcaagtcatctgttactgatagctttagctcacttgttaataggccaactctcgggcaattcaccgaagaagagatccatgctgaagtgtgctatgccgagtgtctgcttcagagagccgctctcaccttcttgcaggatgaaaacatggtgtctttcatcaagggtggaatcaaagtgcgtaattcttatcagacttacaaagaactggactctttggtgcagtcctcacaatactgtaaaggagagaatcacccccacttcgaaggcggagtcaaactgggagtgggggctttcaacctgacattgtcaatgctgcccacccgcatcctgaggctgctggaattcgtcgggtttagtggtaataaggactatggcctgttgcagctggaggaaggagcctccggacattcgttccgcagcgtgctttgcgtaatgcttctcttgtgttaccacacatttttgacttttgtgctcggcaccggtaatgtgaacatcgaggaagccgagaagctcctcaagccttacctaaatcggtatcctaagggggcgatctttctattttttgccggacggatcgaagtgattaagggaaatatagatgcagcgatcagaaggttcgaggaatgttgtgaagctcagcagcactggaagcagttccatcacatgtgctactgggaacttatgtggtgtttcacatataaggggcagtggaaaatgtcatatttctacgcagatctgttatccaaggagaattgttggtcaaaggctacttatatctatatgaaggccgcttacctgagtatgttcggcaaggaggatcataaacccttcggtgatgatgaggtcgaactgtttcgcgcagtgccggggttgaagctaaagattgccgggaagagtctgcccactgagaaattcgcaatacgaaaatctagacgttacttttcctctaatcccatctcactgcctgtaccagcactggagatgatgtatatatggaatgggtatgccgtgatcggtaaacagccaaagttaacagacggcatcctcgagattataacaaaggcagaagaaatgctcgagaagggccccgagaacgaatacagtgtggacgacgagtgcctggtaaaactactgaaaggattgtgcctgaaatacctgggtagagtccaagaggcagaagaaaactttcgcagcattagtgccaacgagaagaaaatcaagtatgatcactacctcattccaaacgccctcttagagctggcgcttctgttgatggaacaagatagaaacgaggaggcgataaagctcttggagagtgctaagcagaactacaagaactacagtatggaatcaaggacccactttcggattcaggctgcaactcttcaagccaaatcctctctggagaatagctccagatctatggtctcttccgtctccttgtag

SEQ ID NO: 112105 - DNA, 1734 bp, Artificial Sequence
  derived and/or modified sequence
atgacatctgccggtggcgctccaggagcacttcccgctggaacaccggaatcgtctttgcacgaagctttagatcagtgtatgacagcccttgatctgtttctgaccaatcaattcagtgaagccttatcctacctgaagcctcgtaccaaggagtccatgtatcacagcttaacatacgctacgatccttgagatgcaggcaatgatgactttcgacccacaagatatcttattggccggaaacatgatgaaggaggctcaaatgctctgccaaagacaccggagaaagtccagcgtgacagactccttttccagtctggttaataggccaacactgggacagtttacagaggaagaaattcatgcagaggtatgttatgctgaatgccttctgcaacgcgcagctctgacctttctgcaggatgagaatatggtgagcttcattaaagggggtattaaagttaggaattcatatcagacttataaagaactggatagcctcgtgcagagctctcagtactgtaagggtgaaaatcaccctcacttcgagggaggcgtaaaactcggagtaggagctttcaatcttaccctctccatgcttccaacaaggattctcagactcttagaatttgtaggcttttcgggaaacaaggactacggcctgctgcagttggaagagggggcatccggtcattcttttcgctccgtgctgtgcgtcatgctgcttctatgctaccacacatttctgacattcgttctcggcaccggtaacgttaatatagaggaggcagagaaactgttgaagccctacttaaacagatatccaaaaggcgctatcttcctgttttttgctggtcgtatcgaagtcatcaaaggtaatatcgacgcggctatccgccgtttcgaggagtgctgtgaggctcaacagcactggaaacagtttcaccatatgtgttattgggagctgatgtggtgtttcacctataaaggccagtggaaaatgtcctacttttacgctgacctcctatctaaagaaaattgctggtctaaggcgacatacatctatatgaaggcagcttacctgtccatgttcggcaaggaagaccataaaccattcggagatgacgaggtagaactgtttcgggcagtgcccggacttaagctcaaaatcgctggcaaatccctgcctaccgagaaattcgccatccgaaaaagccgacgctacttttcaagtaaccccatcagcttgcccgtaccggctctcgagatgatgtacatctggaacgggtacgccgtcatcggaaagcaaccaaaactgacagatggcatactggagataataacgaaagcagaggaaatgctggaaaagggacctgaaaacgaatactcagtggacgacgaatgcctagttaagctgctgaagggactttgtctaaagtacctggggagagtgcaagaggcagaggagaatttccgctccatctctgcgaatgagaaaaaaatcaaatatgatcactacctcatcccgaatgccctccttgaactggcactgcttctaatggagcaggataggaatgaagaagccatcaagttgcttgagtccgccaagcagaactacaaaaactactccatggaatcccgcacccacttccggatccaagcggctactctccaagctaagtcaagcctggagaattcaagtcgctccatggtgtcttctgttagtttatag

SEQ ID NO: 112106 - DNA, 2162 bp, Artificial Sequence
  derived and/or modified sequence
agcgcccggctcggggttgcggcggcagcacctgggccgcgattggcgtccggctggggcagcgccgcccgcgcccctcggcgatgacctcggctggcggcgccccaggagccctgcccgcggggactcctgagagcagcctccatgaggccctggaccagtgcatgaccgccctggacctcttcctcaccaaccagttctcagaagcactcagctacctcaagcccagaaccaaggaaagcatgtaccactcactgacatatgccaccatcctggagatgcaggccatgatgacctttgaccctcaggacatcctgcttgccggcaacatgatgaaggaggcacagatgctgtgtcagaggcaccggaggaagtcttctgtaacagattccttcagcagcctggtgaaccgccccacgctgggccaattcactgaagaggaaatccacgctgaggtctgctatgcagagtgcctgctgcagcgagcagccctgaccttcctgcaggacgagaacatggtgagcttcatcaaaggcggcatcaaagttcgaaacagctaccagacctacaaggagctggacagccttgttcagtcctcacaatactgcaagggtgagaaccacccgcactttgaaggaggagtgaagcttggtgtaggggccttcaacctgacactgtccatgcttcctactaggatcctgaggctgttggagtttgtggggttttcaggaaacaaggactatgggctgctgcagctggaggagggagcgtcagggcacagcttccgctctgtgctctgtgtcatgctcctgctgtgctaccacaccttcctcaccttcgtgctcggtactgggaacgtcaacatcgaggaggccgagaagctcttgaagccctacctgaaccggtaccctaagggtgccatcttcctgttctttgcagggaggattgaagtcattaaaggcaacattgatgcagccatccggcgtttcgaggagtgctgtgaggcccagcagcactggaagcagttccaccacatgtgctactgggagctgatgtggtgcttcacctacaagggccagtggaagatgtcctacttctacgccgacctgctcagcaaggagaactgctggtccaaggccacctacatttacatgaaggccgcctacctcagcatgtttgggaaggaggaccacaagccgttcggggacgacgaagtggaattatttcgagctgtgccaggcctgaagctcaagattgctgggaaatctctacccacagagaagtttgccatccggaagtcccggcgctacttctcctccaaccctatctcgctgccagtgcctgctctggaaatgatgtacatctggaacggctacgccgtgattgggaagcagccgaaactcacggatgggatacttgagattatcactaaggctgaagagatgctggagaaaggcccagagaacgagtactcagtggatgacgagtgcttggtgaaattgttgaaaggcctgtgtctgaaatacctgggccgtgtccaggaggccgaggagaattttaggagcatctctgccaatgaaaagaagattaaatatgaccactacttgatcccaaacgccctgctggagctggccctgctgcttatggagcaagacagaaacgaagaggccatcaaacttttggaatctgccaagcaaaactacaagaattactccatggagtcaaggacacactttcgaatccaggcagccacactccaagccaagtcttccctagagaacagcagcagatccatggtctcatcagtgtccttgtagctttgtgcagcagttccgggctggaagacagagacagctggacagagctcctgaaaacatttcaaaataccccctccccctgccctgccctgcctttggggtccaccggcactccagttggatggcacaacatagtgtatccgtgcagaagccgagctggcattttcaccagtgtagccaagggcctttgccaagggcagagcaggtggagccctctgcctgccctatcacacatacgggtacttgcttttcactgtgatgtttaagagaatgtatgaacagtttacattttccttagaaatacattgatgggatcacagttggctttaaaaaccaacaacaatc

SEQ ID NO: 112107 - protein, 613 aa, Artificial Sequence
  derived and/or modified sequence
MGQKGHKDSLYPCGGTPESSLHEALDQCMTALDLFLTNQFSEALSYLKPRTKESMYHSLTYATILEMQAMMTFDPQDILLAGNMMKEAQMLCQRHRRKSSVTDSFSSLVNRPTLGQFTEEEIHAEVCYAECLLQRAALTFLQGSSHGGAVRPRALHDPSHACSCPPGPGRQHLFLLQDENMVSFIKGGIKVRNSYQTYKELDSLVQSSQYCKGENHPHFEGGVKLGVGAFNLTLSMLPTRILRLLEFVGFSGNKDYGLLQLEEGASGHSFRSVLCVMLLLCYHTFLTFVLGTGNVNIEEAEKLLKPYLNRYPKGAIFLFFAGRIEVIKGNIDAAIRRFEECCEAQQHWKQFHHMCYWELMWCFTYKGQWKMSYFYADLLSKENCWSKATYIYMKAAYLSMFGKEDHKPFGDDEVELFRAVPGLKLKIAGKSLPTEKFAIRKSRRYFSSNPISLPVPALEMMYIWNGYAVIGKQPKLTDGILEIITKAEEMLEKGPENEYSVDDECLVKLLKGLCLKYLGRVQEAEENFRSISANEKKIKYDHYLIPNALLELALLLMEQDRNEEAIKLLESAKQNYKNYSMESRTHFRIQAATLQAKSSLENSSRSMVSSVSL

SEQ ID NO: 112108 - DNA, 1842 bp, Artificial Sequence
  derived and/or modified sequence
atgggccagaagggccacaaggacagcctgtacccctgcggcggcacccccgagagcagcctgcacgaggccctggaccagtgcatgaccgccctggacctgttcctgaccaaccagttcagcgaggccctgagctacctgaagcccagaaccaaggagagcatgtaccacagcctgacctacgccaccatcctggagatgcaggccatgatgaccttcgacccccaggacatcctgctggccggcaacatgatgaaggaggcccagatgctgtgccagagacacagaagaaagagcagcgtgaccgacagcttcagcagcctggtgaacagacccaccctgggccagttcaccgaggaggagatccacgccgaggtgtgctacgccgagtgcctgctgcagagagccgccctgaccttcctgcagggcagcagccacggcggcgccgtgagacccagagccctgcacgaccccagccacgcctgcagctgcccccccggccccggcagacagcacctgttcctgctgcaggacgagaacatggtgagcttcatcaagggcggcatcaaggtgagaaacagctaccagacctacaaggagctggacagcctggtgcagagcagccagtactgcaagggcgagaaccacccccacttcgagggcggcgtgaagctgggcgtgggcgccttcaacctgaccctgagcatgctgcccaccagaatcctgagactgctggagttcgtgggcttcagcggcaacaaggactacggcctgctgcagctggaggagggcgccagcggccacagcttcagaagcgtgctgtgcgtgatgctgctgctgtgctaccacaccttcctgaccttcgtgctgggcaccggcaacgtgaacatcgaggaggccgagaagctgctgaagccctacctgaacagataccccaagggcgccatcttcctgttcttcgccggcagaatcgaggtgatcaagggcaacatcgacgccgccatcagaagattcgaggagtgctgcgaggcccagcagcactggaagcagttccaccacatgtgctactgggagctgatgtggtgcttcacctacaagggccagtggaagatgagctacttctacgccgacctgctgagcaaggagaactgctggagcaaggccacctacatctacatgaaggccgcctacctgagcatgttcggcaaggaggaccacaagcccttcggcgacgacgaggtggagctgttcagagccgtgcccggcctgaagctgaagatcgccggcaagagcctgcccaccgagaagttcgccatcagaaagagcagaagatacttcagcagcaaccccatcagcctgcccgtgcccgccctggagatgatgtacatctggaacggctacgccgtgatcggcaagcagcccaagctgaccgacggcatcctggagatcatcaccaaggccgaggagatgctggagaagggccccgagaacgagtacagcgtggacgacgagtgcctggtgaagctgctgaagggcctgtgcctgaagtacctgggcagagtgcaggaggccgaggagaacttcagaagcatcagcgccaacgagaagaagatcaagtacgaccactacctgatccccaacgccctgctggagctggccctgctgctgatggagcaggacagaaacgaggaggccatcaagctgctggagagcgccaagcagaactacaagaactacagcatggagagcagaacccacttcagaatccaggccgccaccctgcaggccaagagcagcctggagaacagcagcagaagcatggtgagcagcgtgagcctgtag

SEQ ID NO: 112109 - DNA, 1842 bp, Artificial Sequence
  derived and/or modified sequence
atgggtcagaaaggacacaaagattccttgtatccctgtggggggactcccgagtcttcgcttcatgaagcgctggaccagtgtatgacagcgctggatctctttctgacaaatcagtttagtgaggccttgtcctacttaaagccccggaccaaggagtcaatgtatcacagtcttacctacgcaactatattggaaatgcaggccatgatgacgttcgatccacaagacatcctgcttgccggcaatatgatgaaggaggcccagatgttatgccagaggcaccggcgcaaaagcagcgtgacagacagcttcagctctcttgttaatcgcccaaccctgggtcagttcacagaggaggaaatacacgccgaggtatgctatgctgaatgcctgctccagcgggcagccctgacttttctgcaaggctcatctcacgggggggccgtgcgcccacgagcgttgcatgacccctcgcatgcctgcagctgtcctcctggccctggtcgccagcacttattcctgcttcaggacgaaaacatggtctccttcatcaagggtggcatcaaggtacgaaatagctaccagacatacaaagaacttgacagtctggtgcagtcaagccagtactgcaaaggcgagaaccacccccatttcgagggtggggtgaagttaggcgtgggcgccttcaacctgactctgagcatgctccccactaggatccttcggctccttgaattcgtgggtttcagtggtaataaggactacggacttctgcaattagaagaaggcgcttctggacattcttttaggtccgtattgtgtgtaatgctcctcctttgctaccacactttcctcaccttcgtccttggaacggggaatgtgaatattgaagaagctgagaagctactgaaaccctacctaaacagatacccaaagggggctatattcctgttctttgctggtcgcatagaggtaattaaaggcaatatcgacgcagccattagaaggttcgaggagtgctgtgaggctcagcagcactggaaacagtttcaccatatgtgctattgggaactgatgtggtgttttacttataagggtcaatggaagatgtcttatttttatgctgatctactctcgaaagaaaattgttggagcaaggctacttacatatatatgaaagctgcttacttatccatgttcggcaaggaggatcataagcccttcggcgacgacgaggtcgaactgttccgtgccgttccaggactcaagctgaagattgccggtaaatccctgccaactgaaaaatttgctatcagaaaaagtcgaagatatttttcttcaaaccctatctctttacccgttccagcacttgagatgatgtatatctggaatggttacgccgtgatagggaagcagcctaaactgactgacggcatcctggagatcatcacaaaggccgaggagatgctggaaaaaggccccgagaatgaatactcagtggatgacgagtgcctcgtgaaactgctgaaagggttatgtctgaagtatttgggccgagtgcaggaggccgaggaaaacttcagaagcatctcagctaatgagaagaagataaagtacgaccattacttaataccaaatgccctgcttgaattagcactgctactgatggaacaggaccgaaacgaggaggctattaagttactggaatcagcgaaacagaattataaaaattattctatggagagcaggacccacttccggatccaggctgcgactctacaagccaaatcgtcccttgagaacagtagtcgatccatggtaagcagcgtgagcctgtag

SEQ ID NO: 112110 - DNA, 1842 bp, Artificial Sequence
  derived and/or modified sequence
atgggccagaagggccacaaggacagcctgtacccctgtggcggcaccccagagagcagcctgcacgaggccctggaccagtgcatgacagccctggacctcttcctgaccaaccagttcagcgaggccctgagctacctgaagcccaggaccaaggagagcatgtaccacagcctgacctacgccaccatcctggagatgcaggccatgatgacctttgacccccaggacatcctgctggccggcaacatgatgaaggaggcccagatgctgtgccagaggcacaggaggaagagctctgtgacagacagcttcagcagcctggtgaaccggcccaccctgggccagttcacagaggaggagatccacgccgaggtgtgctacgccgagtgcctgctgcagagagctgccctgaccttcctgcagggcagcagccacggcggcgctgtgcggccccgggccctgcatgaccccagccacgcctgcagctgccccccaggccctggccggcagcacctgttcctgctgcaggatgagaacatggtgtccttcatcaagggcggcatcaaggtgaggaacagctaccagacctacaaggagctggacagcctggtgcagagcagccagtactgcaagggggagaaccacccccactttgaaggaggagtgaagctgggcgtgggcgccttcaacctgaccctgtccatgctgcccacccgcatcctgcggctgctggagtttgtgggcttcagcggcaacaaggactatggcctgctgcagctggaggagggcgccagcggccacagcttccgctctgtgctgtgtgtgatgctgctgctgtgctaccacaccttcctgacctttgtgctgggcactggaaatgtgaacatcgaggaggccgagaagctgctgaagccctacctgaaccgctaccccaagggggccatcttcctgttctttgctggccgcatcgaggtgatcaagggcaacattgatgctgccatccgccgctttgaggagtgctgtgaggcccagcagcactggaagcagttccaccacatgtgctactgggagctgatgtggtgcttcacctacaagggccagtggaagatgagctacttctacgccgacctgctgagcaaggagaactgctggagcaaggccacctacatctacatgaaggccgcctacctgtccatgtttgggaaggaggaccacaagccctttggagatgatgaggtggagctgttccgggctgtgcccggcctgaagctgaagattgctgggaagagcctgcccacagagaagtttgccatcaggaagagccgccgctacttcagcagcaaccccatcagcctgcctgtgcctgccctggagatgatgtacatctggaatggctacgccgtcatcggcaagcagcccaagctgacagatggcatcctggagatcatcaccaaggccgaggagatgctggagaagggcccagaaaatgagtacagcgtggatgatgagtgcctggtgaagctgctgaagggcctgtgcctgaagtacctgggccgggtgcaggaggccgaggagaacttccgcagcatcagcgccaatgagaagaagatcaagtatgaccactacctgatccccaatgccctgctggagctggccctgctgctgatggagcaggacagaaatgaggaggccatcaagctgctggagagcgccaagcagaactacaagaactacagcatggagagcaggacccacttccgcatccaggccgccaccctgcaggccaagagcagcctggagaacagcagccgctccatggtgtcctctgtgtccctgtag

SEQ ID NO: 112111 - DNA, 1842 bp, Artificial Sequence
  derived and/or modified sequence
atgggccagaagggccacaaggacagcctgtacccctgcggcggcacacccgaatcgagccttcacgaggccttggatcagtgtatgactgcactggacctctttcttaccaaccagttttctgaggccttatcctatctgaagccaagaaccaaagagagcatgtaccacagcctgacctatgctactattctggagatgcaggcaatgatgacctttgacccccaggacatcttactggccggaaatatgatgaaggaagcccagatgctctgtcagcgccacaggcggaagagttcagtaacagattccttcagctccctggttaatagacccacactcggccagtttactgaagaagagattcacgcagaggtatgttacgccgaatgccttctccagcgcgcagccttgacctttctacaggggagcagtcacggaggcgctgtgaggccgcgcgctctgcacgacccatctcatgcctgctcatgcccaccaggaccgggtcgccagcacttattcttgctgcaggatgaaaatatggtctctttcattaaaggaggcattaaggttcgtaatagttatcagacgtataaagagctggattctctagttcaaagctcacagtattgtaagggtgaaaatcacccacacttcgagggtggcgttaagctcggcgttggagcctttaatctgactttgagtatgctaccaacgaggatcctgaggctcctggaatttgtggggttttcgggtaacaaggattatggcctcttgcagctggaagagggagcctctggccacagcttccgaagtgtgctgtgtgtaatgctgctgctgtgttatcacactttcctgacttttgtccttggcactgggaacgtgaacattgaagaggccgaaaaactgctcaaaccctacctcaacagataccccaagggagctatctttctcttttttgcaggtagaatcgaagtgattaaaggcaatattgacgcggcgatacgccggttcgaagaatgttgtgaggcccagcaacactggaagcagtttcaccatatgtgctactgggaactcatgtggtgctttacctataaggggcagtggaagatgtcctatttctacgcagatcttctgtcaaaggaaaactgctggtcgaaagccacatacatatacatgaaagccgcttacctctcaatgttcggaaaagaagaccacaagcctttcggtgacgatgaggtggaactgtttcgggcggttccagggctaaagctgaaaattgccgggaagagtctcccaacagaaaaattcgccattcgaaagagcagaaggtacttttccagtaacccaattagtctgccagtcccagcgttggagatgatgtacatttggaacggttatgccgtgatcggaaagcagcctaaattaaccgacggcattctggaaataattactaaggctgaggagatgctggaaaaagggccggagaacgagtattcagtggatgacgagtgtctggtcaagcttttgaagggactctgcctcaagtatctaggccgggtgcaggaggccgaagagaacttcaggagcatctcagccaacgaaaaaaaaattaagtacgatcactatctcatcccaaatgccctcctcgaacttgccctgctgctgatggagcaggacagaaatgaagaagccattaagcttcttgaatctgccaagcagaattacaagaattattctatggagtctcgcacgcacttcagaatccaagctgctaccttgcaggctaaaagctccctggagaattcctctcgctcgatggtgtcaagcgtgtctctgtag

SEQ ID NO: 112112 - DNA, 1842 bp, Artificial Sequence
  derived and/or modified sequence
atgggccaaaaaggacacaaagatagcctgtatccgtgtggcggtacccccgagagcagcctgcacgaggccttagatcagtgtatgaccgcacttgacctgttcctaacgaatcagttttctgaggcactcagctatttgaaaccaaggacaaaagagtcaatgtatcactcccttacttacgcaacaatcctggaaatgcaggccatgatgactttcgacccgcaggatatactgctggcgggtaatatgatgaaagaagcgcagatgctgtgtcagagacaccggagaaaatctagcgtaacggactctttctcaagcctggtcaatcgccctaccctgggacagttcactgaagaagagattcacgccgaggtctgttatgccgagtgcctcctgcaacgggcagccctaacctttctgcagggctcttcacatggcggtgcagtgcgtcccagggcactccacgatccatcacacgcctgttcatgtccccctgggcctggcagacagcacctttttttgctccaggacgaaaacatggtcagctttatcaaaggcggtataaaggtgcggaatagttaccagacgtacaaagaactggacagcctcgtgcagtcaagtcagtactgcaagggcgagaaccacccacacttcgagggcggagttaagctgggagtcggggcattcaatctgacattatctatgctccccacccgcattctgcggctcctggaattcgtgggatttagcggtaacaaggattacgggctgctccaactggaagagggtgcaagcggtcattctttccggagtgtgttgtgcgtgatgctcctgctgtgttatcatacctttctcacattcgttctcggcacaggcaacgtgaacatagaagaggcggaaaagttgctcaaaccatatctcaatagatatccaaagggcgcaatttttctctttttcgcaggaaggatcgaggtgataaaaggtaacatcgatgctgccattaggagattcgaagagtgctgtgaagcccagcaacactggaagcagtttcaccatatgtgttattgggagcttatgtggtgctttacgtacaagggacagtggaaaatgtcatatttctacgccgatctgctgtcaaaggagaactgctggagtaaggccacatacatatacatgaaggcagcctatttgtccatgtttggcaaggaagatcacaagccattcggagacgacgaagtggagctgtttagggccgtcccgggtcttaaattgaagatcgccggaaagtcgctacctacagagaaatttgcaattaggaagtctcgacgttacttttccagcaatcccatctccctccccgtgcctgctctggaaatgatgtacatctggaacggctatgccgtaatcgggaagcagccaaaactcaccgatgggattctggagatcatcaccaaggccgaggagatgctggaaaagggcccagaaaacgaatactcagtggacgatgaatgtctggtgaaacttttgaagggcctgtgtctgaagtaccttgggagggtccaagaggccgaggagaatttcaggtctatctctgcaaatgaaaaaaaaataaagtacgaccattacctgattccaaacgccctgcttgaacttgccctgctgctcatggaacaggacaggaacgaagaagccataaagctgctcgagtcagctaagcagaactataagaactactctatggaatcgaggacacatttccgcatccaggcagcgactttacaggcgaagtcaagcctggagaactcttctagaagtatggtgtccagcgtatccctttag

SEQ ID NO: 112113 - DNA, 2790 bp, Artificial Sequence
  derived and/or modified sequence
gtgggatttagtggctgggctgcaccccctgggggggcagcagagcccaatgggccagaagggccacaaagactccctttacccttgtggagggactcctgagagcagcctccatgaggccctggaccagtgcatgaccgccctggacctcttcctcaccaaccagttctcagaagcactcagctacctcaagcccagaaccaaggaaagcatgtaccactcactgacatatgccaccatcctggagatgcaggccatgatgacctttgaccctcaggacatcctgcttgccggcaacatgatgaaggaggcacagatgctgtgtcagaggcaccggaggaagtcttctgtaacagattccttcagcagcctggtgaaccgccccacgctgggccaattcactgaagaggaaatccacgctgaggtctgctatgcagagtgcctgctgcagcgagcagccctgaccttcctgcagggttcctcacacggaggggcagtcaggcccagagccttgcatgatccctctcacgcctgcagctgcccacctgggccaggccgtcagcatcttttcctcctgcaggacgagaacatggtgagcttcatcaaaggcggcatcaaagttcgaaacagctaccagacctacaaggagctggacagccttgttcagtcctcacaatactgcaagggtgagaaccacccgcactttgaaggaggagtgaagcttggtgtaggggccttcaacctgacactgtccatgcttcctactaggatcctgaggctgttggagtttgtggggttttcaggaaacaaggactatgggctgctgcagctggaggagggagcgtcagggcacagcttccgctctgtgctctgtgtcatgctcctgctgtgctaccacaccttcctcaccttcgtgctcggtactgggaacgtcaacatcgaggaggccgagaagctcttgaagccctacctgaaccggtaccctaagggtgccatcttcctgttctttgcagggaggattgaagtcattaaaggcaacattgatgcagccatccggcgtttcgaggagtgctgtgaggcccagcagcactggaagcagttccaccacatgtgctactgggagctgatgtggtgcttcacctacaagggccagtggaagatgtcctacttctacgccgacctgctcagcaaggagaactgctggtccaaggccacctacatttacatgaaggccgcctacctcagcatgtttgggaaggaggaccacaagccgttcggggacgacgaagtggaattatttcgagctgtgccaggcctgaagctcaagattgctgggaaatctctacccacagagaagtttgccatccggaagtcccggcgctacttctcctccaaccctatctcgctgccagtgcctgctctggaaatgatgtacatctggaacggctacgccgtgattgggaagcagccgaaactcacggatgggatacttgagattatcactaaggctgaagagatgctggagaaaggcccagagaacgagtactcagtggatgacgagtgcttggtgaaattgttgaaaggcctgtgtctgaaatacctgggccgtgtccaggaggccgaggagaattttaggagcatctctgccaatgaaaagaagattaaatatgaccactacttgatcccaaacgccctgctggagctggccctgctgcttatggagcaagacagaaacgaagaggccatcaaacttttggaatctgccaagcaaaactacaagaattactccatggagtcaaggacacactttcgaatccaggcagccacactccaagccaagtcttccctagagaacagcagcagatccatggtctcatcagtgtccttgtagctttgtgcagcagttccgggctggaagacagagacagctggacagagctcctgaaaacatttcaaaataccccctccccctgccctgccctgcctttggggtccaccggcactccagttggatggcacaacatagtgtatccgtgcagaagccgagctggcattttcaccagtgtagccaagggcctttgccaagggcagagcaggtggagccctctgcctgccctatcacacatacgggtacttgcttttcactgtgatgtttaagagaatgtatgaacagtttacattttccttagaaatacattgatgggatcacagttggctttaaaaaccaacaacaatcaaccacctgtaagtctttgtcttcacctattatcatctggaggtaaatctctttatatgatgatgccaaagggcaaattgcttttcaaattcagcaagttctcagcttgtgtgacggaaggtccttcagaggacctgaggaatgcctgggagaggctaagcctcaggcttcaatgcttctggggttgggcatgaggatgtacacagacacccactaccttactactcacacttcatttcactccttttgtaaatttccaatttaaaaatcaagcacgtctttttagtgagataaaatctgagctcttctgtagaaaaatcaatctctaccagtagaaaatgccagggcttgatggaagagctgtgtagccctttctatgccaaagccaggaaatttggggggcaggaggaggttctcagaatccagtctgtatctttgctgtatgccaaactgaaaccactgggaataatttatgaaacataaaaatcttctgtacttcactccaaggtacatttgcttactgacagcatttttgttaaaactgttattcttga

SEQ ID NO: 112114 - DNA, 339 bp, Artificial Sequence
  derived and/or modified sequence
atgaaggccgcctacctgagcatgttcggcaaggaggaccacaagcccttcggcgacgacgaggtggagctgttcagagccgtgcccggcctgaagctgaagatcgccggcaagagcctgcccaccgagaagttcgccatcagaaagagcagaagatacttcagcagcaaccccatcagcctgcccgtgcccgccctggagatgatgtacatctggaacggctacgccgtgatcggcaagcagcccaagctgaccgacggcatcctggagatcatcaccaaggccgaggagatgctggagaagggccccgagaacgagtacagcgtggacgacgagtag

SEQ ID NO: 112115 - DNA, 666 bp, Artificial Sequence
  derived and/or modified sequence
atgaaggccgcctacctgagcatgttcggcaaggaggaccacaagcccttcggcgacgacgaggtggagctgttcagagccgtgcccggcctgaagctgaagatcgccggcaagagcctgcccaccgagaagttcgccatcagaaagagcagaagatacttcagcagcaaccccatcagcctgcccgtgcccgccctggagatgatgtacatctggaacggctacgccgtgatcggcaagcagcccaagctgaccgacggcatcctggagatcatcaccaaggccgaggagatgctggagaagggccccgagaacgagtacagcgtggacgacgagtgcctggtgaagctgctgaagggcctgtgcctgaagtacctgggcagagtgcaggaggccgaggagaacttcagaagcatcagcgccaacgagaagaagatcaagtacgaccactacctgatccccaacgccctgctggagctggccctgctgctgatggagcaggacagaaacgaggaggccatcaagctgctggagagcgccaagcagaactacaagaactacagcatggagagcagaacccacttcagaatccaggccgccaccctgcaggccaagagcagcctggagaacagcagcagaagcatggtgagcagcgtgagcctgtag

SEQ ID NO: 112116 - DNA, 339 bp, Artificial Sequence
  derived and/or modified sequence
atgaaggccgcctatctgtcaatgttcggaaaagaagaccacaagccatttggcgacgatgaggtcgagcttttccgggccgtacctggtctgaagttgaagattgcagggaaatcactgcccacagagaagttcgccattcggaaaagtagaaggtacttctcctcaaaccccatctctttgcctgtcccggctctcgaaatgatgtacatctggaatggctatgccgtgataggcaagcaaccaaagctcactgacgggatcctggagatcatcactaaggcagaggagatgctcgagaaggggccagaaaatgagtattctgtcgacgatgagtag

SEQ ID NO: 112117 - DNA, 666 bp, Artificial Sequence
  derived and/or modified sequence
atgaaggctgcttacttaagtatgttcggaaaggaggaccacaaaccctttggggatgatgaggttgagctgtttagagctgtcccgggtttaaaactcaaaattgcaggcaagtcacttcctacggaaaaatttgccattaggaagtctagacgctatttctcttccaatccaatttccctcccagtgcctgcactggagatgatgtacatctggaacggttatgcggtcataggaaagcaacccaaacttaccgacggtatcttggagataattaccaaagcagaagagatgctggaaaaggggccggaaaatgagtactcagtggatgacgaatgtcttgtcaaattgttgaaaggactgtgcctgaaatatctcggaagggtacaggaagcggaggaaaacttccgatctatcagcgccaacgaaaaaaagataaagtacgaccactatctaattcccaatgccctgttggaactggcccttctgttgatggaacaagatcggaacgaggaggcaatcaaactcctggagtccgcgaaacagaactataagaactacagtatggagtcccggacacattttcggatccaggcagcaaccctgcaggctaagagctccttggaaaatagctcaaggtccatggtttccagcgttagcctttag

SEQ ID NO: 112118 - DNA, 339 bp, Artificial Sequence
  derived and/or modified sequence
atgaaggccgcctacctgtccatgtttgggaaggaggaccacaagccctttggagatgatgaggtggagctgttccgggctgtgcccggcctgaagctgaagattgctgggaagagcctgcccacagagaagtttgccatcaggaagagccgccgctacttcagcagcaaccccatcagcctgcctgtgcctgccctggagatgatgtacatctggaatggctacgccgtcatcggcaagcagcccaagctgacagatggcatcctggagatcatcaccaaggccgaggagatgctggagaagggcccagaaaatgagtacagcgtggatgatgaatag

SEQ ID NO: 112119 - DNA, 666 bp, Artificial Sequence
  derived and/or modified sequence
atgaaggccgcctacctgtccatgtttgggaaggaggaccacaagccctttggagatgatgaggtggagctgttccgggctgtgcccggcctgaagctgaagattgctgggaagagcctgcccacagagaagtttgccatcaggaagagccgccgctacttcagcagcaaccccatcagcctgcctgtgcctgccctggagatgatgtacatctggaatggctacgccgtcatcggcaagcagcccaagctgacagatggcatcctggagatcatcaccaaggccgaggagatgctggagaagggcccagaaaatgagtacagcgtggatgatgagtgcctggtgaagctgctgaagggcctgtgcctgaagtacctgggccgggtgcaggaggccgaggagaacttccgcagcatcagcgccaatgagaagaagatcaagtatgaccactacctgatccccaatgccctgctggagctggccctgctgctgatggagcaggacagaaatgaggaggccatcaagctgctggagagcgccaagcagaactacaagaactacagcatggagagcaggacccacttccgcatccaggccgccaccctgcaggccaagagcagcctggagaacagcagccgctccatggtgtcctctgtgtccctgtag

SEQ ID NO: 112120 - DNA, 339 bp, Artificial Sequence
  derived and/or modified sequence
atgaaggccgcctacctgagcatgttcggcaaggaggaccacaagcccttcggcgatgatgaggttgaactgtttcgggcggttccggggcttaagttaaagattgcaggcaagagcttaccgaccgaaaagttcgccatccgcaaatccaggagatacttctcatccaaccctataagcctgcctgttcccgctctggaaatgatgtatatctggaatggttacgccgtaatcggaaagcaaccaaagctgacggatggcattctcgaaatcatcacaaaagccgaggaaatgctggaaaaagggcccgaaaacgaatatagcgtagatgatgagtag

SEQ ID NO: 112121 - DNA, 666 bp, Artificial Sequence
  derived and/or modified sequence
atgaaggccgcctacctgagcatgttcggcaaggaggaccacaagcccttcggtgatgacgaggtggaattgtttcgcgccgtccccggcttgaaactgaaaattgcgggcaagagccttccgacagagaaattcgccattagaaaaagtcgtaggtacttctctagtaaccccatatcgctgccagtgcctgctcttgaaatgatgtacatctggaacggctatgcggtgatcgggaaacagcctaagctcaccgacggcatactagaaatcattacgaaggcagaggagatgttagagaagggccctgagaatgaatatagcgtagacgatgaatgcttggtaaaattgctcaaaggactgtgccttaagtatctagggcgcgtgcaggaggccgaggagaacttccggtctatttcagccaacgaaaaaaaaattaaatacgaccattacctgatcccgaatgctttactggagttagcccttctccttatggagcaagatagaaatgaggaggctattaagctcctggaatcagcaaaacagaattataagaactactcgatggagagtcgcactcactttaggattcaggctgccactctacaggcgaagtcttccctagagaactcttcacgctcaatggtctcaagtgtgtccttatag

SEQ ID NO: 112122 - DNA, 339 bp, Artificial Sequence
  derived and/or modified sequence
atgaaggccgcttatctgtcaatgttcggcaaggaggaccataagcctttcggagacgatgaagtggaattgttcagagcagtgcctggcttgaaacttaagatcgctggcaaatcactcccgaccgagaaattcgccatcaggaaaagtcgaaggtatttctcctccaatccaatttctctgcccgtgcctgccctcgagatgatgtacatctggaatggctatgccgtgatcggcaaacagcctaagctcacagacgggatcctggagatcattacgaaagctgaagaaatgctggagaaagggccagagaatgaatacagtgtcgacgacgagtag

SEQ ID NO: 112123 - DNA, 666 bp, Artificial Sequence
  derived and/or modified sequence
atgaaggcagcatatctctccatgttcgggaaggaagaccataaaccatttggtgacgacgaagtggaacttttccgtgcagtccctggcctgaaactgaagattgccggaaaaagcctcccaactgaaaaatttgctattcgcaaatcacggagatactttagctcaaatcccatatccttgcctgtcccagccctcgaaatgatgtacatatggaacggctatgcagttattggcaagcagccaaagttaactgacggcattctggaaatcataactaaagccgaggaaatgctggagaaaggaccagaaaacgaatatagtgttgatgacgaatgtctggtcaaattactgaagggtttatgcttgaagtacctcgggagagtgcaggaggctgaggaaaatttcagatccatcagcgctaacgaaaagaaaatcaagtatgaccattatttgatccctaatgccttgctggaattggccttattgctgatggaacaggacagaaatgaagaagccatcaaattgctggaatccgccaagcaaaactacaagaattattccatggaaagccgaacccacttccgcatccaggctgctacattgcaagcaaagagttcccttgagaacagtagccgttctatggtttcttccgtttccttgtag

SEQ ID NO: 112124 - protein, 766 aa, Artificial Sequence
  derived and/or modified sequence
MEVKPVGEPTQEVSKFKLSTKVESTGHWLVEDHVRIWEVLKTEEVEGDQLPPGHTVSQYETCKIRTIKAGTLEKLVENLLTAFGDNDFTYISIFLSTYRGFASTKEVLELLLDRYGNLTSPNCEEDGSQSSSESKMVIRNAIASILRAWLDQCAEDFREPPHFPCLQKLLDYLTRMMPGSDPERRAQNLLEQFQKQEVETDNGLPNTISFSLEEEEELEGGESAEFTCFSEDLVAEQLTYMDAQLFKKVVPHHCLGCIWSRRDKKENKHLAPTIRATISQFNTLTKCVVSTILGGKELKTQQRAKIIEKWINIAHECRLLKNFSSLRAIVSALQSNSIYRLKKTWAAVPRDRMLMFEELSDIFSDHNNHLTSRELLMKEGTSKFANLDSSVKENQKRTQRRLQLQKDMGVMQGTVPYLGTFLTDLTMLDTALQDYIEGGLINFEKRRREFEVIAQIKLLQSACNSYCMTPDQKFIQWFQRQQLLTEEESYALSCEIEAAADASTTSPKPRKSMVKRLSLLFLGSDMITSPTPTKEQPKSTASGSSGESMDSVSVSSCESNHSEAEEGSITPMDTPDEPQKKLSESSSSCSSIHSMDTNSSGMSSLINPLSSPPSCNNNPKIHKRSVSVTSITSTVLPPVYNQQNEDTCIIRISVEDNNGNMYKSIMLTSQDKTPAVIQRAMLKHNLDSDPAEEYELVQVISEDKELVIPDSANVFYAMNSQVNFDFILRKKNSMEEQVKLRSRTSLTLPRTAKRGCWSNRHSKITL

SEQ ID NO: 112125 - DNA, 2301 bp, Artificial Sequence
  derived and/or modified sequence
atggaagtgaagcctgttggagagccgactcaggaggtgtcgaagtttaagctgtctacgaaggtggaaagtacggggcattggttggttgaagatcacgttcggatttgggaggttctcaagacagaggaagtcgagggcgaccaattgccacccggacataccgtgtctcagtacgaaacctgtaagattaggaccataaaggcgggcaccttggagaaactggtggagaacctactcaccgctttcggggacaatgactttacttacatcagcatctttcttagtacatacagagggttcgcttcaacaaaggaggtactggaactcctgctcgataggtatgggaatctgacgtctccaaattgtgaggaggacggctcgcagtcatcatccgagagtaaaatggtgatccgcaatgccatcgcatcaatcctaagagcgtggctagaccagtgtgcggaggattttagagagccgccccacttcccttgcttacagaaacttctcgattatctgacgagaatgatgcctggctcggatccagagcggagagctcagaatctgttagagcagtttcagaagcaggaggttgagactgataatggcctgcctaacacaattagttttagtctcgaggaagaagaggagttagagggaggagaatcagcagagtttacatgtttcagtgaagacttggtggctgaacagctgacatacatggatgcacagctatttaagaaggtcgtgccccaccattgcctcggatgcatttggtctcggcgcgacaagaaggaaaataaacaccttgcccctactatccgcgctacgatttcccaattcaacacgttgacaaagtgcgtcgtcagcactatccttggtgggaaagagctcaagacccagcaacgggctaaaattattgagaagtggattaatatcgctcatgagtgcaggttgcttaagaacttctcttcactgagggctattgtgagcgcactgcagagtaactcaatctacaggttgaagaaaacatgggctgctgtgccacgagatagaatgctgatgtttgaagagctgagtgacatcttctctgatcataataaccatctgacctcaagggagttgctgatgaaagaggggaccagcaaatttgcaaacctagattcttctgttaaagagaatcagaaaagaacccagcgtaggctgcagctgcagaaagacatgggagtcatgcagggtacagtaccgtacctgggcacattcctaactgacctgactatgctggacacagccctgcaagattatatcgagggcggcttgattaacttcgagaagcgtcggagagaattcgaggtgattgcccagatcaagctgttgcagtctgcctgcaactcttattgtatgacccctgatcaaaaattcatacaatggtttcagaggcaacaacttttgactgaggaggaatcttacgccctgagctgcgaaattgaggccgctgccgatgcctccaccacaagccccaaaccccgcaagtcaatggttaaacggttatcgctgctttttttggggtctgacatgattacttctccgactcctactaaggagcagcccaagagcactgcatccggatcatctggcgaatcaatggacagcgtgagcgtgagttcatgcgaaagcaatcatagtgaagcggaggagggaagtatcactcccatggacactccggatgaacctcagaagaagctgtccgagtcgtctagcagttgctcctcaattcatagtatggacactaatagtagcggtatgtcctctcttatcaaccccctgtccagccctccgtcatgcaataacaaccctaagatacacaagcggagcgtaagcgtgacctcaataactagtacggtgttgcccccggtgtataaccagcagaatgaggacacttgcattattcggattagcgtggaagataataatggcaatatgtacaagtctataatgctgacatctcaagacaaaaccccagccgtaattcaacgagctatgctgaaacataacctagacagcgacccagccgaagagtacgaactggtgcaggtgatctccgaggacaaagaactggtaattccagattctgcaaacgttttctatgcgatgaatagccaagtgaattttgacttcatccttaggaaaaaaaattccatggaggagcaagtcaagctccgcagccgaactagtctgacattgcccaggacagctaaacgcggctgttggagcaatcgccactcaaaaattactctgtag

SEQ ID NO: 112126 - DNA, 2301 bp, Artificial Sequence
  derived and/or modified sequence
atggaggtgaagcctgtgggggagcccacccaggaggtgtccaagttcaagctgagcaccaaggtggagagcacaggccactggctggtggaggaccacgtgcgcatctgggaggtgctgaagacagaggaggtggagggggaccagctgcccccaggccacacagtgtcccagtatgagacctgcaagatccgcaccatcaaggccggcaccctggagaagctggtggagaacctgctgacagcctttggagacaatgacttcacctacatcagcatcttcctgagcacctaccggggctttgccagcaccaaggaggtgctggagctgctgctggacagatatggcaacctgaccagccccaactgtgaagaagatggcagccagagcagcagcgagagcaagatggtgatcagaaatgccatcgccagcatcctgcgggcctggctggaccagtgtgccgaggacttccgggagcccccccacttcccctgcctgcagaagctgctggactacctgaccaggatgatgcctggcagtgaccctgagcggcgggcccagaacctgctggagcagttccagaagcaggaggtggagacagacaatggcctgcccaacaccatctccttcagcctggaggaggaggaggagctggagggcggggagagcgctgagttcacctgcttcagcgaggacctggtggccgagcagctgacctacatggatgcccagctgttcaagaaggtggtgccccaccactgcctgggctgcatctggagcagaagagacaagaaggagaacaagcacctggcccccaccatccgggccaccatcagccagttcaacaccctgaccaagtgtgtggtgtccaccatcctgggcggcaaggagctgaagacccagcagagggccaagatcatcgagaagtggatcaacatcgcccacgagtgccgcctgctgaagaacttcagcagcctgcgggccatcgtgtctgccctgcagagcaacagcatctaccgcctgaagaagacctgggccgctgtgccccgggacaggatgctgatgtttgaggagctgagtgacatcttcagtgaccacaacaaccacctgaccagccgggagctgctgatgaaggagggcaccagcaagtttgccaacctggacagctctgtgaaggagaaccagaagaggacccagaggcggctgcagctgcagaaggacatgggcgtgatgcagggcaccgtgccctacctgggcaccttcctgacagacctgaccatgctggacacagccctgcaggactacatcgagggcggcctcatcaactttgagaagagaagaagagaatttgaggtgattgcccagatcaagctgctgcagagcgcctgcaacagctactgcatgaccccagaccagaagttcatccagtggttccagaggcagcagctgctgacagaggaggagagctatgccctgagctgtgaaattgaggccgctgctgatgccagcaccaccagccccaagcccaggaagtccatggtgaagaggctgagcctgctcttcctgggcagtgacatgatcaccagccccacccccaccaaggagcagcccaagagcacagccagcggcagcagtggagagagcatggattctgtgtctgtgagcagctgtgagagcaaccacagcgaggccgaggagggcagcatcacccccatggacaccccagatgagccccagaagaagctgtctgagagcagcagcagctgcagcagcatccacagcatggacaccaacagcagcggcatgagcagcctcatcaaccccctgagcagcccccccagctgcaacaacaaccccaagatccacaagaggtctgtgtctgtgaccagcatcaccagcacagtgctgccccctgtgtacaaccagcagaatgaagacacctgcatcatccgcatctctgtggaggacaacaacggcaacatgtacaagagcatcatgctgaccagccaggacaagaccccagctgtgatccagagggccatgctgaagcacaacctggacagcgaccctgctgaggagtatgagctggtgcaggtgatcagcgaggacaaggagctggtgatcccagattctgccaacgtgttctacgccatgaacagccaggtgaactttgacttcatcctgaggaagaagaacagcatggaggagcaggtgaagctgcggagcaggaccagcctgaccctgcccaggacagccaagaggggctgctggagcaacagacacagcaagatcaccctgtag

SEQ ID NO: 112127 - DNA, 2301 bp, Artificial Sequence
  derived and/or modified sequence
atggaggtgaagcccgtgggcgagcccacccaggaggtgagcaagtttaagctctcaacgaaggtggagtcaacaggccactggctggtcgaagaccatgtgcgaatctgggaggtattgaagaccgaggaggtggaaggtgatcagctaccaccagggcacactgtttcgcagtacgaaacttgcaaaattcgcaccattaaagccggcactctggagaagctggtggagaacctgctcaccgcctttggcgacaatgacttcacttacatctctatattcttgtccacttacaggggtttcgcatcaactaaagaggtgctggaattacttctcgatagatatggtaacttaacctccccgaattgtgaggaagatggatcacagtcttccagcgagagcaagatggtaatccgtaatgctattgcttccatcctccgggcgtggctagatcagtgtgccgaagacttccgagagcctccacatttcccctgcctgcagaagctcctggattatttaacaaggatgatgcctggctcggacccagaacgacgagcccagaacctcctcgagcagttccagaaacaggaagtggagactgataatggactgcccaatactataagtttcagccttgaggaggaagaagagttggaagggggtgaaagtgcggagttcacatgcttctcggaagacctggtagccgagcagctgacttacatggacgcccagctgtttaagaaggtggttcctcaccactgcctcggttgcatctggtcaaggcgggacaagaaagagaacaagcatctggcaccgacaatcagggccactatcagtcagtttaatactctcacaaagtgcgtagtgtctacaattctcggtggtaaagaactgaagacccaacagagagccaaaattattgaaaaatggattaatattgcccacgagtgccggcttcttaagaacttttcatcattaagggccatagtgtcagccttgcagtctaattctatctataggctcaagaaaacctgggccgccgtgccccgggatagaatgctcatgtttgaggagctgagtgatatattctctgatcataataaccacctcacatctagggaactgcttatgaaggagggtacttcaaaattcgccaacttggacagcagcgtgaaggagaaccagaaaagaacccagcgccgactccagctccagaaggacatgggcgtgatgcagggcactgtgccctatctaggcacgttcctcaccgatctgacaatgctggacactgcactccaggactacattgaggggggattaattaactttgagaagcgccggagggaatttgaagttattgctcagataaagttgctacaatctgcctgtaatagctactgtatgacgccagatcagaaatttattcagtggtttcagagacaacaactgctaactgaggaagagtcatatgccctgagctgcgaaatcgaggcagctgctgacgcctcgacgacatcccccaagccaaggaagtccatggtgaagagactctccctgttgtttttaggcagcgatatgatcacctcacctactcccacaaaagagcagccaaagtctacagcttctggatcttccggggaatctatggacagcgtgagcgtgagttcgtgcgagtccaatcactcagaggcagaagaaggctcgatcacacctatggacacgccagatgagcctcagaagaagctgtcagagagttcttcctcttgctcttctattcacagcatggacaccaacagctcaggaatgagctcacttatcaacccattgtctagccccccttcctgcaacaataaccctaaaattcacaagaggtccgttagcgtgacctctattacttcaactgtgctgcccccggtgtataaccagcagaatgaggatacctgtattattagaatatcagtggaagataataatggaaatatgtacaagagcattatgcttacatcccaagacaagacgccagctgttatccagcgcgctatgcttaagcacaacctcgactctgaccctgccgaggagtacgagctcgtgcaggtcattagcgaggacaaggagctggtaattcctgattccgctaatgtgttctacgcgatgaattcccaggtgaatttcgatttcatcctcaggaaaaagaacagtatggaagagcaggtaaaactgcgctccagaaccagcttgacactcccaagaacggccaagcgtgggtgctggagcaacagacattcaaaaatcactctttag

SEQ ID NO: 112128 - DNA, 2301 bp, Artificial Sequence
  derived and/or modified sequence
atggaggtaaagcctgtcggagagcctacccaggaggttagcaagtttaaactcagcacaaaagtcgagtccacagggcattggctggttgaagatcacgtgcggatctgggaggttctgaaaacagaagaagtcgagggcgaccagctacctccagggcacacagtctctcaatacgagacttgcaaaatccgcaccatcaaagcgggaactctggagaaactggtagaaaacctgctgacggcctttggagacaatgatttcacttatatctctatctttttgtcaacctaccgcggattcgcgagcaccaaggaggtgctggagctgcttctggacaggtacggcaatctaaccagcccaaattgcgaggaggacggttctcagagtagttcggagtcgaagatggttattaggaatgccattgcctcaatcctgcgtgcatggctggaccagtgcgccgaggacttcagggaaccacctcatttcccttgtctgcagaaactgctggattacttgaccaggatgatgcccggatccgatcccgaaaggagagcacagaatctcctggagcagtttcagaagcaggaggtcgagactgataacggccttccgaacacaattagcttttctttggaggaagaggaggaattagagggcggagagtcagccgagtttacatgttttagtgaggacctggtagcagagcagctgacatacatggatgcgcagctgttcaagaaggtggttccccaccactgtctggggtgcatctggtctaggagggacaagaaagaaaataagcacctggcaccaacaatacgagcaactatctcccagttcaatactcttactaaatgcgttgtgtcgacaatcttgggcggtaaagaacttaagactcagcagcgagcgaagataatcgagaaatggattaatattgcacacgagtgccgactgttaaaaaacttcagctccctgagggcaatcgtgtcagcgctgcagtctaactcaatctaccgcctcaaaaaaacatgggctgcagtgcctcgagacagaatgctgatgttcgaagaactgagtgatattttctccgatcacaacaaccatcttacttccagagaacttctgatgaaagagggcacatcgaagtttgcgaatctcgattcatcagtgaaggagaatcaaaaaagaacacagcgcaggctgcaactccagaaggatatgggcgttatgcaaggcacggtgccctacttggggacttttctaaccgatctgaccatgctggacacagcactgcaagattatatagagggtggactaatcaactttgagaagcggcgtcgggaatttgaagtcatcgcccagataaaattgctgcagtcggcttgcaattcttactgcatgaccccggaccagaagttcatccaatggttccaaaggcagcagctccttactgaggaagagagttatgcactctcatgcgagattgaagccgcagctgacgcgagcacaacttcaccgaaaccccgtaagagcatggtcaaaaggctgagccttctgttcctcgggtcagatatgataacaagtcctactccaaccaaagagcagccaaagagcaccgcgagtggctctagtggggagtcaatggactccgtgtcagtgagcagctgcgagtccaatcatagcgaggccgaagagggatctatcactcccatggacactcccgacgagcctcagaagaaactttcggaatcgtctagctcttgttcctctatacattcaatggacacaaattcatctggcatgagctccttgatcaaccctctcagcagtcccccttcatgcaataacaatccaaaaatccacaaacggagcgtgtcagtcacctccataactagcacagtcctgcctcccgtatacaaccaacaaaacgaagatacttgcatcattcgcataagtgtagaagacaacaatggtaacatgtataaatcaatcatgctgacgagccaggacaaaaccccagctgttatacaaagagcaatgctgaagcataacttggacagtgaccctgccgaggaatacgaactggtgcaggtgatctcagaggataaagaattggtgatccctgactcagccaatgtcttctatgccatgaactctcaggtcaactttgacttcatcttgcggaagaagaactctatggaggaacaggtgaagctgcgcagcagaacgagcttaacattgccgcgtactgctaagcgagggtgctggtccaatcgacactcaaagattactctatag

SEQ ID NO: 112129 - DNA, 3203 bp, Artificial Sequence
  derived and/or modified sequence
agattggcggggatgggcagcagcggcaggtggccttggcttttgctgcagccgtcaacgacctatcatcggggtcctgcgtaaggtccggctggctgggacttggctgtgggtgggatggactggctgccggaccgagtgccctgcagttggtaggagtatgaggcagagtgatgcacacccgggcgcccagcatcgttctaattgccggagacattgcctcagactgtgcgctgctagaggctgcgttcctgagcaggaagcccgtttcctgggattggaactacccttcttggccagcgggaagtccccaaggacggagtcgaaaggtcaaatcttatctgtcagtgctgtgtgacagcatcgcaacgggatctgcagaacctgaactcgtgtgcagtttcctcaagggcagagattttgtccatcttgtccactactatatgccaagtgtttggaacagtttgcacggaggaatggttcctgaatgaattgaatgcatgatccgtaatgcctcctgcctgcctctttcaagatggaggtgaaacctgtgggagaacctactcaagaggtgtctaaattcaaactttccaccaaggtagaaagcacgggacactggctggtggaagatcatgttcgaatatgggaagttttaaagacagaggaggttgaaggggaccagctgcctccaggacacacagtcagtcaatatgaaacctgtaagatcaggaccataaaagctggcaccttggagaagcttgtggagaacctgctgacagcttttggggacaatgactttacctatatcagcatctttctttcaacgtacagaggctttgcctccactaaagaagtgctggaactactgctggacaggtatggaaacctgacaagcccaaactgtgaagaagatggaagccaaagttcatcagagtccaaaatggtgatcaggaatgcaatcgcttccatactaagggcctggcttgaccagtgtgcagaagacttccgagagccccctcacttcccttgcttacagaaactgctggattatctcacacggatgatgccgggctctgacccagaaagaagagcacaaaatcttcttgagcagtttcagaagcaagaagtggaaactgacaatgggcttcccaacacgatctccttcagcctggaagaggaagaggaactggagggtggagagtcagcagaattcacgtgcttctcagaagatctcgtggcagagcagctgacctacatggatgcacaactcttcaagaaagtagtgcctcaccactgcctgggctgcatttggtctcgaagggataagaaggaaaacaaacatttggctcctacgatccgtgccaccatctctcagtttaataccctcaccaaatgtgttgtcagcaccatcctggggggcaaagaactcaaaactcagcagagagccaaaatcattgagaagtggatcaacatcgctcatgaatgtagactcctgaagaatttttcctccttgagggccatcgtttcggcactgcagtctaattccatctatcggttaaaaaagacttgggctgccgtcccaagggaccgaatgctgatgtttgaagaactttcagatatcttctcagaccataataaccatttgaccagccgagaactactgatgaaggaaggaacctcaaaatttgcaaacctggacagcagtgtgaaagaaaaccagaagcgtacccagaggcggctgcagctccagaaggacatgggtgtgatgcagggaactgtgccctacctgggcaccttcctgactgacctgaccatgcttgacactgcccttcaggactacatcgagggtggactgataaactttgagaaaaggagaagggaatttgaagtgattgcccagataaagctcttacagtctgcctgcaacagctattgcatgaccccagaccaaaagttcatccagtggttccagaggcagcagctcctgacagaggaggagagctatgccctgtcatgtgagattgaagcagctgctgacgccagcaccacctcgcccaagcctcggaagagcatggtgaagagactcagcctactgtttctagggtctgacatgatcaccagtcccactcccaccaaagagcagcccaagtccactgccagcgggagctctggtgaaagcatggactctgtcagcgtgtcatcctgcgagtcgaaccactcagaggctgaggagggctccattactcccatggacacccctgatgagcctcaaaaaaagctctctgagtcctcctcatcctgttcttctatccattccatggacacaaattcctcagggatgtcttccttaatcaaccccctctcctcccctccgtcctgcaacaacaaccccaaaatccacaagcgctctgtctcggtgacgtccattacctcgactgtgctgcctcctgtttacaaccaacagaatgaagacacctgcataatccgcatcagtgtggaagacaataacggcaacatgtacaagagcatcatgttgacgagccaggataaaacccccgctgtgatccagagagccatgctgaagcacaatctggactcagaccccgccgaggagtacgagctggtgcaggtcatctcggaggacaaagaacttgtgattccagactcagcaaatgtcttttatgccatgaacagccaagtgaactttgacttcattttgcgcaaaaagaactccatggaagaacaagtgaaactgcgtagccggaccagcttgacgttgcccaggacagctaaacggggctgctggagtaacagacacagcaaaatcaccctctgaagggagggaccagtggccccttgtttgccaaaggcagagtggggctgagaaacaggctgcggtgattgcaattaccatccggtgttcgaggatcattggtgaagtcagcagatatttattgagttcctgtggtgtgcaaagcattatgataggcaccgtggggaaactggaaatgaatttgacatgaaaaggatgaacgattcactgattctctttgactcatttgagactaaaatgcagaattaccaacatttaaaacatatatatgcacatgtatttggtatgcatgtgtatctatataaaaatatataagagggactttatgggatagtatggactatggaaaaacaaatttgcacaatggcct

SEQ ID NO: 112130 - DNA, 2301 bp, Artificial Sequence
  derived and/or modified sequence
atggaggtgaagcccgtgggcgagcccacccaggaggtgagcaagttcaagctgagcaccaaggtggagagcaccggccactggctggtggaggaccacgtgagaatctgggaggtgctgaagaccgaggaggtggagggcgaccagctgccccccggccacaccgtgagccagtacgagacctgcaagatcagaaccatcaaggccggcaccctggagaagctggtggagaacctgctgaccgccttcggcgacaacgacttcacctacatcagcatcttcctgagcacctacagaggcttcgccagcaccaaggaggtgctggagctgctgctggacagatacggcaacctgaccagccccaactgcgaggaggacggcagccagagcagcagcgagagcaagatggtgatcagaaacgccatcgccagcatcctgagagcctggctggaccagtgcgccgaggacttcagagagcccccccacttcccctgcctgcagaagctgctggactacctgaccagaatgatgcccggcagcgaccccgagagaagagcccagaacctgctggagcagttccagaagcaggaggtggagaccgacaacggcctgcccaacaccatcagcttcagcctggaggaggaggaggagctggagggcggcgagagcgccgagttcacctgcttcagcgaggacctggtggccgagcagctgacctacatggacgcccagctgttcaagaaggtggtgccccaccactgcctgggctgcatctggagcagaagagacaagaaggagaacaagcacctggcccccaccatcagagccaccatcagccagttcaacaccctgaccaagtgcgtggtgagcaccatcctgggcggcaaggagctgaagacccagcagagagccaagatcatcgagaagtggatcaacatcgcccacgagtgcagactgctgaagaacttcagcagcctgagagccatcgtgagcgccctgcagagcaacagcatctacagactgaagaagacctgggccgccgtgcccagagacagaatgctgatgttcgaggagctgagcgacatcttcagcgaccacaacaaccacctgaccagcagagagctgctgatgaaggagggcaccagcaagttcgccaacctggacagcagcgtgaaggagaaccagaagagaacccagagaagactgcagctgcagaaggacatgggcgtgatgcagggcaccgtgccctacctgggcaccttcctgaccgacctgaccatgctggacaccgccctgcaggactacatcgagggcggcctgatcaacttcgagaagagaagaagagagttcgaggtgatcgcccagatcaagctgctgcagagcgcctgcaacagctactgcatgacccccgaccagaagttcatccagtggttccagagacagcagctgctgaccgaggaggagagctacgccctgagctgcgagatcgaggccgccgccgacgccagcaccaccagccccaagcccagaaagagcatggtgaagagactgagcctgctgttcctgggcagcgacatgatcaccagccccacccccaccaaggagcagcccaagagcaccgccagcggcagcagcggcgagagcatggacagcgtgagcgtgagcagctgcgagagcaaccacagcgaggccgaggagggcagcatcacccccatggacacccccgacgagccccagaagaagctgagcgagagcagcagcagctgcagcagcatccacagcatggacaccaacagcagcggcatgagcagcctgatcaaccccctgagcagcccccccagctgcaacaacaaccccaagatccacaagagaagcgtgagcgtgaccagcatcaccagcaccgtgctgccccccgtgtacaaccagcagaacgaggacacctgcatcatcagaatcagcgtggaggacaacaacggcaacatgtacaagagcatcatgctgaccagccaggacaagacccccgccgtgatccagagagccatgctgaagcacaacctggacagcgaccccgccgaggagtacgagctggtgcaggtgatcagcgaggacaaggagctggtgatccccgacagcgccaacgtgttctacgccatgaacagccaggtgaacttcgacttcatcctgagaaagaagaacagcatggaggagcaggtgaagctgagaagcagaaccagcctgaccctgcccagaaccgccaagagaggctgctggagcaacagacacagcaagatcaccctgtag

SEQ ID NO: 112131 - protein, 768 aa, Artificial Sequence
  derived and/or modified sequence
MKLLWQAKMSSIQDWGEEVEEGAVYHVTLKRVQIQQAANKGARWLGVEGDQLPPGHTVSQYETCKIRTIKAGTLEKLVENLLTAFGDNDFTYISIFLSTYRGFASTKEVLELLLDRYGNLTSPNCEEDGSQSSSESKMVIRNAIASILRAWLDQCAEDFREPPHFPCLQKLLDYLTRMMPGSDPERRAQNLLEQFQKQEVETDNGLPNTISFSLEEEEELEGGESAEFTCFSEDLVAEQLTYMDAQLFKKVVPHHCLGCIWSRRDKKENKHLAPTIRATISQFNTLTKCVVSTILGGKELKTQQRAKIIEKWINIAHECRLLKNFSSLRAIVSALQSNSIYRLKKTWAAVPRDRMLMFEELSDIFSDHNNHLTSRELLMKEGTSKFANLDSSVKENQKRTQRRLQLQKDMGVMQGTVPYLGTFLTDLTMLDTALQDYIEGGLINFEKRRREFEVIAQIKLLQSACNSYCMTPDQKFIQWFQRQQLLTEEESYALSCEIEAAADASTTSPKPRKSMVKRLSLLFLGSDMITSPTPTKEQPKSTASGSSGESMDSVSVSSCESNHSEAEEGSITPMDTPDEPQKKLSESSSSCSSIHSMDTNSSGMSSLINPLSSPPSCNNNPKIHKRSVSVTSITSTVLPPVYNQQNEDTCIIRISVEDNNGNMYKSIMLTSQDKTPAVIQRAMLKHNLDSDPAEEYELVQVISEDKELVIPDSANVFYAMNSQVNFDFILRKKNSMEEQVKLRSRTSLTLPRTAKRGCWSNRHSKITL

SEQ ID NO: 112132 - DNA, 2307 bp, Artificial Sequence
  derived and/or modified sequence
atgaaactgttatggcaggccaaaatgtcctcaatccaagattggggtgaagaggtggaggagggtgcagtctaccatgtgaccctgaaaagggtccagatccagcaagcagccaacaagggtgctcgttggttaggagtggaaggagaccagctcccccccggtcacactgtgagccagtatgagacttgtaagatcaggaccatcaaggccggcactctcgagaagctcgtggagaaccttctgacggctttcggagataatgatttcacctatatctctatcttcctaagcacgtatcgaggctttgcatcgaccaaagaagttctggagctgcttctcgatcggtatggcaacctgaccagcccgaattgcgaggaggacggcagtcaaagctccagtgagtcaaagatggtaatccgaaacgccattgcctcaattctgagagcatggctggatcagtgcgctgaagactttcgggagccccctcactttccatgcttacaaaagctgctggattatctaacccgtatgatgcctgggagcgaccctgagcgccgtgcccagaacctcctcgagcagtttcagaaacaggaagtggagaccgacaacggattgccaaatacgatcagtttcagtcttgaggaagaggaggagctggagggaggagaatcggctgagtttacgtgttttagtgaggacttggttgctgaacaactgacgtatatggatgcacagctgtttaaaaaggttgtgccacatcactgtctcgggtgcatttggagccggagagataagaaagagaataagcatcttgccccaaccattagggccacgatcagtcagttcaataccttgaccaaatgtgtggtcagtacgatcctaggggggaaggaacttaaaacccagcagcgggcaaaaatcattgagaagtggatcaatattgcccatgagtgtaggctcctcaaaaatttttcgagtcttagggccatcgtatccgccctgcagtcaaactcgatttacagactgaaaaagacatgggccgcagttcctcgagacaggatgctaatgttcgaggaactatctgacatctttagtgatcacaacaatcacctgacatctagagagttactgatgaaggaggggacttctaagtttgctaatttggattcaagtgttaaagagaatcagaaaagaacccaacgacggttgcagctccagaaggacatgggcgtgatgcagggcaccgtaccttacttagggacattcttaactgaccttacaatgctggacaccgctttgcaggactatatcgaaggaggtttaattaattttgaaaagcgcaggagagagttcgaagttatcgcacaaatcaagctgctgcagagtgcctgtaactcatactgcatgactcctgaccagaaatttatacagtggtttcagagacagcagctgctgacggaggaggagtcttacgccttgagctgcgagatagaggcagccgccgacgcttcaactactagtcctaagccacgtaaaagcatggtcaaaaggctgtctttattgttcctggggtcagatatgatcacttcgcccaccccaaccaaggaacagcccaagtctacggcctccggtagctcaggtgaaagcatggattctgtgagcgtgagcagctgcgaatctaaccactctgaggctgaagagggcagtatcactccaatggacacaccagacgaaccccagaaaaagctgagcgagtcatctagtagttgttcctctatacatagtatggatacaaactccagtgggatgtccagcctgattaacccgctctcttcacccccatcttgtaataacaaccccaaaatccacaagaggagcgtgtccgttacatcaatcaccagcactgtccttccccccgtgtacaatcagcagaacgaagacacctgcattatccggatttcggttgaggataataatggaaatatgtacaagagcatcatgctgacctctcaggacaaaactcccgcagtcatccaaagggcgatgctgaagcacaatttagactccgacccagccgaggagtacgaacttgtccaggtgatctctgaagataaagagctggtaatccctgactctgccaacgttttttatgcaatgaactcccaggtgaactttgatttcatcctacggaaaaagaactccatggaggaacaagttaagctgagatcaagaacctcactgacacttccccgaacggctaagcgaggctgctggtctaacaggcatagcaagatcacactgtag

SEQ ID NO: 112133 - DNA, 2307 bp, Artificial Sequence
  derived and/or modified sequence
atgaagctgctgtggcaggccaagatgagcagcatccaggactggggcgaggaggtggaggagggcgctgtgtaccacgtgaccctgaagagggtgcagatccagcaggccgccaacaagggggcccgctggctgggcgtggagggggaccagctgcccccaggccacacagtgtcccagtatgagacctgcaagatccgcaccatcaaggccggcaccctggagaagctggtggagaacctgctgacagcctttggagacaatgacttcacctacatcagcatcttcctgagcacctaccggggctttgccagcaccaaggaggtgctggagctgctgctggacagatatggcaacctgaccagccccaactgtgaagaagatggcagccagagcagcagcgagagcaagatggtgatcagaaatgccatcgccagcatcctgcgggcctggctggaccagtgtgccgaggacttccgggagcccccccacttcccctgcctgcagaagctgctggactacctgaccaggatgatgcctggcagtgaccctgagcggcgggcccagaacctgctggagcagttccagaagcaggaggtggagacagacaatggcctgcccaacaccatctccttcagcctggaggaggaggaggagctggagggcggggagagcgctgagttcacctgcttcagcgaggacctggtggccgagcagctgacctacatggatgcccagctgttcaagaaggtggtgccccaccactgcctgggctgcatctggagcagaagagacaagaaggagaacaagcacctggcccccaccatccgggccaccatcagccagttcaacaccctgaccaagtgtgtggtgtccaccatcctgggcggcaaggagctgaagacccagcagagggccaagatcatcgagaagtggatcaacatcgcccacgagtgccgcctgctgaagaacttcagcagcctgcgggccatcgtgtctgccctgcagagcaacagcatctaccgcctgaagaagacctgggccgctgtgccccgggacaggatgctgatgtttgaggagctgagtgacatcttcagtgaccacaacaaccacctgaccagccgggagctgctgatgaaggagggcaccagcaagtttgccaacctggacagctctgtgaaggagaaccagaagaggacccagaggcggctgcagctgcagaaggacatgggcgtgatgcagggcaccgtgccctacctgggcaccttcctgacagacctgaccatgctggacacagccctgcaggactacatcgagggcggcctcatcaactttgagaagagaagaagagaatttgaggtgattgcccagatcaagctgctgcagagcgcctgcaacagctactgcatgaccccagaccagaagttcatccagtggttccagaggcagcagctgctgacagaggaggagagctatgccctgagctgtgaaattgaggccgctgctgatgccagcaccaccagccccaagcccaggaagtccatggtgaagaggctgagcctgctcttcctgggcagtgacatgatcaccagccccacccccaccaaggagcagcccaagagcacagccagcggcagcagtggagagagcatggattctgtgtctgtgagcagctgtgagagcaaccacagcgaggccgaggagggcagcatcacccccatggacaccccagatgagccccagaagaagctgtctgagagcagcagcagctgcagcagcatccacagcatggacaccaacagcagcggcatgagcagcctcatcaaccccctgagcagcccccccagctgcaacaacaaccccaagatccacaagaggtctgtgtctgtgaccagcatcaccagcacagtgctgccccctgtgtacaaccagcagaatgaagacacctgcatcatccgcatctctgtggaggacaacaacggcaacatgtacaagagcatcatgctgaccagccaggacaagaccccagctgtgatccagagggccatgctgaagcacaacctggacagcgaccctgctgaggagtatgagctggtgcaggtgatcagcgaggacaaggagctggtgatcccagattctgccaacgtgttctacgccatgaacagccaggtgaactttgacttcatcctgaggaagaagaacagcatggaggagcaggtgaagctgcggagcaggaccagcctgaccctgcccaggacagccaagaggggctgctggagcaacagacacagcaagatcaccctgtag

SEQ ID NO: 112134 - DNA, 2307 bp, Artificial Sequence
  derived and/or modified sequence
atgaagctgctgtggcaggccaagatgagcagcatccaggactggggagaagaggtcgaagagggggcggtgtatcatgtgacactaaaaagagtgcagatccagcaggccgccaataaaggagcaagatggctcggggtcgagggcgaccagctcccacccggccacaccgtaagccagtatgagacatgcaaaatccgcaccattaaggcaggaaccctggagaaactagtggagaatctgctgaccgctttcggcgacaatgattttacttacattagcatattcttatccacgtaccgcggattcgcatccacaaaagaggtcctcgaattgcttctggataggtacggcaacctgacgtcacctaactgtgaggaagatgggtctcagtcaagctccgaaagcaagatggtaattaggaacgcgatcgcatctatactcagagcctggcttgatcagtgcgccgaggatttccgtgaaccgccccatttcccgtgcttgcaaaaacttctggattatctgacacgtatgatgcccggatccgaccctgagcggcgtgcccagaacttgttggaacagttccaaaagcaggaagtggagaccgataatggtctccctaacactattagcttctctttggaggaggaggaggagctcgaggggggggaatctgccgagttcacctgtttttctgaagatcttgtagcggagcagctgacatatatggatgcgcaacttttcaaaaaagttgtgcctcatcattgcttgggctgtatctggagccggagggacaaaaaggaaaacaagcacctcgcacccaccatcagagcgacaatcagccagttcaatactctgaccaaatgcgtagtaagcaccatccttggcggtaaagagctgaaaacacagcagcgggctaagatcattgagaaatggattaatatcgcgcacgagtgccgactccttaaaaacttcagcagtctgagggctattgtgtccgctcttcaaagcaactccatatatcggttgaagaaaacgtgggctgccgtaccacgcgaccggatgctcatgttcgaagagctgagtgatatattcagtgaccataacaaccacctgacatctcgggagttgctgatgaaagagggtactagtaaatttgccaacctggattcttcagtgaaagagaaccagaagagaacgcaacggcgcttgcagctgcagaaagacatgggagtgatgcaggggaccgtgccatacctgggcacctttctgaccgatcttaccatgcttgatacagctctgcaagactacattgaagggggcctcataaattttgagaagcgtcgacgcgagttcgaagtgatcgcacagattaagttgctgcagagcgcctgtaacagttactgcatgacacccgatcagaagtttatccagtggttccagcgacaacaactgcttaccgaagaagagagctatgcactgagctgtgaaatagaggcggctgctgacgctagcacaactagtcctaaaccaaggaagagtatggtgaaaaggctcagccttctgttcctcggcagtgatatgattacctcccctacccctactaaggagcaaccaaaatccactgccagtggatcctcgggtgagtctatggattccgtctccgtgtctagttgcgagagcaaccactcagaagctgaggagggctcaatcacacctatggatacacctgacgagccgcagaagaagcttagtgaatcatcgtcttcatgttcctctatccattccatggacaccaacagcagcggcatgagttcactcatcaacccgttgagctcccctccctcctgtaacaataacccgaaaatccacaagcgatccgtgtctgttacaagcataacatctacggtgctgcctcctgtttacaaccagcaaaatgaagatacatgtatcatccggataagtgttgaagataacaacgggaatatgtataaatctattatgcttacatcacaggacaaaacacccgcagttattcagcgtgccatgcttaaacataacctggactcagaccccgccgaagagtacgaattggttcaggtgatctccgaagacaaagagctggtgatacctgacagcgccaacgtgttctacgcgatgaattcccaagtgaacttcgacttcatccttaggaaaaaaaacagcatggaggagcaagttaagctgagatcgaggaccagcctgaccctgcccagaacggcgaagagaggttgttggagtaacaggcattctaaaattaccctttag

SEQ ID NO: 112135 - DNA, 2307 bp, Artificial Sequence
  derived and/or modified sequence
atgaagttattgtggcaggctaagatgtccagcatccaggactggggcgaagaggtagaagagggagctgtgtatcatgtgaccctcaaacgggtacagatccaacaagcagctaacaaaggagcacgctggctgggcgttgaaggtgaccagctgcctcccggacacaccgtgagccagtacgagacatgtaaaattcgcaccatcaaggccggaacgctggaaaaacttgtcgaaaacttgctgaccgcttttggtgacaacgattttacgtacatcagcatcttcctcagtacttataggggatttgcaagcacaaaagaagtactggagctcctgttggatcgctacggcaacctcacaagtcctaattgtgaggaggatggatcacagtcatcttccgagtcgaagatggttattaggaacgctattgcttctattctgagagcttggctggaccagtgcgccgaggactttagagagccgccacattttccttgccttcagaagctactggactacctgactagaatgatgccaggctcggaccctgagcgaagggcacagaatcttctcgagcagtttcagaaacaagaagtggaaacagataatggcctgccaaatacaatctcattctctttggaggaagaggaggagctagagggcggtgagagtgcggaattcacctgtttctccgaagatttggtcgcagagcagcttacctacatggacgcgcagttgttcaagaaagtggtgcctcaccattgcctgggctgtatctggtctcggagagacaaaaaagaaaacaagcacttggctccgactattcgggcaaccataagtcaattcaacactctcacaaaatgcgtcgttagtacaatacttggcggtaaagagctaaaaacccaacagcgggcaaagattatcgaaaagtggattaatatcgcccacgaatgtaggctgctcaagaatttttcttcgctgcgcgctatcgtatccgccctccagtccaatagcatctataggctgaagaagacctgggccgcagtgccccgagacaggatgttgatgttcgaggagctgagcgacatcttcagtgaccacaacaatcatctgacttctcgggagctgctgatgaaagaaggcacatcgaagtttgctaacctggactcatctgtgaaggaaaatcagaaaaggacccagcgcaggctgcagttacagaaggatatgggagtgatgcaagggactgtgccttacctcgggacctttttgaccgatcttaccatgctggacactgcactgcaggattacattgagggcggactaattaatttcgagaagcggaggagggagttcgaagtcatagctcagataaagctgctccagagcgcttgcaacagctactgtatgactcccgaccagaaattcatccaatggttccaaagacaacagttactcaccgaagaggaaagttatgccctgagctgcgaaatagaggccgctgccgacgcctcaactacctcccctaagcccagaaaaagtatggttaaacgcctgtcgttactgttcctgggatctgacatgatcacgtccccaacccctaccaaggagcagcctaagagcaccgccagtggctctagcggcgagtcaatggactctgtgtcagtcagttcttgcgagagtaatcacagcgaggccgaggagggttctatcactcccatggacacgcctgacgagccacagaaaaaattgtctgagtcatcaagcagttgctcttcaatccactctatggatacaaactccagcggtatgtcttcccttatcaaccccctgtctagccctccctcatgcaacaataatcctaagatccacaaacgaagtgttagcgtcacatcgattacatccactgtgctcccccctgtgtataaccagcagaatgaagacacatgcatcattcggatctcggtggaggacaacaacgggaacatgtataagagcatcatgctgaccagtcaggacaagactccagccgtgatccaaagagctatgctaaagcacaacttagactcagatccagcagaggaatacgagttagtacaggtgattagtgaggacaaggaactggtcatccccgatagcgctaacgtgttttacgcaatgaactcccaagttaatttcgatttcatcctgcggaagaaaaattccatggaggagcaggtcaaattgagaagccgcacaagccttaccctgcctaggacggccaaaaggggctgctggagcaatcggcactcaaaaattactttgtag

SEQ ID NO: 112136 - DNA, 4724 bp, Artificial Sequence
  derived and/or modified sequence
gtggcccgagtcgcgcgcaccggcggcggcgggggcagcgcggcgcgtgtctgtgcgctgcggtcgctcgggaccgggaccggggcgaggcgccgcggggctgagcccagcagacattgcgttggcctccgagcagggcgcatcatgcagcgttcgcgcaccggagagaaaactgagaatgaaattgctttggcaagctaaaatgagctcgattcaggactggggtgaagaggtagaggaaggagctgtttaccatgtcaccctcaaaagagtccagattcaacaggctgccaataaaggagcaagatggctaggggttgaaggggaccagctgcctccaggacacacagtcagtcaatatgaaacctgtaagatcaggaccataaaagctggcaccttggagaagcttgtggagaacctgctgacagcttttggggacaatgactttacctatatcagcatctttctttcaacgtacagaggctttgcctccactaaagaagtgctggaactactgctggacaggtatggaaacctgacaagcccaaactgtgaagaagatggaagccaaagttcatcagagtccaaaatggtgatcaggaatgcaatcgcttccatactaagggcctggcttgaccagtgtgcagaagacttccgagagccccctcacttcccttgcttacagaaactgctggattatctcacacggatgatgccgggctctgacccagaaagaagagcacaaaatcttcttgagcagtttcagaagcaagaagtggaaactgacaatgggcttcccaacacgatctccttcagcctggaagaggaagaggaactggagggtggagagtcagcagaattcacgtgcttctcagaagatctcgtggcagagcagctgacctacatggatgcacaactcttcaagaaagtagtgcctcaccactgcctgggctgcatttggtctcgaagggataagaaggaaaacaaacatttggctcctacgatccgtgccaccatctctcagtttaataccctcaccaaatgtgttgtcagcaccatcctggggggcaaagaactcaaaactcagcagagagccaaaatcattgagaagtggatcaacatcgctcatgaatgtagactcctgaagaatttttcctccttgagggccatcgtttcggcactgcagtctaattccatctatcggttaaaaaagacttgggctgccgtcccaagggaccgaatgctgatgtttgaagaactttcagatatcttctcagaccataataaccatttgaccagccgagaactactgatgaaggaaggaacctcaaaatttgcaaacctggacagcagtgtgaaagaaaaccagaagcgtacccagaggcggctgcagctccagaaggacatgggtgtgatgcagggaactgtgccctacctgggcaccttcctgactgacctgaccatgcttgacactgcccttcaggactacatcgagggtggactgataaactttgagaaaaggagaagggaatttgaagtgattgcccagataaagctcttacagtctgcctgcaacagctattgcatgaccccagaccaaaagttcatccagtggttccagaggcagcagctcctgacagaggaggagagctatgccctgtcatgtgagattgaagcagctgctgacgccagcaccacctcgcccaagcctcggaagagcatggtgaagagactcagcctactgtttctagggtctgacatgatcaccagtcccactcccaccaaagagcagcccaagtccactgccagcgggagctctggtgaaagcatggactctgtcagcgtgtcatcctgcgagtcgaaccactcagaggctgaggagggctccattactcccatggacacccctgatgagcctcaaaaaaagctctctgagtcctcctcatcctgttcttctatccattccatggacacaaattcctcagggatgtcttccttaatcaaccccctctcctcccctccgtcctgcaacaacaaccccaaaatccacaagcgctctgtctcggtgacgtccattacctcgactgtgctgcctcctgtttacaaccaacagaatgaagacacctgcataatccgcatcagtgtggaagacaataacggcaacatgtacaagagcatcatgttgacgagccaggataaaacccccgctgtgatccagagagccatgctgaagcacaatctggactcagaccccgccgaggagtacgagctggtgcaggtcatctcggaggacaaagaacttgtgattccagactcagcaaatgtcttttatgccatgaacagccaagtgaactttgacttcattttgcgcaaaaagaactccatggaagaacaagtgaaactgcgtagccggaccagcttgacgttgcccaggacagctaaacggggctgctggagtaacagacacagcaaaatcaccctctgaagggagggaccagtggccccttgtttgccaaaggcagagtggggctgagaaacaggctgcggtgattgcaattaccatccggtgttcgaggatcattggtgaagtcagcagatatttattgagttcctgtggtgtgcaaagcattatgataggcaccgtggggaaactggaaatgaatttgacatgaaaaggatgaacgattcactgattctctttgactcatttgagactaaaatgcagaattaccaacatttaaaacatatatatgcacatgtatttggtatgcatgtgtatctatataaaaatatataagagggactttatgggatagtatggactatggaaaaacaaatttgcacaatggcctgggaagttgaggtcactttttacagggaaatagaagaaactgagaacctagtctcgtatattctgagtaaatggaatcagtcctgggaatagagagtgtcctttgtgccagtattacaagaagcccaaactttatttttataaagggagaggatgactttctcaatcaagtgccaccagataaaaacaactgcagaggctggaactgccacaggctgtatgaaaggccactttggaaagggtttggatgagctggtggccttcaacctctgcctgcatctgccactttctgctaccctagggaggccaggaggagcttcggaggaccatcgccccactggtctagccatcatgacacctctggaggtgtcaagctcctgaaacaagctcatttcagtttctggcaaccccgtgtatttccgttttccccctaaagaacatatcataatcattgcacaaataaccatgttctttggtaatgaagccagaaaagaaagcgcaaaagaatggtgactcatttggactcttatctgtcttggaatgtcactgcttcattgccttctctgattgccttttgcatgtaaaactatgtgtctggagtcttttgccatctggatcttagtacctctttattatgtgcaatttattcctcaggtgtggaaatttctactgcaattgactacgtttgattattttgagcttgtgaaagatttctgaacagtgattgtcccgttaatagcccctcagaagatgttccctgctgataacagcatcctattttacttacttttatagcattactgtgcctagtcgtggggaaagagatggggctgtatagattatctgaatcatttgtctaagaggtacattcttccagatggaatcaataacttttttttttccaggttcccgtgcttgctatcacagtatcattgttaagtgacacttttgtctctcataacaccatcacactcttccttccaagtctgagctgtgctggggtttgaactaaaagccatatgtggaatattgacatgtgtaagaagcactttcagaatgttgtcctttttaagaaatgattctcaaaataccagtttttattccaaaaatttagagaacaaacccggaatatgaagtgcagattgtaacatggagctatttttttttcttaatcccataatacagctcctaaaagttgtgtgggatttgcgttgcataaatagccatgtgaattccacaagaagcaccagggaaagtttagagatttgcggcaatggaccgaagaacgggccaggaagtcctccaatttcctttggtctttccaggagattggactacacattgtaaagactgactgggtttcaactagtcaaaaagcactttcttctgttttcaatccctgttcgatttgtgcttctgtgcttgtaggagagatggccagggtggcagccctcatgcaggttgaagtatatgtagcctcagcctgatattcttggtgcgaaggtaaaaaaaaaaaaataaataaaaccattggcctggttgagggcgtgaccaccaagacatatatgttgtgcccgtgttcatcctgtgtatttatactgtatatgtagagtctagatttatatactgcaatgtaaaatatatatatatttaccttttttaaagacaatggaaattccaagtagctaaaacttagcttcatttatttaatgccactttaaatgtcttaaatttgtttcctggtggacagccgggtaatgcttttagctgctcgcatgcttgtctttctgcatctccatcatctgtttaccttttggttaaactaataaactagtttgggacttggctggcatgtgctgccagacccaaaggg

SEQ ID NO: 112137 - DNA, 2307 bp, Artificial Sequence
  derived and/or modified sequence
atgaagctgctgtggcaggccaagatgagcagcatccaggactggggcgaggaggtggaggagggcgccgtgtaccacgtgaccctgaagagagtgcagatccagcaggccgccaacaagggcgccagatggctgggcgtggagggcgaccagctgccccccggccacaccgtgagccagtacgagacctgcaagatcagaaccatcaaggccggcaccctggagaagctggtggagaacctgctgaccgccttcggcgacaacgacttcacctacatcagcatcttcctgagcacctacagaggcttcgccagcaccaaggaggtgctggagctgctgctggacagatacggcaacctgaccagccccaactgcgaggaggacggcagccagagcagcagcgagagcaagatggtgatcagaaacgccatcgccagcatcctgagagcctggctggaccagtgcgccgaggacttcagagagcccccccacttcccctgcctgcagaagctgctggactacctgaccagaatgatgcccggcagcgaccccgagagaagagcccagaacctgctggagcagttccagaagcaggaggtggagaccgacaacggcctgcccaacaccatcagcttcagcctggaggaggaggaggagctggagggcggcgagagcgccgagttcacctgcttcagcgaggacctggtggccgagcagctgacctacatggacgcccagctgttcaagaaggtggtgccccaccactgcctgggctgcatctggagcagaagagacaagaaggagaacaagcacctggcccccaccatcagagccaccatcagccagttcaacaccctgaccaagtgcgtggtgagcaccatcctgggcggcaaggagctgaagacccagcagagagccaagatcatcgagaagtggatcaacatcgcccacgagtgcagactgctgaagaacttcagcagcctgagagccatcgtgagcgccctgcagagcaacagcatctacagactgaagaagacctgggccgccgtgcccagagacagaatgctgatgttcgaggagctgagcgacatcttcagcgaccacaacaaccacctgaccagcagagagctgctgatgaaggagggcaccagcaagttcgccaacctggacagcagcgtgaaggagaaccagaagagaacccagagaagactgcagctgcagaaggacatgggcgtgatgcagggcaccgtgccctacctgggcaccttcctgaccgacctgaccatgctggacaccgccctgcaggactacatcgagggcggcctgatcaacttcgagaagagaagaagagagttcgaggtgatcgcccagatcaagctgctgcagagcgcctgcaacagctactgcatgacccccgaccagaagttcatccagtggttccagagacagcagctgctgaccgaggaggagagctacgccctgagctgcgagatcgaggccgccgccgacgccagcaccaccagccccaagcccagaaagagcatggtgaagagactgagcctgctgttcctgggcagcgacatgatcaccagccccacccccaccaaggagcagcccaagagcaccgccagcggcagcagcggcgagagcatggacagcgtgagcgtgagcagctgcgagagcaaccacagcgaggccgaggagggcagcatcacccccatggacacccccgacgagccccagaagaagctgagcgagagcagcagcagctgcagcagcatccacagcatggacaccaacagcagcggcatgagcagcctgatcaaccccctgagcagcccccccagctgcaacaacaaccccaagatccacaagagaagcgtgagcgtgaccagcatcaccagcaccgtgctgccccccgtgtacaaccagcagaacgaggacacctgcatcatcagaatcagcgtggaggacaacaacggcaacatgtacaagagcatcatgctgaccagccaggacaagacccccgccgtgatccagagagccatgctgaagcacaacctggacagcgaccccgccgaggagtacgagctggtgcaggtgatcagcgaggacaaggagctggtgatccccgacagcgccaacgtgttctacgccatgaacagccaggtgaacttcgacttcatcctgagaaagaagaacagcatggaggagcaggtgaagctgagaagcagaaccagcctgaccctgcccagaaccgccaagagaggctgctggagcaacagacacagcaagatcaccctgtag

SEQ ID NO: 112138 - protein, 739 aa, Artificial Sequence
  derived and/or modified sequence
MKLLWQAKMSSIQDWGEEVEEGAVYHVTLKRVQIQQAANKGARWLGVEGDQLPPGHTVSQYETCKIRTIKAGTLEKLVENLLTAFGDNDFTYISIFLSTYRGFASTKEVLELLLDRYGNLTSPNCEEDGSQSSSESKMVIRNAIASILRAWLDQCAEDFREPPHFPCLQKLLDYLTRMMPGSDPERRAQNLLEQFQKQEVETDNGLPNTISFSLEEEEELEGGESAEFTCFSEDLVAEQLTYMDAQLFKKVVPHHCLGCIWSRRDKKENKHLAPTIRATISQFNTLTKCVVSTILGGKELKTQQRAKIIEKWINIAHECRLLKNFSSLRAIVSALQSNSIYRLKKTWAAVPRDRMLMFEELSDIFSDHNNHLTSRELLMKEGTSKFANLDSSVKENQKRTQRRLQLQKDMGGLINFEKRRREFEVIAQIKLLQSACNSYCMTPDQKFIQWFQRQQLLTEEESYALSCEIEAAADASTTSPKPRKSMVKRLSLLFLGSDMITSPTPTKEQPKSTASGSSGESMDSVSVSSCESNHSEAEEGSITPMDTPDEPQKKLSESSSSCSSIHSMDTNSSGMSSLINPLSSPPSCNNNPKIHKRSVSVTSITSTVLPPVYNQQNEDTCIIRISVEDNNGNMYKSIMLTSQDKTPAVIQRAMLKHNLDSDPAEEYELVQVISEDKELVIPDSANVFYAMNSQVNFDFILRKKNSMEEQVKLRSRTSLTLPRTAKRGCWSNRHSKITL

SEQ ID NO: 112139 - DNA, 2220 bp, Artificial Sequence
  derived and/or modified sequence
atgaagttgctgtggcaggccaaaatgagtagcattcaagactggggcgaggaagtcgaggaaggagccgtgtaccatgtaactctgaagagagtccagattcaacaggccgcaaataagggagctcgatggctcggtgttgagggcgatcagcttccaccgggacatacagtctctcaatatgagacatgtaaaatacgcactattaaagcgggcaccctggaaaagctcgtcgagaatctgcttaccgccttcggggacaatgactttacctacataagtatcttcctgtccacctacagggggtttgcctccaccaaggaggtgctggaactgctgctcgaccggtacggaaacttgacgagcccgaattgtgaggaagacggcagccagtcctcgtccgagagcaagatggtgattaggaatgccatagcatctattctacgcgcttggctggaccagtgcgctgaagactttagagaacctccgcacttcccctgcttgcagaaattgctagattacctgaccaggatgatgcctggatctgaccctgagagaagggcccagaatctgttggaacagttccagaaacaggaagtggagactgataacggtctgcccaacacaataagttttagcttggaggaggaggaggaactggaggggggggaaagtgcggagtttacctgcttctccgaagacctggttgcagagcaactgacttatatggacgctcagctgtttaagaaggttgtcccccatcactgtctgggctgcatttggagccggcgtgacaagaaagagaacaaacatctggcccccaccatacgcgctactatctcacagtttaataccctgacaaagtgtgttgtcagcactattttaggaggaaaggagctgaaaacccagcagagagcgaagattatcgagaaatggattaatatcgcacatgagtgccggctgctcaaaaatttcagctcacttcgcgctatagtatccgcgctgcagtctaactctatttaccgcctgaaaaagacctgggcggcggttcccagagacagaatgctgatgtttgaagagttaagcgatatattcagcgatcacaacaatcacctcacatcacgcgagttgctaatgaaagaagggactagcaagttcgctaacctggattcatccgtgaaggagaatcagaagagaacgcagcgccgtctccagcttcaaaaggatatgggaggactcattaacttcgaaaagcgacgcagggagttcgaggtaatagcccagataaagctgctgcagtccgcttgtaatagttactgtatgaccccagaccagaaattcatccagtggttccagcgccagcagcttctgactgaagaggaaagctacgccttaagctgcgaaattgaagctgctgccgatgcctctacgacttcaccaaaacctcggaagagtatggttaagcggctgagcctcctgttcctcggatccgacatgataacatcacccacccctaccaaagaacaacccaagagcactgcttctgggtcctcgggggaaagtatggactccgtgtccgtgagtagctgcgaatcgaatcactccgaggcagaagagggttccattacaccgatggatacccccgatgagcctcagaagaaattgtctgagtccagtagcagctgttcaagcatccacagtatggatacgaattcctccgggatgtcaagtctgattaatcccctctcgtcaccccctagctgcaataacaatcctaagattcataagcggagtgtaagcgtgacgagcatcacgtcgactgttcttcctcctgtgtacaatcagcaaaacgaagatacctgtattatacgcatcagtgttgaagataataacggaaatatgtacaaatccattatgctaacgtctcaggacaaaacaccggcagtaatacagcgggcgatgctgaaacacaatcttgattccgacccagctgaggaatatgagctggtgcaggtgatcagcgaagataaggaacttgtgatacctgactccgctaacgttttctacgccatgaatagtcaggtcaacttcgatttcatcctacgcaaaaaaaattcaatggaggaacaggtgaaactgagaagcagaacctcactaactttgccccggaccgctaagcggggatgctggtcaaatcggcattccaagatcaccctgtag

SEQ ID NO: 112140 - DNA, 2220 bp, Artificial Sequence
  derived and/or modified sequence
atgaagctgctgtggcaggccaagatgagcagcatccaggactggggcgaggaggtggaggagggcgctgtgtaccacgtgaccctgaagagggtgcagatccagcaggccgccaacaagggggcccgctggctgggcgtggagggggaccagctgcccccaggccacacagtgtcccagtatgagacctgcaagatccgcaccatcaaggccggcaccctggagaagctggtggagaacctgctgacagcctttggagacaatgacttcacctacatcagcatcttcctgagcacctaccggggctttgccagcaccaaggaggtgctggagctgctgctggacagatatggcaacctgaccagccccaactgtgaagaagatggcagccagagcagcagcgagagcaagatggtgatcagaaatgccatcgccagcatcctgcgggcctggctggaccagtgtgccgaggacttccgggagcccccccacttcccctgcctgcagaagctgctggactacctgaccaggatgatgcctggcagtgaccctgagcggcgggcccagaacctgctggagcagttccagaagcaggaggtggagacagacaatggcctgcccaacaccatctccttcagcctggaggaggaggaggagctggagggcggggagagcgctgagttcacctgcttcagcgaggacctggtggccgagcagctgacctacatggatgcccagctgttcaagaaggtggtgccccaccactgcctgggctgcatctggagcagaagagacaagaaggagaacaagcacctggcccccaccatccgggccaccatcagccagttcaacaccctgaccaagtgtgtggtgtccaccatcctgggcggcaaggagctgaagacccagcagagggccaagatcatcgagaagtggatcaacatcgcccacgagtgccgcctgctgaagaacttcagcagcctgcgggccatcgtgtctgccctgcagagcaacagcatctaccgcctgaagaagacctgggccgctgtgccccgggacaggatgctgatgtttgaggagctgagtgacatcttcagtgaccacaacaaccacctgaccagccgggagctgctgatgaaggagggcaccagcaagtttgccaacctggacagctctgtgaaggagaaccagaagaggacccagaggcggctgcagctgcagaaggacatgggcggcctcatcaactttgagaagagaagaagagaatttgaagtcatcgcccagatcaagctgctgcagagcgcctgcaacagctactgcatgaccccagaccagaagttcatccagtggttccagaggcagcagctgctgacagaggaggagagctatgccctgagctgtgaaattgaagctgctgctgatgccagcaccaccagccccaagcccaggaagtccatggtgaagaggctgagcctgctcttcctgggcagtgacatgatcaccagccccacccccaccaaggagcagcccaagagcacagccagcggcagcagcggggagagcatggacagcgtgtctgtgagcagctgtgagagcaaccacagcgaggccgaggagggcagcatcacccccatggacaccccagatgagccccagaagaagctgtctgagagcagcagcagctgcagcagcatccacagcatggacaccaacagcagcggcatgagcagcctcatcaaccccctgagcagcccccccagctgcaacaacaaccccaagatccacaagaggtctgtgtctgtgaccagcatcaccagcacagtgctgccccctgtgtacaaccagcagaatgaagacacctgcatcatccgcatctctgtggaggacaacaatggaaacatgtacaagagcatcatgctgaccagccaggacaagaccccagctgtgatccagagggccatgctgaagcacaacctggacagcgaccctgctgaggagtatgagctggtgcaggtgatcagcgaggacaaggagctggtgatcccagacagcgccaacgtgttctacgccatgaacagccaggtgaactttgacttcatcctgaggaagaagaacagcatggaggagcaggtgaagctgcggagcaggaccagcctgaccctgcccaggacagccaagaggggctgctggagcaacagacacagcaagatcaccctgtag

SEQ ID NO: 112141 - DNA, 2220 bp, Artificial Sequence
  derived and/or modified sequence
atgaagctgctgtggcaggccaagatgagcagcatccaggactggggagaagaggtggaggaaggtgctgtgtaccacgttacactgaagcgtgtgcagatccaacaggccgcaaataagggggctaggtggctgggggtcgagggtgatcagctcccacctggacatacagtgtcacagtacgagacatgcaagattaggactataaaggctggcaccctggaaaaacttgttgaaaatcttctgactgcattcggggacaacgattttacgtacatcagcatcttcctgtcaacatatcggggattcgctagcactaaggaggtcctcgagctgttgctggataggtacggcaacttgacttctcccaactgtgaggaggatggaagtcagagctcatccgagagcaagatggtgatcaggaacgcgatagccagcatacttagggcatggctggatcagtgcgccgaggacttcagggagccacctcacttcccttgtctccaaaaacttttggactatttaactagaatgatgcccggtagcgacccagagaggcgcgcccagaaccttctggagcaatttcagaagcaggaggtcgagacggataatgggttaccaaacactatctctttctccctcgaagaagaggaagaactcgaaggaggtgagtcggccgagtttacttgcttttctgaggatctcgtggcggagcagctcacttatatggatgcccagctcttcaagaaggtggtcccccaccactgccttggttgcatctggagtcggcgagacaaaaaagagaacaaacacttagcccccactatcagggccacgatcagccaatttaacactttaactaagtgtgtggtttcgacaatcctcggagggaaagaactgaagactcaacaaagagccaaaattatcgaaaagtggataaacatcgcgcacgagtgtcgccttctcaaaaactttagcagcctaagagctatcgtgtccgccttacaaagtaactcaatctaccggctcaaaaagacctgggctgctgtcccacgggatcgaatgctgatgtttgaggaactctccgatatcttttcagatcataacaaccacctgacttccagggaactgctgatgaaggagggcacatctaagttcgccaacttggatagctccgtcaaggaaaaccaaaagaggacacagaggcgcctgcagctccagaaggatatgggaggattgatcaacttcgaaaagaggcgtcgtgaattcgaagttatcgcgcaaatcaaacttctgcagagcgcttgcaacagctactgcatgacccccgaccagaaatttatccagtggtttcaacgccaacagctgttaactgaagaggagagctacgctctgtcctgtgaaatcgaggccgctgctgatgcctctaccacatcccctaagccacgcaaatccatggtaaagcgtctatcactgctgtttttgggctccgacatgatcacctcccccacccccaccaaggagcagcccaaaagcactgcgagcggatcctcgggagagtctatggacagcgtgagcgtttcaagctgcgagagcaaccattctgaggctgaggagggatctataacccctatggatacccccgatgagccccagaaaaaactgtccgaaagcagtagctcttgtagttctatacacagcatggatactaatagctctggtatgtcaagcctcataaatcctttgtctagtcctccctcatgtaacaacaaccccaagatacacaagcgcagtgtctccgtgacgtctatcacctccacagtgcttccacctgtgtacaaccagcagaacgaagacacgtgcataattcgaataagcgtggaggataataatgggaacatgtacaagtccattatgctgacaagccaagacaaaacaccagccgtgatccagcgggcaatgttaaagcacaatctagactccgaccctgccgaagaatacgagcttgtgcaagtcatctcggaggacaaggagctagtgattcccgattccgctaatgtgttttatgctatgaacagccaggttaacttcgattttatcctgcggaagaagaattccatggaagagcaggttaaactgaggtccagaacctctctgacccttccacggactgccaagagaggctgctggtccaatagacactcaaaaatcacactctag

SEQ ID NO: 112142 - DNA, 2220 bp, Artificial Sequence
  derived and/or modified sequence
atgaaactcttgtggcaggcgaaaatgtcatcaatacaggattggggagaagaggtggaggagggggctgtttaccacgtaacacttaaaagggttcagatccaacaagctgcgaataaaggcgcaaggtggctgggggtcgagggcgatcaactgcctcctggacacaccgtcagtcaatacgaaacttgtaagataaggactattaaagcaggtactttggaaaagctggtggaaaaccttcttacagcatttggagacaatgatttcacctacatctccatattcctgagcacttatcgcggttttgcatccacaaaagaggtcctagaacttctcctcgacagatatggtaatctgacttcgcctaactgtgaggaagatggctcccagtcgtcatctgagtcaaagatggttattcgcaatgctatcgctagtatactccgcgcttggctggatcagtgtgctgaggattttagagagccgccacacttcccatgcctgcaaaaactgctggactatcttacaagaatgatgccaggttcagacccagagagacgagctcagaatctccttgagcaattccaaaaacaagaggtcgagacagacaacggtctccccaatactatttcgttcagcctggaggaggaagaggagttggaaggcggagaaagtgcagagttcacgtgcttctcggaggatttggtggctgagcagttaacatacatggatgctcagctgtttaagaaagtggtgcctcatcactgccttggctgtatctggtcccggagagataagaaggagaataaacatctcgcgccaaccatcagggctacaattagccagtttaacactcttacgaaatgcgtggttagcacaatccttgggggtaaagaactgaagacacaacagagggccaaaatcattgagaaatggatcaacatcgcacacgagtgtcggcttttaaaaaacttttctagtctgagggccatcgtatctgccctgcaaagcaactccatttaccgccttaaaaagacttgggcagccgttccacgagaccgtatgctgatgtttgaagagctatctgacatttttagcgaccacaataatcatctcacaagccgggagttgcttatgaaagaaggaacctctaagttcgccaacctggatagttccgtaaaggagaatcaaaagcgcactcagcgaagactccagctacagaaagatatgggaggcctgattaatttcgaaaagcggagacgcgaatttgaagttattgcacagattaagttgctacagagtgcctgtaattcctattgcatgacacctgaccagaagttcatccagtggtttcaacggcagcagctgctaactgaggaagagtcatacgcactgtcctgcgaaattgaagctgctgccgacgcgtctactacctcccccaaacctcggaaatctatggttaaaagactgtctctgctttttttggggtcagatatgatcacttcacccactcctacaaaagagcagcctaagtcgaccgcgtctggcagctcaggggagtccatggatagtgtgtcagtttcatcttgtgagtctaaccactcagaagcggaagaaggctcaatcacaccaatggacacgcccgatgaacctcaaaagaagctgagcgagagcagttccagttgctcatcgattcactccatggacacaaacagtagtggaatgtctagtttgattaacccattgtcatcacctccgagctgtaacaataaccccaaaatccataaacggtcagtgtctgtaactagtatcacatcaacagttctgccccctgtgtataatcaacagaacgaagacacttgtattattcgcatctccgtcgaagacaacaacggcaacatgtataagtctattatgctaacttctcaggataagactcctgccgtgatccagcgggcaatgttaaagcataatttggactcagaccccgctgaggaatacgagctggtccaagtaatatcagaagacaaagagttagttattcctgatagcgccaatgtattttacgctatgaatagccaggttaattttgattttattttaaggaagaaaaattccatggaggagcaggtgaagctgaggagcaggacgtcattgaccctaccaaggactgctaagcgcggttgctggtctaatcggcattccaaaataactctttag

SEQ ID NO: 112143 - DNA, 2688 bp, Artificial Sequence
  derived and/or modified sequence
agcgcggcgcgtgtctgtgcgctgcggtcgctcgggaccgggaccggggcgaggcgccgcggggctgagcccagcagacattgcgttggcctccgagcagggcgcatcatgcagcgttcgcgcaccggagagaaaactgagaatgaaattgctttggcaagctaaaatgagctcgattcaggactggggtgaagaggtagaggaaggagctgtttaccatgtcaccctcaaaagagtccagattcaacaggctgccaataaaggagcaagatggctaggggttgaaggggaccagctgcctccaggacacacagtcagtcaatatgaaacctgtaagatcaggaccataaaagctggcaccttggagaagcttgtggagaacctgctgacagcttttggggacaatgactttacctatatcagcatctttctttcaacgtacagaggctttgcctccactaaagaagtgctggaactactgctggacaggtatggaaacctgacaagcccaaactgtgaagaagatggaagccaaagttcatcagagtccaaaatggtgatcaggaatgcaatcgcttccatactaagggcctggcttgaccagtgtgcagaagacttccgagagccccctcacttcccttgcttacagaaactgctggattatctcacacggatgatgccgggctctgacccagaaagaagagcacaaaatcttcttgagcagtttcagaagcaagaagtggaaactgacaatgggcttcccaacacgatctccttcagcctggaagaggaagaggaactggagggtggagagtcagcagaattcacgtgcttctcagaagatctcgtggcagagcagctgacctacatggatgcacaactcttcaagaaagtagtgcctcaccactgcctgggctgcatttggtctcgaagggataagaaggaaaacaaacatttggctcctacgatccgtgccaccatctctcagtttaataccctcaccaaatgtgttgtcagcaccatcctggggggcaaagaactcaaaactcagcagagagccaaaatcattgagaagtggatcaacatcgctcatgaatgtagactcctgaagaatttttcctccttgagggccatcgtttcggcactgcagtctaattccatctatcggttaaaaaagacttgggctgccgtcccaagggaccgaatgctgatgtttgaagaactttcagatatcttctcagaccataataaccatttgaccagccgagaactactgatgaaggaaggaacctcaaaatttgcaaacctggacagcagtgtgaaagaaaaccagaagcgtacccagaggcggctgcagctccagaaggacatgggtggactgataaactttgagaaaaggagaagggaatttgaagtgattgcccagataaagctcttacagtctgcctgcaacagctattgcatgaccccagaccaaaagttcatccagtggttccagaggcagcagctcctgacagaggaggagagctatgccctgtcatgtgagattgaagcagctgctgacgccagcaccacctcgcccaagcctcggaagagcatggtgaagagactcagcctactgtttctagggtctgacatgatcaccagtcccactcccaccaaagagcagcccaagtccactgccagcgggagctctggtgaaagcatggactctgtcagcgtgtcatcctgcgagtcgaaccactcagaggctgaggagggctccattactcccatggacacccctgatgagcctcaaaaaaagctctctgagtcctcctcatcctgttcttctatccattccatggacacaaattcctcagggatgtcttccttaatcaaccccctctcctcccctccgtcctgcaacaacaaccccaaaatccacaagcgctctgtctcggtgacgtccattacctcgactgtgctgcctcctgtttacaaccaacagaatgaagacacctgcataatccgcatcagtgtggaagacaataacggcaacatgtacaagagcatcatgttgacgagccaggataaaacccccgctgtgatccagagagccatgctgaagcacaatctggactcagaccccgccgaggagtacgagctggtgcaggtcatctcggaggacaaagaacttgtgattccagactcagcaaatgtcttttatgccatgaacagccaagtgaactttgacttcattttgcgcaaaaagaactccatggaagaacaagtgaaactgcgtagccggaccagcttgacgttgcccaggacagctaaacggggctgctggagtaacagacacagcaaaatcaccctctgaagggagggaccagtggccccttgtttgccaaaggcagagtggggctgagaaacaggctgcggtgattgcaattaccatccggtgttcgaggatcattggtgaagtcagcagatatttattgagttcctgtggtgtgcaaagcattatgataggcaccgtggggaaactggaaatgaatttgacatgaaaaggatgaacgattcactgattctctttgactcatttgagactaaaatgcagaattaccaacatttaaaacatatatatgcacatgtatttggtatgcatgtgtatctatataaaaatatataagagggactttatgg

SEQ ID NO: 112144 - DNA, 2220 bp, Artificial Sequence
  derived and/or modified sequence
atgaagctgctgtggcaggccaagatgagcagcatccaggactggggcgaggaggtggaggagggcgccgtgtaccacgtgaccctgaagagagtgcagatccagcaggccgccaacaagggcgccagatggctgggcgtggagggcgaccagctgccccccggccacaccgtgagccagtacgagacctgcaagatcagaaccatcaaggccggcaccctggagaagctggtggagaacctgctgaccgccttcggcgacaacgacttcacctacatcagcatcttcctgagcacctacagaggcttcgccagcaccaaggaggtgctggagctgctgctggacagatacggcaacctgaccagccccaactgcgaggaggacggcagccagagcagcagcgagagcaagatggtgatcagaaacgccatcgccagcatcctgagagcctggctggaccagtgcgccgaggacttcagagagcccccccacttcccctgcctgcagaagctgctggactacctgaccagaatgatgcccggcagcgaccccgagagaagagcccagaacctgctggagcagttccagaagcaggaggtggagaccgacaacggcctgcccaacaccatcagcttcagcctggaggaggaggaggagctggagggcggcgagagcgccgagttcacctgcttcagcgaggacctggtggccgagcagctgacctacatggacgcccagctgttcaagaaggtggtgccccaccactgcctgggctgcatctggagcagaagagacaagaaggagaacaagcacctggcccccaccatcagagccaccatcagccagttcaacaccctgaccaagtgcgtggtgagcaccatcctgggcggcaaggagctgaagacccagcagagagccaagatcatcgagaagtggatcaacatcgcccacgagtgcagactgctgaagaacttcagcagcctgagagccatcgtgagcgccctgcagagcaacagcatctacagactgaagaagacctgggccgccgtgcccagagacagaatgctgatgttcgaggagctgagcgacatcttcagcgaccacaacaaccacctgaccagcagagagctgctgatgaaggagggcaccagcaagttcgccaacctggacagcagcgtgaaggagaaccagaagagaacccagagaagactgcagctgcagaaggacatgggcggcctgatcaacttcgagaagagaagaagagagttcgaggtgatcgcccagatcaagctgctgcagagcgcctgcaacagctactgcatgacccccgaccagaagttcatccagtggttccagagacagcagctgctgaccgaggaggagagctacgccctgagctgcgagatcgaggccgccgccgacgccagcaccaccagccccaagcccagaaagagcatggtgaagagactgagcctgctgttcctgggcagcgacatgatcaccagccccacccccaccaaggagcagcccaagagcaccgccagcggcagcagcggcgagagcatggacagcgtgagcgtgagcagctgcgagagcaaccacagcgaggccgaggagggcagcatcacccccatggacacccccgacgagccccagaagaagctgagcgagagcagcagcagctgcagcagcatccacagcatggacaccaacagcagcggcatgagcagcctgatcaaccccctgagcagcccccccagctgcaacaacaaccccaagatccacaagagaagcgtgagcgtgaccagcatcaccagcaccgtgctgccccccgtgtacaaccagcagaacgaggacacctgcatcatcagaatcagcgtggaggacaacaacggcaacatgtacaagagcatcatgctgaccagccaggacaagacccccgccgtgatccagagagccatgctgaagcacaacctggacagcgaccccgccgaggagtacgagctggtgcaggtgatcagcgaggacaaggagctggtgatccccgacagcgccaacgtgttctacgccatgaacagccaggtgaacttcgacttcatcctgagaaagaagaacagcatggaggagcaggtgaagctgagaagcagaaccagcctgaccctgcccagaaccgccaagagaggctgctggagcaacagacacagcaagatcaccctgtag

SEQ ID NO: 112145 - protein, 934 aa, Artificial Sequence
  derived and/or modified sequence
MAAGGGGGSSKASSSSASSAGALESSLDRKFQSVTNTMESIQGLSSWCIENKKHHSTIVYHWMKWLRRSAYPHRLNLFYLANDVIQNCKRKNAIIFRESFADVLPEAAALVKDPSVSKSVERIFKIWEDRNVYPEEMIVALREALTSTNPKAALKSKIVAEFRSQALIEELLLYKRSEDQIELKEKQLSTMRVDVCSTETLKCLKDKTGGKKFSKEFEEASSKLEEFVNGLDKQVKNGPSLTEALENAGIFYEAQYKEVKVVANAYKTFANRVNNLKKKLDQLKSTLPDPEESPVPSPSMDAPSPTGSESPFQGMGGEESQSPTMESEKSATPEPVTDNRDVEDMELSDVEDDGSKIIVEDRKEKPAEKSAVSTSVPTKPTENISKASSCTPVPVTMTATPPLPKPVNTSLSPSPALALPNLANVDLAKISSILSSLTSVMKNTGVSPASRPSPGTPTSPSNLTSGLKTPAPATTTSHNPLANILSKVEITPESILSALSKTQTQSAPALQGLSSLLQSVTGNPVPASEAASQSTSASPANTTVSTIKGRNLPSSAQPFIPKSFNYSPNSSTSEVSSTSASKASIGQSPGLPSTTFKLPSNSLGFTATHNTSPAAPPTEVTICQSSEVSKPKLESESTSPSLEMKIHNFLKGNPGFSGLNLNIPILSSLGSSAPSESHPSDFQRGPTSTSIDNIDGTPVRDERSGTPTQDEMMDKPTSSSVDTMSLLSKIISPGSSTPSSTRSPPPGRDESYPRELSNSVSTYRPFGLGSESPYKQPSDGMERPSSLMDSSQEKFYPDTSFQEDEDYRDFEYSGPPPSAMMNLEKKPAKSILKSSKLSDTTEYQPILSSYSHRAQEFGVKSAFPPSVRALLDSSENCDRLSSSPGLFGAFSVRGNEPGSDRSPSPKHPCRSHGSPTHVRRGESPGLHHFHHVDD

SEQ ID NO: 112146 - DNA, 2805 bp, Artificial Sequence
  derived and/or modified sequence
atggccgccggcggcggcggcggcagcagcaaggccagcagcagcagcgccagcagcgccggcgccctggagagcagcctggacagaaagttccagagcgtgaccaacaccatggagagcatccagggcctgagcagctggtgcatcgagaacaagaagcaccacagcaccatcgtgtaccactggatgaagtggctgagaagaagcgcctacccccacagactgaacctgttctacctggccaacgacgtgatccagaactgcaagagaaagaacgccatcatcttcagagagagcttcgccgacgtgctgcccgaggccgccgccctggtgaaggaccccagcgtgagcaagagcgtggagagaatcttcaagatctgggaggacagaaacgtgtaccccgaggagatgatcgtggccctgagagaggccctgaccagcaccaaccccaaggccgccctgaagagcaagatcgtggccgagttcagaagccaggccctgatcgaggagctgctgctgtacaagagaagcgaggaccagatcgagctgaaggagaagcagctgagcaccatgagagtggacgtgtgcagcaccgagaccctgaagtgcctgaaggacaagaccggcggcaagaagttcagcaaggagttcgaggaggccagcagcaagctggaggagttcgtgaacggcctggacaagcaggtgaagaacggccccagcctgaccgaggccctggagaacgccggcatcttctacgaggcccagtacaaggaggtgaaggtggtggccaacgcctacaagaccttcgccaacagagtgaacaacctgaagaagaagctggaccagctgaagagcaccctgcccgaccccgaggagagccccgtgcccagccccagcatggacgcccccagccccaccggcagcgagagccccttccagggcatgggcggcgaggagagccagagccccaccatggagagcgagaagagcgccacccccgagcccgtgaccgacaacagagacgtggaggacatggagctgagcgacgtggaggacgacggcagcaagatcatcgtggaggacagaaaggagaagcccgccgagaagagcgccgtgagcaccagcgtgcccaccaagcccaccgagaacatcagcaaggccagcagctgcacccccgtgcccgtgaccatgaccgccaccccccccctgcccaagcccgtgaacaccagcctgagccccagccccgccctggccctgcccaacctggccaacgtggacctggccaagatcagcagcatcctgagcagcctgaccagcgtgatgaagaacaccggcgtgagccccgccagcagacccagccccggcacccccaccagccccagcaacctgaccagcggcctgaagacccccgcccccgccaccaccaccagccacaaccccctggccaacatcctgagcaaggtggagatcacccccgagagcatcctgagcgccctgagcaagacccagacccagagcgcccccgccctgcagggcctgagcagcctgctgcagagcgtgaccggcaaccccgtgcccgccagcgaggccgccagccagagcaccagcgccagccccgccaacaccaccgtgagcaccatcaagggcagaaacctgcccagcagcgcccagcccttcatccccaagagcttcaactacagccccaacagcagcaccagcgaggtgagcagcaccagcgccagcaaggccagcatcggccagagccccggcctgcccagcaccaccttcaagctgcccagcaacagcctgggcttcaccgccacccacaacaccagccccgccgccccccccaccgaggtgaccatctgccagagcagcgaggtgagcaagcccaagctggagagcgagagcaccagccccagcctggagatgaagatccacaacttcctgaagggcaaccccggcttcagcggcctgaacctgaacatccccatcctgagcagcctgggcagcagcgcccccagcgagagccaccccagcgacttccagagaggccccaccagcaccagcatcgacaacatcgacggcacccccgtgagagacgagagaagcggcacccccacccaggacgagatgatggacaagcccaccagcagcagcgtggacaccatgagcctgctgagcaagatcatcagccccggcagcagcacccccagcagcaccagaagccccccccccggcagagacgagagctaccccagagagctgagcaacagcgtgagcacctacagacccttcggcctgggcagcgagagcccctacaagcagcccagcgacggcatggagagacccagcagcctgatggacagcagccaggagaagttctaccccgacaccagcttccaggaggacgaggactacagagacttcgagtacagcggccccccccccagcgccatgatgaacctggagaagaagcccgccaagagcatcctgaagagcagcaagctgagcgacaccaccgagtaccagcccatcctgagcagctacagccacagagcccaggagttcggcgtgaagagcgccttcccccccagcgtgagagccctgctggacagcagcgagaactgcgacagactgagcagcagccccggcctgttcggcgccttcagcgtgagaggcaacgagcccggcagcgacagaagccccagccccaagcacccctgcagaagccacggcagccccacccacgtgagaagaggcgagagccccggcctgcaccacttccaccacgtggacgactag

SEQ ID NO: 112147 - DNA, 2805 bp, Artificial Sequence
  derived and/or modified sequence
atggccgctggcgggggtggcggttcctccaaagcctctagcagtagcgcctcctccgccggtgctctggagtctagtttggacaggaaattccagtccgtgaccaacaccatggagtctattcagggcctgtctagttggtgtatcgagaacaaaaagcaccatagcaccatagtgtatcactggatgaagtggcttcggcggtccgcttaccctcacagactgaacctcttttacctcgctaatgacgtgatccagaattgtaaaaggaagaatgccatcattttccgggagtcttttgccgatgttctacccgaggctgccgctctggtgaaggacccgtccgtgagtaagtcagtggaaaggattttcaaaatctgggaagaccggaatgtataccctgaggagatgattgttgccctcagagaggcactgactagtacaaatccaaaggctgcactgaagtccaaaattgttgctgaattcaggtctcaagctctcattgaggagttgctcctttataagaggtcagaggaccagatcgagctaaaagagaaacagctctccacaatgcgcgtggatgtctgttccacggagacactcaagtgcctgaaagataagaccggaggaaaaaagttctcaaaggaattcgaggaagcttctagcaaactggaagagtttgtgaacggtctggataagcaggtgaagaatggccctagtttgacggaagctcttgagaatgccgggatattttacgaggcccagtataaggaagtcaaggtggtggctaacgcatacaagactttcgcaaatagagtgaacaatctgaaaaagaagctagaccagctgaaatcgacgttacccgaccccgaggaaagtcctgtgccttcaccctctatggatgccccgagccctaccggatcggaatccccgtttcagggtatgggaggggaggaaagtcagagtcccactatggaatcagaaaaaagcgctactccagaaccggttacagataacagggacgtcgaagacatggagcttagcgatgtggaggacgatgggagcaagattattgttgaggacagaaaggagaagccagccgagaagtctgcggtgtcaacatccgtccccaccaagcctactgagaatatttctaaggcgagctcttgcaccccagtgccagtcaccatgaccgccaccccacctttgccaaagcccgtcaacactagcctcagcccctcaccagcattggccctgccaaatctggccaatgtggacttagccaagatttccagtatactctcctcactgacatcggttatgaagaacacaggggttagtcctgcaagtcgcccctcccctggcacccccacgagtccctctaatctgactagcggcctcaagactcccgcccctgcgacgactacatcacataaccccttagctaacatcctcagtaaagtagagattacacctgagagtatactctctgccctatccaaaactcagactcagagcgccccagcccttcaaggactctcaagccttctgcagagtgtgaccggcaacccagtgccagcctctgaagccgctagccagtctaccagcgccagccccgcaaacaccacagtatcgacaattaaaggccgcaatctccctagcagcgctcaaccattcattcctaagagcttcaactattcgccgaattcaagcaccagcgaagtctcttctacctccgcctctaaggcttctattggacaatctccagggctgccctccaccacctttaaactgccatccaactctctgggtttcaccgcgactcataataccagccctgcagcgcccccaacggaggtgactatatgtcagagctccgaagttagtaagccgaagctggagtccgaatctacgagtccgagcttggaaatgaaaatccacaactttctgaagggaaatcccggattcagcgggcttaatctaaacattcccattctgtcctcactggggagctccgcgccttcagaatcacacccctctgattttcagagaggaccaactagcactagtatcgacaatattgatggcacacctgtcagagatgagcgttcggggacgcctacccaggacgagatgatggataagcctacttcttctagcgtcgacacaatgtcactgctgagtaagattataagcccgggtagtagtacaccaagttctaccagaagtcccccgcccgggcgcgacgaatcctatcctcgggaattgtcaaactccgtttccacctatcgtcctttcggccttgggtcggaatcaccatataaacagccatcagacggtatggagaggccatcaagcttgatggattcatcacaggagaagttctacccagacacaagcttccaggaggatgaggattatcgggatttcgaatactccggacctccacccagcgctatgatgaacctggagaagaagcctgccaagagtatcttgaagtctagtaagctctccgatacaactgagtatcaaccgattctcagcagctactcccatcgagcccaagagttcggcgtcaagagcgctttccccccatcagtacgggcgctgctcgactctagtgaaaactgcgaccgcctcagctcatcgccaggcctttttggcgccttctcagtccgtggcaacgagccaggctctgatcggagcccctctcccaagcacccatgtaggtcccatggtagtccaacacacgtcagacgtggagaatcccccggcctgcatcactttcatcacgtggacgactag

SEQ ID NO: 112148 - DNA, 2805 bp, Artificial Sequence
  derived and/or modified sequence
atggctgctgggggcggcggcggcagcagcaaggccagcagcagcagcgccagcagcgctggggccctggagagcagcctggacaggaagttccagagcgtgaccaacaccatggagagcatccagggcctgagctcctggtgcatcgagaacaagaagcaccacagcaccatcgtgtaccactggatgaagtggctgcggcgcagcgcctacccccaccggctgaacctcttctacctggccaatgatgtgatccagaactgcaagaggaagaatgccatcatcttccgggagagctttgctgatgtgctgcctgaggccgccgccctggtgaaggaccccagcgtgtccaagtctgtggagcgcatcttcaagatctgggaggacagaaatgtgtacccagaggagatgattgtggccctgcgggaggccctgaccagcaccaaccccaaggccgccctgaagagcaagatcgtggccgagttccgcagccaggccctgattgaggagctgctgctgtacaagaggtctgaggaccagatcgagctgaaggagaagcagctgagcaccatgagggtggatgtgtgcagcacagagaccctgaagtgcctgaaggacaagacaggaggcaagaagttcagcaaggagtttgaggaggccagcagcaagctggaggagtttgtgaatggcctggacaagcaggtgaagaatggccccagcctgacagaggccctggagaatgccggcatcttctatgaggcccagtacaaggaggtgaaggtggtggccaatgcctacaagacctttgccaacagagtgaacaacctgaagaagaagctggaccagctgaagagcaccctgcctgaccctgaggagagccctgtgcccagccccagcatggatgcccccagccccaccggcagcgagagccccttccagggcatgggcggggaggagagccagagccccaccatggagagcgagaagagcgccaccccagagcctgtgacagacaacagagatgtggaggacatggagctgagtgatgtggaggatgatggcagcaagatcatcgtggaggacaggaaggagaagccagctgagaagtctgctgtgtccacctctgtgcccaccaagcccacagagaacatcagcaaggccagcagctgcacccctgtgcctgtgaccatgacagccaccccacccctgcccaagcctgtgaacaccagcctgagccccagccctgccctggccctgcccaacctggccaacgtggacctggccaagatcagcagcatcctgagcagcctgacctctgtgatgaagaacacaggagtgtccccagccagccggcccagccctggcacccccaccagccccagcaacctgaccagcggcctgaagaccccagccccagccaccaccaccagccacaaccccctggccaacatcctgagcaaggtggagatcaccccagagagcatcctgagcgccctgagcaagacccagacccagagcgccccagccctgcagggcctgagcagcctgctgcagagcgtgactggaaatcctgtgcctgccagcgaggccgccagccagagcaccagcgccagccctgccaacaccaccgtgtccaccatcaagggcaggaacctgcccagcagcgcccagcccttcatccccaagagcttcaactacagccccaacagcagcaccagcgaggtgagcagcaccagcgccagcaaggccagcatcggccagagccctggcctgcccagcaccaccttcaagctgcccagcaacagcctgggcttcaccgccacccacaacaccagccctgctgccccacccacagaggtgaccatctgccagagcagcgaggtgtccaagcccaagctggagagcgagagcaccagccccagcctggagatgaagatccacaacttcctgaagggcaaccctggcttcagcggcctgaacctgaacatccccatcctgagcagcctgggcagcagcgcccccagcgagagccaccccagcgacttccagaggggccccaccagcaccagcattgacaacattgatggcacccctgtgagagatgagaggagcggcacccccacccaggatgagatgatggacaagcccaccagcagctctgtggacaccatgagcctgctgagcaagatcatcagccctggcagcagcacccccagcagcaccaggagccccccacctggaagagatgagagctacccccgggagctgagcaacagcgtgtccacctaccggcccttcggcctgggcagcgagagcccctacaagcagcccagtgatggcatggagcggcccagcagcctgatggacagcagccaggagaagttctacccagacaccagcttccaggaggatgaggactacagagactttgagtacagcggccccccacccagcgccatgatgaacctggagaagaagccagccaagagcatcctgaagagcagcaagctgagtgacaccacagagtaccagcccatcctgagcagctacagccaccgggcccaggagtttggagtgaagagcgccttcccccccagcgtgcgggccctgctggacagcagcgagaactgtgaccggctgagcagcagccctggcctgtttggagccttctctgtgagaggaaatgaacctggcagtgacaggagccccagccccaagcacccctgccgcagccacggcagccccacccacgtgagaagaggagagagccctggcctgcaccacttccaccacgtggatgactag

SEQ ID NO: 112149 - DNA, 2805 bp, Artificial Sequence
  derived and/or modified sequence
atggccgccggcggcggcggcggcagcagcaaggccagcagcagcagtgccagttcagctggcgccctggagtcatcactagatagaaagtttcagtctgtgactaatacaatggaaagcatccaaggattatccagttggtgcattgagaataaaaaacatcatagcacaattgtgtatcactggatgaaatggctgcgtagatctgcatatccacacaggctgaacctgttttacctggccaacgacgtgattcagaactgcaagcggaagaacgccattatattccgggaaagtttcgccgatgtactgcccgaggccgccgccctggtcaaggatccctctgtttctaagtccgttgaacgcatattcaaaatctgggaggataggaatgtatatccggaggagatgattgtagctctccgggaagccttaacctcaacaaatcccaaagccgccctgaagtccaagattgtggcggagtttagatcgcaggcactgattgaagaattgctgctgtacaaacggtccgaagatcagatcgagcttaaggaaaagcagctgagcaccatgagagtggatgtttgttccactgagaccctaaagtgtttgaaagacaagaccgggggcaagaagttcagtaaagaattcgaggaagctagctccaagctcgaggagtttgttaacgggctcgacaaacaagttaagaatggcccttccttgaccgaggccttggagaatgctggcatattttatgaagcacagtacaaggaggtgaaagtggtcgccaacgcatataaaacattcgctaacagggtgaacaacctgaaaaagaagctcgatcaattgaaatcaacactgcccgaccccgaagagtcgccagtgccctccccctccatggatgctccttcgcccaccggctcagaatcccccttccagggtatggggggcgaggaaagtcagtcacctaccatggaatcagagaagtcagctactccagaaccagtgactgataaccgggatgtggaagacatggaactgagcgatgtggaggatgatggttctaaaatcatcgtggaggatagaaaagagaaaccagcagagaagtccgctgtgtccacttcagtgccaactaagcccacagagaacatatctaaggcttctagctgcacccccgtccctgttacaatgactgccactccaccccttcccaaacccgttaacactagcctgtcgccctctcccgctcttgccctgccaaatctggccaatgtggaccttgccaagatcagctccatcctgtctagccttacctccgtgatgaagaataccggggtgagccccgcgtcaaggcctagtccgggaacacctacatctccttccaacctcacctctggcctgaaaaccccagcgcccgcaaccacgacctcccataaccccctagcaaatattttgtccaaagtggagataaccccggaaagcatactgtcagctctatctaaaacccaaacccaatccgctcctgcgttgcagggactttcgagtctgctccagagtgttaccggcaaccctgttccggccagcgaagccgcaagccaatccaccagcgcctccccagcgaacaccactgtctcaactattaaaggcaggaatctgccaagcagcgcccagccctttatccccaaatcctttaactatagcccaaacagttccacatcagaggtgtccagtacaagcgcctctaaggcttcaattggtcagtctcccgggctgccctcaacgacatttaagctcccaagtaattcactgggattcaccgcaacacacaatacttcccccgccgcacctcctaccgaagtaaccatctgccagagttcggaggtctccaagcccaagctggagagcgagtccacctctcccagcttggaaatgaaaatacacaatttcctgaaggggaacccaggattcagcggactcaatctgaatatcccaattctatctagcctcggctcctctgcccccagtgagtcccatccatcagatttccagagaggtcccacttccacctcaatcgacaacatcgacggaactccagtgcgagatgagcggagcggcacaccgacacaggacgagatgatggataagccaacctcatcaagtgtcgacactatgagtcttctctctaaaattataagtcctggatctagcaccccctccagcacacggagcccgcctcccgggagagacgagagctatcccagggagcttagcaactccgtatcaacctatcggcccttcggcctggggagtgagtctccatataaacagccttcggatgggatggaacgcccctcttccctgatggatagttcacaagagaagttctatccagatacctcgttccaggaagacgaagattacagagacttcgagtactcgggaccccctccttctgctatgatgaacctcgagaaaaagcctgccaagtctatcctgaagagctccaagctgagcgacacaacagaatatcaacctattttgtcttcctacagtcatcgagcacaggagtttggggtgaagagcgcttttccccctagcgtgagagccttactcgacagctcagaaaattgcgaccgactgtcgtccagtcctggactctttggagcattttcagtccgtgggaacgagccaggctccgatcgctctccgtctccaaaacatccatgtagatcccatgggtctcctacacacgttcgcagaggggagagccccggactccaccacttccaccacgtggatgactag

SEQ ID NO: 112150 - DNA, 2805 bp, Artificial Sequence
  derived and/or modified sequence
atggctgccggaggcggaggcggttctagtaaggcctcaagttcaagtgccagtagcgccggagcactggagtcgtcgttggatagaaaattccaatccgttactaacacgatggagagcattcaaggactgagctcgtggtgcattgaaaacaagaaacaccacagcacaatcgtctatcattggatgaaatggctgcggagatccgcgtacccgcacaggcttaacttgttttatcttgcaaacgacgtcatccaaaactgtaaacgaaaaaacgccataatattccgggagtcatttgctgatgtcttaccagaagccgcagccctcgtgaaggatccctccgtgtcaaaatccgtagagaggatatttaaaatatgggaagacaggaatgtgtatccagaagagatgatcgtcgcactacgggaagccctaacgtccactaatccaaaagcggcactcaagagcaagatagtggcagaattccgatcccaagccctgatagaagagctgctgttgtacaagcggtctgaggatcagatagagctgaaagagaagcagctctctactatgcgcgttgacgtatgcagtacagagacactcaaatgcttgaaggacaagacgggaggaaagaaattttccaaagagttcgaggaggcatcctccaagttagaagagttcgttaacggtttggacaagcaggttaaaaacgggccttccttaaccgaggccctggagaacgcaggcattttctatgaggcccaatacaaggaggtgaaggtggtcgccaatgcctataaaactttcgccaacagagtcaataacctgaaaaaaaaactggaccagctcaagagcactctccctgatcctgaggagtcacctgtgccaagtcccagtatggacgcccctagtccgactggatctgagtcaccattccaaggcatggggggtgaggagagccaatctcctactatggagagtgagaaatccgcgactccagaaccagttactgacaacagggacgtggaagatatggagttaagtgacgttgaggatgatggatccaagattatcgtggaagatcggaaagaaaagcccgcagaaaaatctgctgtatctacgtcagtacctaccaaacccaccgagaacatttccaaggcatcatcctgtacaccggtgcccgtgaccatgacggctactcctcccctgccaaaaccggtaaatacgagtctctccccatcacctgcattagcccttcctaacttggctaacgtggatctcgctaaaatcagtagtatcctgagttcactcacttcagtgatgaaaaacactggggtgtcgccagcatctaggccttctcccggtacgccgacctctccttctaacctgacatccggcctaaaaactccagctcctgccaccactacatctcacaacccacttgccaacatcctgtcaaaagttgagattactcccgaaagtatcctctccgcactctctaagacgcagacacagtcagctcctgctctgcaagggctgagcagccttttgcagtccgtaactggcaatcctgtgcctgcctcggaagccgcaagtcagagcacatcagctagccctgcaaataccactgtgtctacgatcaaagggcgaaatctgccgtcctccgctcaacccttcattccgaagagctttaactactctccaaacagttccacaagcgaggtcagcagcacgagtgcgtccaaggccagcatcggccagagcccgggtctcccttcaacgacctttaagctgccctctaactctctggggtttaccgcaacacataatacatcccctgctgctccacctaccgaggtgacgatttgtcaaagcagcgaggttagcaaaccgaaactcgaaagcgaatccaccagccccagcctggagatgaaaatccataatttccttaaaggaaaccccggtttcagtggactcaatcttaatatacctatattgagcagtttgggctcctcagcaccaagcgaatcgcaccctagcgacttccagagaggacctacttccacaagcatcgacaacatagatggcaccccagtgcgggatgagcggtcgggcacccccactcaagatgagatgatggacaaacccacttcttcgagcgtggacacaatgtcacttctctctaaaattattagcccgggatcgtctacccccagctccactcggtcaccaccacctggacgagatgagagctatccacgggagctttcaaattccgtttcaacatatcgcccttttggtttggggagtgagagtccctacaagcagccatccgacgggatggaaaggccaagctccttgatggacagcagccaagagaagttctatcccgacaccagcttccaggaggatgaagactatagggatttcgaatacagcggtccccctccttctgcaatgatgaatttggagaagaaacccgctaaatcgattttgaagagtagcaaactaagcgacacgactgaataccagccaatcctttccagttattcccaccgggctcaggagtttggagtaaaatcagccttcccaccgtcagttagggccctgctggatagtagcgagaactgcgacagactgagctcatcacccggtctctttggtgcgttctctgttaggggtaacgaaccagggagcgatcggtcacctagccctaagcatccctgtcgctcgcatggaagccccactcacgtgcggcgtggcgagagtccgggtctacaccattttcaccatgtggatgattag

SEQ ID NO: 112151 - DNA, 2899 bp, Artificial Sequence
  derived and/or modified sequence
agcgcttgtgcaaaccgggaagatggcggccggcggcggcggaggcagcagtaaggcctcctcctcgtcggcctcttcggcaggggctctggagtcctcgttggatcgaaaattccagtcggtaaccaacaccatggagtccattcaaggcttgtcgtcttggtgtatagagaacaaaaaacaccacagtactatcgtctatcattggatgaagtggctccggagatctgcatatccccaccgtttgaatctcttttaccttgccaatgatgtcatacagaactgtaaaaggaaaaatgcaatcatattccgtgaatcatttgctgatgtacttcctgaagcagctgctctagtgaaggatccatctgtctctaagtctgtagaacgaatctttaaaatctgggaagatagaaatgtatacccagaagaaatgattgtggcattgagagaagctttgacatctacaaatccaaaagctgctctcaagtctaagatagttgctgaatttcgatctcaggccctaattgaagagctgttgctatacaagcgctcagaagatcagatagaactgaaggaaaagcagttgtcaactatgagggtggatgtgtgcagcacagaaactctcaaatgcttaaaagataaaacaggtgggaagaagttctccaaagaatttgaagaggcaagctccaagctggaagaatttgtgaatggattagataagcaggtgaaaaacggaccctcattaacagaagcactggaaaatgctggaattttctatgaagcacaatacaaagaagtaaaagtggtggctaatgcatataaaacctttgctaaccgagtaaacaatttaaagaagaagttggatcaattgaagtcaacccttccagatcctgaagaatcaccagttccttccccaagcatggacgctccctccccgactggttctgagtctccttttcagggaatgggaggtgaggaatcccagtcaccaaccatggagagtgagaaatctgccacacctgaacctgtgacagataatcgtgatgtggaagacatggaactctcagatgtggaagatgatgggtcaaaaatcattgtcgaggacaggaaggaaaaacctgcagagaagtcagctgtatccacttctgtacctacaaagccaacagaaaatatctcaaaggcctcttcatgtaccccagtgcctgtgaccatgacagcaactccacctcttccaaagcctgtgaatacttctctttccccttccccagcattggctttgccaaacctggctaatgtggatctggcaaagatcagttccatccttagcagtttaacatcagtcatgaaaaatactggggtcagtcctgcatcaagaccttctccaggaacgcccaccagccccagcaacctcaccagtggcctgaaaacacctgcacctgccacgacaacatctcacaaccctctggcaaatatcctctccaaggtggagatcaccccagagagcattctgtctgcactttccaaaacccagacacagtcagcccctgcactgcaaggcctgtcatctttacttcagagtgttactgggaacccagttccagccagtgaagctgcctcacagagcacttcagcctcccctgccaacaccacagtctctaccataaagggaagaaatctgccctccagtgcccaaccttttattcccaaaagcttcaactattctcctaactcatcaacttctgaagtctcttcaacttcagccagcaaggcctcaattgggcaaagcccagggctcccaagcactacttttaaactaccttccaactctttggggtttacagctacccacaatactagccctgctgccccacctactgaagttaccatctgccaatcttcagaggtctccaagccaaagctggagtcagagtccacctccccaagcctggaaatgaagattcacaacttcttaaaaggtaatcctggtttcagtggcttaaacttaaacatcccaatcctgagcagtttggggtccagcgccccatcagagagccatccctcagacttccagcgtggccctactagcacctcaatcgacaacattgatggaacccctgtacgggatgaacggagtgggacacccacccaggatgagatgatggacaagcccacatccagcagtgtagatactatgtccctgctttctaagatcattagccctggttcctcaacacccagcagtacaagatcaccaccccctgggagagatgaaagctacccccgagagctctccaattctgtatctacatatcgaccctttggtctgggcagtgaatctccctataagcagccttctgatggaatggagagaccatcttccctgatggactcttcacaggaaaagttctacccagatacttctttccaagaagatgaggattaccgagattttgagtattcagggcctccaccctctgccatgatgaacctagagaagaaaccagccaaatctatcctgaaatcaagcaagctgtctgataccaccgagtaccagccaattctgtccagttatagccacagagcccaagaatttggggtaaagtctgccttccctccatctgtaagggccctcctggactctagtgagaactgtgaccgtctctcatcttcccctgggctatttggtgccttcagcgtaagagggaatgaacctgggtctgaccggtcaccatcaccgaaacacccttgccgctcccacgggtcacccacccacgtcaggcgtggagaaagtcctggcctccaccatttccaccacgtcgacgattgaatttaagaatatgcttaaaaacgcctcacgtaagccctcagatgataagcattttggccaggctcccagcaa

SEQ ID NO: 112152 - protein, 1435 aa, Artificial Sequence
  derived and/or modified sequence
MAAGGGGGSSKASSSSASSAGALESSLDRKFQSVTNTMESIQGLSSWCIENKKHHSTIVYHWMKWLRRSAYPHRLNLFYLANDVIQNCKRKNAIIFRESFADVLPEAAALVKDPSVSKSVERIFKIWEDRNVYPEEMIVALREALTSTNPKAALKSKIVAEFRSQALIEELLLYKRSEDQIELKEKQLSTMRVDVCSTETLKCLKDKTGGKKFSKEFEEASSKLEEFVNGLDKQVKNGPSLTEALENAGIFYEAQYKEVKVVANAYKTFANRVNNLKKKLDQLKSTLPDPEESPVPSPSMDAPSPTGSESPFQGMGGEESQSPTMESEKSATPEPVTDNRDVEDMELSDVEDDGSKIIVEDRKEKPAEKSAVSTSVPTKPTENISKASSCTPVPVTMTATPPLPKPVNTSLSPSPALALPNLANVDLAKISSILSSLTSVMKNTGVSPASRPSPGTPTSPSNLTSGLKTPAPATTTSHNPLANILSKVEITPESILSALSKTQTQSAPALQGLSSLLQSVTGNPVPASEAASQSTSASPANTTVSTIKGRNLPSSAQPFIPKSFNYSPNSSTSEVSSTSASKASIGQSPGLPSTTFKLPSNSLGFTATHNTSPAAPPTEVTICQSSEVSKPKLESESTSPSLEMKIHNFLKGNPGFSGLNLNIPILSSLGSSAPSESHPSDFQRGPTSTSIDNIDGTPVRDERSGTPTQDEMMDKPTSSSVDTMSLLSKIISPGSSTPSSTRSPPPGRDESYPRELSNSVSTYRPFGLGSESPYKQPSDGMERPSSLMDSSQEKFYPDTSFQEDEDYRDFEYSGPPPSAMMNLEKKPAKSILKSSKLSDTTEYQPILSSYSHRAQEFGVKSAFPPSVRALLDSSENCDRLSSSPGLFGAFSVRGNEPGSDRSPSPSKNDSFFTPDSNHNSLSQSTTGHLSLPQKQYPDSPHPVPHRSLFSPQNTLAAPTGHPPTSGVEKVLASTISTTSTIEFKNMLKNASRKPSDDKHFGQAPSKGTPSDGVSLSNLTQPSLTATDQQQQEEHYRIETRVSSSCLDLPDSTEEKGAPIETLGYHSASNRRMSGEPIQTVESIRVPGKGNRGHGREASRVGWFDLSTSGSSFDNGPSSASELASLGGGGSGGLTGFKTAPYKERAPQFQESVGSFRSNSFNSTFEHHLPPSPLEHGTPFQREPVGPSSAPPVPPKDHGGIFSRDAPTHLPSVDLSNPFTKEAALAHAAPPPPPGEHSGIPFPTPPPPPPPGEHSSSGGSGVPFSTPPPPPPPVDHSGVVPFPAPPLAEHGVAGAVAVFPKDHSSLLQGTLAEHFGVLPGPRDHGGPTQRDLNGPGLSRVRESLTLPSHSLEHLGPPHGGGGGGGSNSSSGPPLGPSHRDTISRSGIILRSPRPDFRPREPFLSRDPFHSLKRPRPPFARGPPFFAPKRPFFPPRY

SEQ ID NO: 112153 - DNA, 4308 bp, Artificial Sequence
  derived and/or modified sequence
atggccgccggcggcggcggcggcagcagcaaggccagcagcagcagcgccagcagcgccggcgccctggagagcagcctggacagaaagttccagagcgtgaccaacaccatggagagcatccagggcctgagcagctggtgcatcgagaacaagaagcaccacagcaccatcgtgtaccactggatgaagtggctgagaagaagcgcctacccccacagactgaacctgttctacctggccaacgacgtgatccagaactgcaagagaaagaacgccatcatcttcagagagagcttcgccgacgtgctgcccgaggccgccgccctggtgaaggaccccagcgtgagcaagagcgtggagagaatcttcaagatctgggaggacagaaacgtgtaccccgaggagatgatcgtggccctgagagaggccctgaccagcaccaaccccaaggccgccctgaagagcaagatcgtggccgagttcagaagccaggccctgatcgaggagctgctgctgtacaagagaagcgaggaccagatcgagctgaaggagaagcagctgagcaccatgagagtggacgtgtgcagcaccgagaccctgaagtgcctgaaggacaagaccggcggcaagaagttcagcaaggagttcgaggaggccagcagcaagctggaggagttcgtgaacggcctggacaagcaggtgaagaacggccccagcctgaccgaggccctggagaacgccggcatcttctacgaggcccagtacaaggaggtgaaggtggtggccaacgcctacaagaccttcgccaacagagtgaacaacctgaagaagaagctggaccagctgaagagcaccctgcccgaccccgaggagagccccgtgcccagccccagcatggacgcccccagccccaccggcagcgagagccccttccagggcatgggcggcgaggagagccagagccccaccatggagagcgagaagagcgccacccccgagcccgtgaccgacaacagagacgtggaggacatggagctgagcgacgtggaggacgacggcagcaagatcatcgtggaggacagaaaggagaagcccgccgagaagagcgccgtgagcaccagcgtgcccaccaagcccaccgagaacatcagcaaggccagcagctgcacccccgtgcccgtgaccatgaccgccaccccccccctgcccaagcccgtgaacaccagcctgagccccagccccgccctggccctgcccaacctggccaacgtggacctggccaagatcagcagcatcctgagcagcctgaccagcgtgatgaagaacaccggcgtgagccccgccagcagacccagccccggcacccccaccagccccagcaacctgaccagcggcctgaagacccccgcccccgccaccaccaccagccacaaccccctggccaacatcctgagcaaggtggagatcacccccgagagcatcctgagcgccctgagcaagacccagacccagagcgcccccgccctgcagggcctgagcagcctgctgcagagcgtgaccggcaaccccgtgcccgccagcgaggccgccagccagagcaccagcgccagccccgccaacaccaccgtgagcaccatcaagggcagaaacctgcccagcagcgcccagcccttcatccccaagagcttcaactacagccccaacagcagcaccagcgaggtgagcagcaccagcgccagcaaggccagcatcggccagagccccggcctgcccagcaccaccttcaagctgcccagcaacagcctgggcttcaccgccacccacaacaccagccccgccgccccccccaccgaggtgaccatctgccagagcagcgaggtgagcaagcccaagctggagagcgagagcaccagccccagcctggagatgaagatccacaacttcctgaagggcaaccccggcttcagcggcctgaacctgaacatccccatcctgagcagcctgggcagcagcgcccccagcgagagccaccccagcgacttccagagaggccccaccagcaccagcatcgacaacatcgacggcacccccgtgagagacgagagaagcggcacccccacccaggacgagatgatggacaagcccaccagcagcagcgtggacaccatgagcctgctgagcaagatcatcagccccggcagcagcacccccagcagcaccagaagccccccccccggcagagacgagagctaccccagagagctgagcaacagcgtgagcacctacagacccttcggcctgggcagcgagagcccctacaagcagcccagcgacggcatggagagacccagcagcctgatggacagcagccaggagaagttctaccccgacaccagcttccaggaggacgaggactacagagacttcgagtacagcggccccccccccagcgccatgatgaacctggagaagaagcccgccaagagcatcctgaagagcagcaagctgagcgacaccaccgagtaccagcccatcctgagcagctacagccacagagcccaggagttcggcgtgaagagcgccttcccccccagcgtgagagccctgctggacagcagcgagaactgcgacagactgagcagcagccccggcctgttcggcgccttcagcgtgagaggcaacgagcccggcagcgacagaagccccagccccagcaagaacgacagcttcttcacccccgacagcaaccacaacagcctgagccagagcaccaccggccacctgagcctgccccagaagcagtaccccgacagcccccaccccgtgccccacagaagcctgttcagcccccagaacaccctggccgcccccaccggccacccccccaccagcggcgtggagaaggtgctggccagcaccatcagcaccaccagcaccatcgagttcaagaacatgctgaagaacgccagcagaaagcccagcgacgacaagcacttcggccaggcccccagcaagggcacccccagcgacggcgtgagcctgagcaacctgacccagcccagcctgaccgccaccgaccagcagcagcaggaggagcactacagaatcgagaccagagtgagcagcagctgcctggacctgcccgacagcaccgaggagaagggcgcccccatcgagaccctgggctaccacagcgccagcaacagaagaatgagcggcgagcccatccagaccgtggagagcatcagagtgcccggcaagggcaacagaggccacggcagagaggccagcagagtgggctggttcgacctgagcaccagcggcagcagcttcgacaacggccccagcagcgccagcgagctggccagcctgggcggcggcggcagcggcggcctgaccggcttcaagaccgccccctacaaggagagagccccccagttccaggagagcgtgggcagcttcagaagcaacagcttcaacagcaccttcgagcaccacctgccccccagccccctggagcacggcacccccttccagagagagcccgtgggccccagcagcgccccccccgtgccccccaaggaccacggcggcatcttcagcagagacgcccccacccacctgcccagcgtggacctgagcaaccccttcaccaaggaggccgccctggcccacgccgcccccccccccccccccggcgagcacagcggcatccccttccccacccccccccccccccccccccccggcgagcacagcagcagcggcggcagcggcgtgcccttcagcacccccccccccccccccccccccgtggaccacagcggcgtggtgcccttccccgccccccccctggccgagcacggcgtggccggcgccgtggccgtgttccccaaggaccacagcagcctgctgcagggcaccctggccgagcacttcggcgtgctgcccggccccagagaccacggcggccccacccagagagacctgaacggccccggcctgagcagagtgagagagagcctgaccctgcccagccacagcctggagcacctgggccccccccacggcggcggcggcggcggcggcagcaacagcagcagcggcccccccctgggccccagccacagagacaccatcagcagaagcggcatcatcctgagaagccccagacccgacttcagacccagagagcccttcctgagcagagaccccttccacagcctgaagagacccagaccccccttcgccagaggcccccccttcttcgcccccaagagacccttcttcccccccagatactag

SEQ ID NO: 112154 - DNA, 4308 bp, Artificial Sequence
  derived and/or modified sequence
atggcggcaggggggggaggtggaagctctaaggcttcttcttcaagcgcctcaagcgctggtgcattagagtcatctttggaccgaaaattccagagtgtaaccaatactatggaaagcatccagggcctgtccagctggtgcattgaaaacaaaaaacaccattccacaattgtttaccactggatgaaatggctaagacgctcggcctaccctcaccggctgaacctgttctacctcgccaatgacgtgatccagaattgtaagaggaaaaacgccattattttccgagagagtttcgctgatgtgctgcccgaagcagctgcgttggtgaaggaccccagcgtgagtaaatccgtggagcggatcttcaagatttgggaagaccggaatgtataccccgaagagatgattgtcgcactgagggaggctctgacaagtactaaccctaaggcagctctgaaaagcaagattgtggcagagtttagaagccaggccctcattgaggagctgctgctatataagcgctcagaagatcagatagagctgaaggagaagcagctctccaccatgcgagttgatgtgtgctccacagagaccttgaagtgtctgaaagacaagaccggtgggaagaagtttagtaaagagtttgaagaggcctcctccaagctggaggagttcgtgaatggtctggacaagcaggtcaagaatggcccttcactgactgaggctctcgaaaacgctggtattttctacgaggcccaatacaaagaggtgaaggtcgtggctaacgcatacaagacctttgctaaccgggtgaacaatctgaagaagaagctggaccagcttaagtccactctccctgatcccgaagaaagccccgtgccctcgccctccatggacgccccctctccgacaggttctgaatctcctttccaggggatgggtggtgaagagagccagtccccgacaatggagtccgagaaaagtgccacacctgagcctgtcacggacaacagggatgtcgaggacatggaactgtccgatgttgaagatgatgggagtaaaattatcgtcgaagaccgcaaggagaagcccgccgagaagagtgctgtgtcgaccagtgtccccacaaagccaacagaaaatattagtaaagcttcaagttgtactcccgtgcccgtcactatgactgccactccacctcttcctaaacccgtgaatacctcgttatctccaagcccagcactggcattacccaacctcgctaacgtggacctggccaaaatatccagcattctatcgtcactgactagcgtgatgaaaaacaccggtgtgagtccagcatccaggccatcaccaggaacacccacgtcacccagcaacctgacatctggcctgaaaacacccgccccagcgaccacaacatcgcacaatcccctggccaatatcctgtccaaggtggaaatcacacccgaatcaatcctgagtgctttgtctaaaacacaaactcaatccgcaccagcactccagggactcagcagcctactgcagtccgtgaccggcaaccccgtgccagctagcgaagctgcatcacagagtacaagcgcaagtccagcaaacaccacagtgagtacgattaagggccgaaacctacccagctcagcccaaccatttattccaaagagcttcaactactctcctaactcatctactagcgaagtctcatcaaccagtgcctctaaagcctctatagggcaatctcctggtctccctagcacgactttcaagctgcctagtaactctcttgggttcacagcaacacataatactagccccgccgcacctcccaccgaagtgaccatctgccagtcatccgaggtttctaagcccaaactggaatctgagagcacaagtccatccctcgagatgaagatacataattttctgaagggaaaccctgggttcagcggcctgaatctcaatattcctattttgagtagccttggctcatccgccccgagtgagtcccatccctcagattttcagcgaggacctaccagtacgtctatagataacattgatggaacccccgtgcgggatgaaagaagtggtacacccactcaggacgagatgatggacaagccaaccagcagcagtgtggataccatgtccttactgtctaagatcattagccccggctcctccacaccttcaagcacaagatcccctccacctggtagagacgagtcgtatccacgggaactgtcaaatagtgtatcaacctacaggcctttcggattggggtcagaaagcccctataagcaacctagcgatggcatggaaagaccttcatcattgatggactcctctcaagagaagttttatccagacacttcttttcaggaggacgaagattatagagacttcgagtactctggtccgcctcctagtgcaatgatgaatctggaaaagaagcccgcaaagtccatcttgaagagctccaagctctcagacactaccgagtaccagcccatactgagtagctattctcaccgcgcccaggagttcggggtgaagtcagctttcccacctagcgtgagggccctactagattcttcagagaattgtgacaggttgtctagctccccgggactgttcggcgcgttcagtgtccgggggaatgagcccggttcagacagatccccctctccttctaagaatgactccttctttaccccggactctaatcacaacagtctgtcacaatccaccacgggccacctgagtttgccacaaaaacaatatcctgattcaccacaccccgtgccccacagaagcctgttcagcccacagaacaccctcgctgcccccactggtcatcccccaacgtcgggagtagaaaaggtgctggccagcaccatctccacaactagcactattgaattcaagaacatgctcaagaatgccagtagaaagcccagcgacgacaaacactttggccaagctccttcaaaggggactccttcggacggagttagtctatcaaacttgacccaaccgtccttaaccgcaactgatcagcagcagcaggaggagcattatcgcatcgaaactcgagtaagctccagttgcctggacttgccggactccactgaggaaaaaggcgcccccatcgagaccctgggatatcactcagccagcaatcgtcggatgtcaggtgagcccattcagactgtggaatccattcgtgttcccggtaagggcaatcggggccacggtcgcgaggccagccgggtgggatggttcgacctcagcactagtggatctagcttcgacaatggaccttcctctgcctcagagctagcaagcctcggcggaggaggaagtggaggcctgactggtttcaaaacggctccatataaggagcgcgctccccagtttcaggagtccgttggcagttttaggagcaattcgtttaattcaacattcgaacaccacctcccccctagtccactcgaacacggaacaccatttcaacgtgaaccagttgggccctcttccgcacctcctgtccctcccaaggaccacggcggcatattttctcgcgatgccccaacacacctcccctctgtagacctgagtaacccatttacgaaagaagctgcgctggctcacgctgccccacctcctccccccggagaacacagcgggattccctttccaactccacctccacctccacccccaggcgaacatagcagttcagggggatcaggtgtgccgttttcaacaccccccccaccgcctccgcctgtggaccatagcggcgtggttcccttcccagcacctcctctggccgaacatggcgtggctggcgctgtcgctgtgtttccgaaggaccactcaagtctattgcagggaacactggcagagcacttcggggtactccccggccctcgggaccacgggggaccaacccagcgggaccttaacggaccaggcctttcccgtgttagggagagtctgaccctcccctcgcactctttggagcatcttgggcccccacatggcggaggtggcggtggtggctctaattcctcctctggacctccccttggcccaagccatagggacaccataagtagatctggtattatcttacgtagtccacggccagattttcggcccagagagccattcctgtcccgagacccattccacagcctgaaaaggcccaggccacctttcgcgcgaggtcctccgttctttgcccctaaaaggccttttttcccaccacgatattag

SEQ ID NO: 112155 - DNA, 4308 bp, Artificial Sequence
  derived and/or modified sequence
atggctgctgggggcggcggcggcagcagcaaggccagcagcagcagcgccagcagcgctggggccctggagagcagcctggacaggaagttccagagcgtgaccaacaccatggagagcatccagggcctgagctcctggtgcatcgagaacaagaagcaccacagcaccatcgtgtaccactggatgaagtggctgcggcgcagcgcctacccccaccggctgaacctcttctacctggccaatgatgtgatccagaactgcaagaggaagaatgccatcatcttccgggagagctttgctgatgtgctgcctgaggccgccgccctggtgaaggaccccagcgtgtccaagtctgtggagcgcatcttcaagatctgggaggacagaaatgtgtacccagaggagatgattgtggccctgcgggaggccctgaccagcaccaaccccaaggccgccctgaagagcaagatcgtggccgagttccgcagccaggccctgattgaggagctgctgctgtacaagaggtctgaggaccagatcgagctgaaggagaagcagctgagcaccatgagggtggatgtgtgcagcacagagaccctgaagtgcctgaaggacaagacaggaggcaagaagttcagcaaggagtttgaggaggccagcagcaagctggaggagtttgtgaatggcctggacaagcaggtgaagaatggccccagcctgacagaggccctggagaatgccggcatcttctatgaggcccagtacaaggaggtgaaggtggtggccaatgcctacaagacctttgccaacagagtgaacaacctgaagaagaagctggaccagctgaagagcaccctgcctgaccctgaggagagccctgtgcccagccccagcatggatgcccccagccccaccggcagcgagagccccttccagggcatgggcggggaggagagccagagccccaccatggagagcgagaagagcgccaccccagagcctgtgacagacaacagagatgtggaggacatggagctgagtgatgtggaggatgatggcagcaagatcatcgtggaggacaggaaggagaagccagctgagaagtctgctgtgtccacctctgtgcccaccaagcccacagagaacatcagcaaggccagcagctgcacccctgtgcctgtgaccatgacagccaccccacccctgcccaagcctgtgaacaccagcctgagccccagccctgccctggccctgcccaacctggccaacgtggacctggccaagatcagcagcatcctgagcagcctgacctctgtgatgaagaacacaggagtgtccccagccagccggcccagccctggcacccccaccagccccagcaacctgaccagcggcctgaagaccccagccccagccaccaccaccagccacaaccccctggccaacatcctgagcaaggtggagatcaccccagagagcatcctgagcgccctgagcaagacccagacccagagcgccccagccctgcagggcctgagcagcctgctgcagagcgtgactggaaatcctgtgcctgccagcgaggccgccagccagagcaccagcgccagccctgccaacaccaccgtgtccaccatcaagggcaggaacctgcccagcagcgcccagcccttcatccccaagagcttcaactacagccccaacagcagcaccagcgaggtgagcagcaccagcgccagcaaggccagcatcggccagagccctggcctgcccagcaccaccttcaagctgcccagcaacagcctgggcttcaccgccacccacaacaccagccctgctgccccacccacagaggtgaccatctgccagagcagcgaggtgtccaagcccaagctggagagcgagagcaccagccccagcctggagatgaagatccacaacttcctgaagggcaaccctggcttcagcggcctgaacctgaacatccccatcctgagcagcctgggcagcagcgcccccagcgagagccaccccagcgacttccagaggggccccaccagcaccagcattgacaacattgatggcacccctgtgagagatgagaggagcggcacccccacccaggatgagatgatggacaagcccaccagcagctctgtggacaccatgagcctgctgagcaagatcatcagccctggcagcagcacccccagcagcaccaggagccccccacctggaagagatgagagctacccccgggagctgagcaacagcgtgtccacctaccggcccttcggcctgggcagcgagagcccctacaagcagcccagtgatggcatggagcggcccagcagcctgatggacagcagccaggagaagttctacccagacaccagcttccaggaggatgaggactacagagactttgagtacagcggccccccacccagcgccatgatgaacctggagaagaagccagccaagagcatcctgaagagcagcaagctgagtgacaccacagagtaccagcccatcctgagcagctacagccaccgggcccaggagtttggagtgaagagcgccttcccccccagcgtgcgggccctgctggacagcagcgagaactgtgaccggctgagcagcagccctggcctgtttggagccttctctgtgagaggaaatgaacctggcagtgacaggagccccagccccagcaagaatgacagcttcttcaccccagacagcaaccacaacagcctgagccagagcaccaccggccacctgagcctgccccagaagcagtacccagacagcccccaccctgtgccccacaggagcctcttcagcccccagaacaccctggccgcccccaccggccacccccccaccagcggcgtggagaaggtgctggccagcaccatcagcaccaccagcaccatcgagttcaagaacatgctgaagaatgccagcaggaagcccagtgatgacaagcacttcggccaggcccccagcaagggcacccccagtgatggagtgtccctgagcaacctgacccagcccagcctgacagccacagaccagcagcagcaggaggagcactacagaattgagaccagggtgagcagcagctgcctggacctgcctgacagcacagaggagaagggggcccccatcgagaccctgggctaccacagcgccagcaacagaaggatgtctggagagcccatccagacagtggagagcatccgggtgcctgggaagggcaacagaggacatggccgggaggccagccgggtgggctggtttgacctgagcaccagcggcagcagctttgacaatggccccagcagcgccagcgagctggccagcctgggcggcggcggcagcggcggcctgaccggcttcaagacagccccctacaaggagcgggccccccagttccaggagagcgtgggcagcttccgcagcaacagcttcaacagcacctttgagcaccacctgccccccagccccctggagcacggcacccccttccagcgggagcctgtgggccccagcagcgcccctcctgtgccccccaaggaccatggaggcatcttcagcagagatgcccccacccacctgcccagcgtggacctgagcaaccccttcaccaaggaggccgccctggcccatgctgcccctcctcctcctcctggagagcacagcggcatccccttccccaccccacctcctcctcctcctcctggagagcacagcagcagcggcggcagcggcgtgcccttcagcaccccacctcctcctcctcctcctgtggaccacagcggcgtggtgcccttccctgccccacccctggccgagcacggcgtggccggggctgtggccgtgttccccaaggaccacagcagcctgctgcagggcaccctggccgagcactttggagtgctgcccggcccccgggaccatggaggccccacccagagggacctgaatggacctggcctgagccgggtgcgggagagcctgaccctgcccagccacagcctggagcacctgggcccccctcatggaggcggcggcggcggcggcagcaacagcagcagcggcccccccctgggccccagccaccgggacaccatcagccgcagcggcatcatcctgcggagccccaggccagacttccggccccgggagcccttcctgagccgggaccccttccacagcctgaagaggccccggcccccatttgcccggggcccccccttctttgcccccaagaggcccttcttccccccacgctactag

SEQ ID NO: 112156 - DNA, 4308 bp, Artificial Sequence
  derived and/or modified sequence
atggccgccggcggcggcggcggcagcagcaaggccagcagcagctctgcctcgagcgcaggcgcgctcgagtcttcccttgaccgcaagttccaaagcgtgacaaacactatggaaagtatccagggcctgtctagctggtgtattgagaacaaaaaacaccatagcaccattgtttatcactggatgaagtggttacgccgtagcgcctatccacaccgtttaaacctgttttacctcgccaacgatgtcatacagaattgtaaacgtaaaaatgctattatattccgggagtccttcgccgacgtcttgcccgaagccgctgcactcgtcaaggatccatctgtgtccaaaagcgtggagcgcatcttcaagatctgggaggataggaatgtgtatcctgaagagatgatagtggcgctgagggaagcacttacctccacaaaccccaaagccgctctaaaatccaagatcgtggccgagttcagatcccaggcactgattgaagagttactgttatacaagaggtccgaagaccagatcgaactcaaagagaagcagttgtctaccatgcgggtagacgtgtgcagtaccgagactcttaagtgtttgaaagacaagacagggggcaagaagttcagcaaagagtttgaggaggccagtagtaaactggaggaattcgtgaatgggttggataagcaggtaaagaatggaccttccctgacagaagctctcgaaaatgctggaatcttttacgaggcccagtacaaagaggtgaaagtcgtggcaaatgcgtataagaccttcgctaacagggtgaataacctcaagaagaaactggatcagctcaagtcgactctaccagaccccgaggaatcccctgtgccatcaccttccatggacgccccctcaccgaccggatccgaatccccgtttcagggaatggggggtgaggaatcccagtcccctaccatggagagtgaaaagtcagctacaccagagccagtcacggacaacagagacgttgaagacatggagctatccgacgttgaggacgacggtagcaagatcatcgtggaggatagaaaagaaaagcctgccgagaaaagcgcagtgtccacatccgtcccaaccaagcccacagagaatatttctaaggccagtagctgtacccccgtgccagtgacaatgacagccaccccaccgctgccaaagccagtaaacacttcactgtctcccagcccggccctcgccctccccaacctggccaacgtagacctcgcaaaaatttctagtatcctctcctccttgacaagcgtgatgaaaaacaccggcgtctcccccgcttctcgcccatcaccaggcaccccgaccagcccttccaacttaacatcaggccttaagacaccggcaccggcaaccactacatcccacaatcctttggctaatatcctgtcgaaagtggagattaccccagaaagcattctatccgcactgtcaaagacccagacccaatctgcccctgccctccagggcctcagctctctgctgcaatctgtgaccggcaatccagttccagcatccgaggccgcctcccaatccacgtctgcgtcccctgcaaacaccactgtctctaccataaaaggtcgcaacctgccttcttcggcacagccatttattcctaagtctttcaactactcaccgaattcctccaccagcgaagtgtcaagcacatccgcatctaaagcttctatcggccaatcacctggcttaccaagcactacatttaagctgccttcaaactctctaggctttactgcaacccacaacacttcacccgctgctcctccgacggaggttactatctgtcagtcaagcgaagtaagtaagccaaaactagaatcggaatccacatcacccagtcttgaaatgaagattcataatttcctgaagggcaatcctggatttagcggcctcaatctgaacatccccatactgtcaagtttagggtcaagcgcaccttccgaatctcacccttcagacttccaaagaggacctacttccacaagcattgacaatatagatggaacgcccgtaagagacgagcgctcaggaacacccacccaggatgagatgatggataagccaacttcttcgtccgtggacacaatgtccctgctcagtaaaataatcagtcccggttcttcaacccccagctctacccggtcccccccgccaggccgggatgagtcctatccgagagagctctccaattctgtatcaacatatcgcccttttggactcgggtcagaaagtccatacaaacagccaagcgacggcatggaaagaccttctagtctgatggattcctcccaggagaagttctatccagatacttcttttcaggaggatgaggactatcgagatttcgagtacagcgggccgccgcccagcgcaatgatgaacctggaaaaaaagcctgcgaaatcaatcctgaagtctagtaaattgtctgacacaacagagtaccagcctatcttgagctcttacagccatagggcccaggaatttggggtgaaaagcgcttttccccctagtgtgcgggcgctcctcgactcgtccgagaattgtgatagattgagcagctctccaggcctgttcggggcattttcagtgaggggtaatgaacccggttctgacagaagccctagcccatccaagaacgatagtttttttacccccgactccaatcataatagtttatcacagtccacaacgggccacctttctctgcctcagaaacaatatccagattcacctcatcctgtgcctcacagaagcctgtttagtccccagaatacactcgctgcccctactgggcacccaccaacaagtggcgttgagaaggtgctagcctctacgatctcgactacttcaaccatcgagttcaagaatatgctgaagaacgcctctaggaagccctctgatgacaagcactttggtcaggctccttcaaaagggacgcccagcgatggagtctccctctccaacttaactcagccaagccttaccgccacggatcagcagcagcaggaggaacactatagaattgagactcgcgtcagctccagttgtctggacctgcccgatagcactgaagaaaagggggctcccatcgaaacattgggataccatagtgcttctaatcggcgcatgagcggtgaacccatacaaaccgtggagagtatacgagtgccaggaaagggtaacagggggcatggacgcgaggcctcacgtgtaggctggttcgacttgtctacttcgggttccagtttcgataacggcccatctagtgcttccgagctagcctccctcggcgggggaggtagcggggggttgactggattcaagactgccccctataaagagagggctcctcagttccaggagtctgttggcagctttaggtctaacagcttcaattcaacattcgaacaccatctccctccaagccccctcgagcatggcactccctttcagcgggagccagtggggccatcgtctgcccctcctgttcctcccaaagatcacggcggcatattctcaagggacgcacccacccatctcccaagcgttgacctctccaacccatttacaaaagaggctgctcttgcacatgccgcccccccacccccaccgggtgagcattccgggattccattcccaacgccaccaccccctccacctccaggcgagcattcctccagcggaggtagcggcgtgcccttttccacaccccctcctccaccgccccctgtggatcattctggcgtagtgccattccccgcaccaccacttgctgagcacggggtggcgggagccgtggcggtgttcccgaaggaccattcttctctgctgcagggaactttagctgaacactttggcgtactgcccggacctcgtgatcacggcggccccacacaacgcgatttaaacgggcctggtcttagtcgggttcgcgagtctcttacccttcccagtcatagcttggagcacttgggcccccctcacggtggcggcggtgggggcggcagcaattctagctccgggcccccacttggcccttcacacagagacaccatctccagaagtggaattatcctgagatcaccaaggccggatttccggccaagagagccatttttatcacgtgatccctttcactctttgaaacgaccccgcccgcccttcgcaaggggtccacctttctttgctcctaagagaccctttttcccaccgcggtactag

SEQ ID NO: 112157 - DNA, 4308 bp, Artificial Sequence
  derived and/or modified sequence
atggctgcaggcggtggaggtgggtcatctaaggctagcagttcttctgcttcaagtgctggagctctagagagtagcctcgatcgaaaatttcaatctgtaacaaatactatggaaagcatccagggactgagtagttggtgcattgaaaacaaaaaacaccactcaacgatcgtgtatcactggatgaagtggctgcggcgttctgcatatccacaccggctgaacctcttttacttggccaatgatgtgattcagaattgtaagcgcaaaaacgcgattatctttagggaatcttttgctgacgttctcccggaagccgctgcacttgtgaaggacccctctgtcagcaaatcagtggagagaatttttaaaatctgggaagataggaacgtgtatcccgaggagatgatcgtggctctgcgcgaagcactgacttcaacaaatcctaaggccgcattaaagtcaaaaatagttgctgagttcagatcacaggccctgattgaggagctgctgctatataaacgtagtgaggaccagattgagcttaaggagaaacagctgagtaccatgagggtggacgtttgtagcacggagaccctaaaatgtttgaaagacaagacagggggaaagaagttctccaaagagttcgaggaagcctcttcaaagctggaagaatttgttaacggcctcgataagcaggtgaagaatgggccatcccttacggaagccctcgaaaacgccggaatcttctatgaggcccagtataaagaggttaaggtggtcgctaacgcatacaaaacgttcgcgaacagggtgaacaacctcaagaagaagctggaccagctgaagagtactctgcctgatccggaggagtcaccggtgccttcgccttcaatggacgctccatcaccaactggcagcgaatcaccgttccagggaatgggcggagaggaaagccagtcgccgaccatggaatccgagaaaagcgccacacccgaacccgttacagacaacagagatgtagaggatatggaactgtctgatgtggaagatgacggctcaaaaattattgtggaggaccgcaaagagaaacctgccgagaagtccgcggtgagcacttctgtgccaacgaaaccaactgaaaacatttctaaggcctctagctgcactcctgtgcctgtgaccatgacagccacccccccactgccgaagcctgttaatacatctctgagtccgtcaccggctctggccctccctaacctggcgaacgtggatcttgcaaagatatcaagcatattaagttcactaacgtctgtgatgaagaacaccggagtgtcacctgcctctcgtccttctccaggaacccctacaagccccagtaacctcacgtcaggtttaaagacacccgcaccggctacaacaacgtctcacaatccgctggccaacatcctctcaaaggtggagattacgcccgagagcattctgtccgctctgtccaagacccagactcagagcgctccagcactgcaaggcctatcatctcttctacagtctgtcactggcaaccctgtgccggcaagcgaggcagcctcgcagtctacgtccgcctcaccagcaaataccactgtcagtacaatcaagggcaggaatctgccatcatctgctcagccctttattcccaagtcctttaactattcgcctaattcttcaacttccgaagtgagttccacgagcgcctcaaaagctagcatcggccaatccccagggctgccatcaacgacgttcaagctaccctcgaacagcctggggtttaccgctacacataacacatctccggctgcccctcccactgaggtgactatctgccagagttcagaagtctctaagcccaaactggagtccgagagcacatccccctcgctagagatgaaaattcataactttcttaaggggaacccaggtttttccggcctgaaccttaatattccgatactcagtagcctgggatccagcgctccatctgaatcacacccttcagacttccagcgtggccctacctccacatcgatcgacaacattgacggcactccagtgagagacgagagatcgggaactcctactcaggacgagatgatggataagccgacgagttccagtgtcgacaccatgtccctgctgagtaagataatttctcccggtagtagtacaccgagctctacaaggtcaccgcctccaggtcgggacgaaagctatccgagagagctgagtaactctgtgagcacataccggcctttcggactgggttctgagtctccttacaagcagccgtctgatggaatggaacgcccatcgtcgctgatggattcctcccaggaaaaattctacccagacacctcattccaggaggacgaggattatagggattttgagtattctggtcccccacctagtgcaatgatgaatctagagaagaaacctgcaaagagcatcttgaagagtagtaaactgtctgatacaactgagtatcagccaattttgagctcttactctcaccgcgctcaggagtttggagttaaaagcgccttcccaccgtctgtgagggcgcttctggacagctctgagaattgtgacaggctaagcagtagtccagggttattcggcgcttttagcgtgagagggaatgagccaggaagcgacagatccccgagtccctccaaaaatgacagttttttcactccagattctaaccacaactctctctcacagagcaccacgggccacctgtccctgcctcagaaacagtatccggattcccctcatcccgttccccatcggtcgctgttctctccacagaataccttggccgctccaactggccaccctcctacatctggcgtcgaaaaggtcctcgcctcgactatctcaactacatctaccatcgagtttaagaatatgttaaaaaatgcatcccgtaagcctagcgacgacaaacacttcggacaggcgccatccaaaggcacgcctagcgacggggtctcactgagcaacctgacccaaccttcacttacagccaccgaccaacagcagcaggaggagcactaccgcatcgaaacaagagtgtccagtagctgcctcgaccttcccgactctacagaggaaaaaggagctcctattgagaccctcggctatcactctgcctccaaccggcgaatgagcggggaaccgatccaaactgtcgaaagcatcagggttcccggtaagggaaacaggggccacggcagggaagcaagccgcgtcggatggtttgacttgagcacctccggatccagcttcgataatggacctagctctgcttccgaactagcatcattgggtgggggtggctccggcggacttactggcttcaagactgccccttacaaggagagagcaccacaattccaggaaagcgttggttccttccgttctaactcattcaattctactttcgagcaccacctgccgccatcacctctggagcatggcaccccttttcagcgtgaacctgtcggcccatcaagcgctccaccggtgcctccaaaagaccatggcggaatctttagccgagacgcacccacacatctaccttcagtggatttgagcaacccatttaccaaagaggcagcacttgcccatgctgctccccctccgcctcccggtgagcatagtgggattccgtttcccacacctccaccccctccaccacccggagagcactcgtccagcggcggtagtggagtgccattttctacgcccccacctcctccgcctccagtggaccacagtggagttgtgccctttccagcacctcctcttgcagagcacggggtcgcgggtgccgtggcagtatttcccaaagatcactcatccctcctccagggaaccctcgctgaacactttggggttcttccgggaccgagagaccatggtggccctacacagcgcgatctcaatgggcctggactcagcagggtcagggagagcttaaccctgccttcacattcacttgaacatctgggaccccctcacggcggaggcggaggtggcggaagcaattctagcagcggccctccacttggaccctcccatcgagatacgatttcccgaagcgggattatcttaaggtcaccacggccagacttcaggccgagggagcctttcttatctcgcgatcctttccactctttgaagagacccagacctccgttcgcccgaggaccccctttcttcgctcccaagcggcctttttttcccccacgttattag

SEQ ID NO: 112158 - DNA, 7605 bp, Artificial Sequence
  derived and/or modified sequence
ccgctcccgccgccgccgccgccgccgccgccagaggagcagcagcgcttgtgcaaaccgggaagatggcggccggcggcggcggaggcagcagtaaggcctcctcctcgtcggcctcttcggcaggggctctggagtcctcgttggatcgaaaattccagtcggtaaccaacaccatggagtccattcaaggcttgtcgtcttggtgtatagagaacaaaaaacaccacagtactatcgtctatcattggatgaagtggctccggagatctgcatatccccaccgtttgaatctcttttaccttgccaatgatgtcatacagaactgtaaaaggaaaaatgcaatcatattccgtgaatcatttgctgatgtacttcctgaagcagctgctctagtgaaggatccatctgtctctaagtctgtagaacgaatctttaaaatctgggaagatagaaatgtatacccagaagaaatgattgtggcattgagagaagctttgacatctacaaatccaaaagctgctctcaagtctaagatagttgctgaatttcgatctcaggccctaattgaagagctgttgctatacaagcgctcagaagatcagatagaactgaaggaaaagcagttgtcaactatgagggtggatgtgtgcagcacagaaactctcaaatgcttaaaagataaaacaggtgggaagaagttctccaaagaatttgaagaggcaagctccaagctggaagaatttgtgaatggattagataagcaggtgaaaaacggaccctcattaacagaagcactggaaaatgctggaattttctatgaagcacaatacaaagaagtaaaagtggtggctaatgcatataaaacctttgctaaccgagtaaacaatttaaagaagaagttggatcaattgaagtcaacccttccagatcctgaagaatcaccagttccttccccaagcatggacgctccctccccgactggttctgagtctccttttcagggaatgggaggtgaggaatcccagtcaccaaccatggagagtgagaaatctgccacacctgaacctgtgacagataatcgtgatgtggaagacatggaactctcagatgtggaagatgatgggtcaaaaatcattgtcgaggacaggaaggaaaaacctgcagagaagtcagctgtatccacttctgtacctacaaagccaacagaaaatatctcaaaggcctcttcatgtaccccagtgcctgtgaccatgacagcaactccacctcttccaaagcctgtgaatacttctctttccccttccccagcattggctttgccaaacctggctaatgtggatctggcaaagatcagttccatccttagcagtttaacatcagtcatgaaaaatactggggtcagtcctgcatcaagaccttctccaggaacgcccaccagccccagcaacctcaccagtggcctgaaaacacctgcacctgccacgacaacatctcacaaccctctggcaaatatcctctccaaggtggagatcaccccagagagcattctgtctgcactttccaaaacccagacacagtcagcccctgcactgcaaggcctgtcatctttacttcagagtgttactgggaacccagttccagccagtgaagctgcctcacagagcacttcagcctcccctgccaacaccacagtctctaccataaagggaagaaatctgccctccagtgcccaaccttttattcccaaaagcttcaactattctcctaactcatcaacttctgaagtctcttcaacttcagccagcaaggcctcaattgggcaaagcccagggctcccaagcactacttttaaactaccttccaactctttggggtttacagctacccacaatactagccctgctgccccacctactgaagttaccatctgccaatcttcagaggtctccaagccaaagctggagtcagagtccacctccccaagcctggaaatgaagattcacaacttcttaaaaggtaatcctggtttcagtggcttaaacttaaacatcccaatcctgagcagtttggggtccagcgccccatcagagagccatccctcagacttccagcgtggccctactagcacctcaatcgacaacattgatggaacccctgtacgggatgaacggagtgggacacccacccaggatgagatgatggacaagcccacatccagcagtgtagatactatgtccctgctttctaagatcattagccctggttcctcaacacccagcagtacaagatcaccaccccctgggagagatgaaagctacccccgagagctctccaattctgtatctacatatcgaccctttggtctgggcagtgaatctccctataagcagccttctgatggaatggagagaccatcttccctgatggactcttcacaggaaaagttctacccagatacttctttccaagaagatgaggattaccgagattttgagtattcagggcctccaccctctgccatgatgaacctagagaagaaaccagccaaatctatcctgaaatcaagcaagctgtctgataccaccgagtaccagccaattctgtccagttatagccacagagcccaagaatttggggtaaagtctgccttccctccatctgtaagggccctcctggactctagtgagaactgtgaccgtctctcatcttcccctgggctatttggtgccttcagcgtaagagggaatgaacctgggtctgaccggtcaccatcaccgagtaagaatgattcatttttcacccctgactccaaccacaatagcttgtctcaatctaccactgggcatctcagtttgccacagaagcagtacccagactctcctcacccagtcccacatcgttcccttttctctccgcagaacacccttgccgctcccacgggtcacccacccacgtcaggcgtggagaaagtcctggcctccaccatttccaccacgtcgacgattgaatttaagaatatgcttaaaaacgcctcacgtaagccctcagatgataagcattttggccaggctcccagcaagggcactccaagtgatggtgtcagtctctcaaacctcacccaacccagcttgaccgccactgatcagcagcaacaagaagagcactaccgcatagaaacccgcgtctcctcctcctgcttagacttgcctgatagcacagaagaaaagggggcccctatagaaaccttgggttatcacagtgcatccaataggaggatgtcaggggagccgatccagaccgtagagtccatccgagttcctgggaagggaaatagaggacatgggcgtgaggcttcaagggtgggttggtttgatctgagcacatcaggtagctcttttgacaatggcccttcaagtgcctctgagttggcatcccttgggggtgggggcagcggaggcctcactggctttaaaacagcaccatacaaggaacgggcacctcaatttcaggagagtgtcggcagctttcgttccaacagtttcaactcaacatttgagcatcatcttcccccatcccccttggaacatgggacacccttccagagagagccagtggggccatcatctgccccacctgtccctcctaaggatcatggtggtatcttctctcgagatgcacccactcatctaccctctgtggatctttcgaaccccttcacaaaggaggcagccctggcccatgctgccccaccccctcctcctggagagcacagtggaattcctttccctaccccacctcctcctccccctcctggggaacatagcagcagtggtgggagtggtgtccccttttctactccaccccctcctccaccccctgttgaccactctggagttgtacccttcccagccccaccactggcagagcacggagtggcaggggctgtggcagtatttcccaaggaccatagttccctccttcaagggaccctggctgagcattttggggtactcccaggacccagggaccacgggggccccacccaacgggacctcaacggccctggccttagccgtgtacgagagagcctcaccctaccctcccattctctggaacacctgggcccaccccatggaggaggaggtgggggaggcagcaacagcagcagtggcccccccttgggtccctcacacagagacaccatcagccggagtggtataatcttacggagtccccggccagactttcggcctagggaaccttttctcagcagagacccatttcacagtttaaagagacccaggccaccttttgctaggggccctccgttctttgcaccaaaacgcccattcttccctcccaggtactgatggaaaccaagggaaaggcattttgaacagtctagagaacattggaagtaggagtttggtttattgttgttgtttttatttgttttctctttctcgattttttttttattataacaaagggcctctcttccaaagtaagaaatcacatacgcttacgttttactattcaattcaatcctccctcccattgcacttatctaccttccccaagttgtttgtattaaaaaaaaaaaaaaaaaaaaaaagtaaagaaacacaaccaaagccatttcatttggctggggggttggggagtggggaggaaaacaatctttattttaccccatctattgaagagtattattacatttgaaataaaacttccatcagtacagataaccacatgtgcaatgttgggatgttattttgggcttggcttatcgagtagtcaatggaaggattcccgtcccctctctcggcagcttagtaactgctgtagccagctcggctcccttccctgtgtatctgtgtcctgctaacagccaagagatgttgcaagggaggaaatgtgagagaccttgaacctgtcaggtttatttgttttgtttttaaaggcatgttgaagtttagttctttacccttctcctaaaatctttttttaatcagcctcaaggttaaaataaggagtgactacagtatgtaaaataaggaaaggaagcattaatggtgtgatgtgacctgcctgtttttttgtaaacaagagaataggaaatgttttcaaggtagtttcacatgtcttgcaccaagctcatgcctcttgcttttcctttttgactttatctccctcagtttttcttctgctgtggccagaaagacagtcactacagttgactattgatacaaaggtgcaacagaaatattatccctgcatttttaaatataagaagtagacattaattttaccatggtgcctccctaatgtaagtgatatttattggtggttttcaacaaaggttaactattaaagaaagaaatatttgtctttatcttccttttccccttgcctcagtcgtgttattcacccctattcttgatattttaaaggaggagattcagtagcattttcctttatattatacacatgtgtctatcccatttcaaggctcaagtcttacccccacctctcgctcccaataggaaataaagaccatttctgcccttagttgttttacatgcaagataagtgctttccttctccctggactgaaagacttgtttgtatttctacatctagtacttgggaaatagacaatcactgtactttgagtgtttatatctttatatctagggacactgaaaagtaaatgttgctttactacaatttttttttaatttagtgtcttaccccaaggcatactcaactgataatctccagctagatgagtaaaacagtatgtgtttagttttccagagaattctggcaagtttcatattttcttccaagttagtatagaactaactataggaagtatggggttgctttttcctccagtagaatattaaagatgggggagggtgggcaatgtagtgacagaaaatgattctctcagaatgaacttttcagagaaagagcagcataaaccaggtgcacatcatgatttgggagtttttgcgtaatttattctgttatttatttgggctcgccatgtgttctggggttaggatgctgcaggtcattcatcttcttaatgcctgtctggtcttaagccaactgttctttctttcctcgaccctctctgccctgtagctctccccacaaaaatgcatgataccatgaccttacgtgtgggatggggtatgtagtgtagcaaagaaaagaaagtatagttatattgagtcctaagacatttgttagggaaaagcataagagaaaatggggtgggaggtggggaaatgatatttgactttcaaaattgaaataggttttttttttgcagaaattaaatgggatgtttttcattctagaataaaagaatgtgaattctctttgctgctcttgtttaagctaaaagtagtgtttacttgataaggctctctgaccatttaatttttatcagaaaatgtggggatgtcaggaaagtggcttcctgaacgttggggcgggataattgtcctcaaaagtatgatggttaatacatgaaaggaagactttgttggacagtttcgaaggtgggcttttaaggagttgggtttttgtggggtacttttttgttttttaagccacaaaatcctcaatatgtttgttttaggatggaagtgaggatttgtatgagactgtcagctattaattttaaggaaatcttaaaatttacatttacatcagtaaatgaagatgacagtgtgtatatatgtgataaatagtgaaacagaaaagacagttctggtattcataacgtgaaagaaaggggttttattctttctgtgtctgtgatttaaaactccgtgaccatgctctgacttttgtatttcaacctgagtttaaacaaataaacaagatattttttaaagaaagcataacatagtgtgtcttagcaaggacatgattcatatggaagcagaatgtgagaagttgtaaggtccttggtactcactgtaaaatcacagacagagaattggtaggggttgtgaatacactagtaccacttaaagttcagtgatacagttcagaaatagggtccttaagtattttgaaagagtttactcttcagtcagcttagatgagagctctctccctgctcccctctaccctctcaaaagttgagagtaaatagaatttggtttgattccagggaggggaaaataagcagagaataggacttttatactttccaataccaggaataaaatgtttgtgatatatatgggtccagcaaacctatcgagataatgtgaatacgataaacttcctaatggcaggatattcactctcaatcctgaagttaccggttcctgcagaattgagcttcagctgttactgttttgaagccgctgtaaattactgctttccccagttcccccactattttttttaagtgggcgggggcgcctgttaagatctaaaatagatatgttggattgatattctcacgtgttcggtgtggaaaacaaaacaagtacatgctttagaagcaacaacaatgaaatccttttgaaatgtgtgttaatatcgtttaataaaataactagtttgaaa

SEQ ID NO: 112159 - protein, 289 aa, Artificial Sequence
  derived and/or modified sequence
MSVDPACPQSLPCFEASDCKESSPMPVICGPEENYPSLQMSSAEMPHTETVSPLPSSMDLLIQDSPDSSTSPKGKQPTSAEKSVAKKEDKVPVKKQKTRTVFSSTQLCVLNDRFQRQKYLSLQQMQELSNILNLSYKQVKTWFQNQRMKSKRWQKNNWPKNSNGVTQGCLVNPTGNLPMWSNQTWNNSTWSNQTQNIQSWSNHSWNTQTWCTQSWNNQAWNSPFYNCGEESLQSCMQFQPNSPASDLEAALEAAGEGLNVIQQTTRYFSTPQTMDLFLNYSMNMQPEDV

SEQ ID NO: 112160 - protein, 232 aa, Artificial Sequence
  derived and/or modified sequence
MDLPIQDSHDSSTSPKGKQPTTAEKSATKKEDKVPVKKQKTRTVFSSTQLCVLNDRFQRQKYLSLQQMQELSNILNLSYKQVKTWFQNQRMKSKRWQKNNWLKNSNGVTQGCLVNPTGNLPMWSNQTWNNSTWSNQTQNIQSWSNHSWNTQTWCTQSWNNQAWNSPFYNCGEESLQSCMQFQPNSPASDLEAALEAAGEGLNVIQQTTRYFNTPQTMDLFLNYSMNMQPEDV

SEQ ID NO: 112161 - DNA, 870 bp, Artificial Sequence
  derived and/or modified sequence
atgagtgttgatcctgcttgcccacagtcccttccctgcttcgaggccagtgactgtaaggagtctagccctatgccagttatctgtggcccagaggaaaactatccgagccttcagatgtcttcagctgagatgccccataccgaaactgtgagccctctgccgagctccatggatcttctgattcaggactctccagacagctcaactagccccaagggaaagcagcccacttcggccgagaaatcagtagctaagaaagaagataaggtcccggtcaagaaacagaaaacaaggactgtgtttagcagtactcaactttgcgttttgaacgaccgctttcaaaggcagaaatatctgtctctacagcagatgcaggaactctccaatatcctgaatctgtcctataagcaggtaaagacctggttccaaaaccagagaatgaagtctaaacgctggcagaagaataactggccaaagaacagcaatggcgtcacacagggctgtctggttaatccgaccgggaatctccccatgtggagcaatcagacatggaataatagcacctggtctaaccagacccagaacattcaatcctggtctaatcactcttggaatacacagacgtggtgcacccagtcttggaacaaccaagcttggaacagccctttctataactgtggcgaggaatccctgcagtcctgcatgcaattccagccaaatagtcccgcttcagatctggaggccgctttagaggctgcaggcgaaggcctgaatgtcatacagcagactacccgctacttcagcacaccccagacgatggatctctttctgaattactccatgaacatgcaacctgaggacgtgtag

SEQ ID NO: 112162 - DNA, 870 bp, Artificial Sequence
  derived and/or modified sequence
atgagtgtggatccagcttgtccccaaagcttgccttgctttgaagcatccgactgtaaagaatcttcacctatgcctgtgatttgtgggcctgaagaaaactatccatccttgcaaatgtcttctgctgagatgcctcacacggagactgtctctcctcttccttcctccatggatctgcttattcaggacagccctgattcttccaccagtcccaaaggcaaacaacccacttctgcagagaagagtgtcgcaaaaaaggaagacaaggtcccggtcaagaaacagaagaccagaactgtgttctcttccacccagctgtgtgtactcaatgatagatttcagagacagaaatacctcagcctccagcagatgcaagaactctccaacatcctgaacctcagctacaaacaggtgaagacctggttccagaaccagagaatgaaatctaagaggtggcagaaaaacaactggccgaagaatagcaatggtgtgacgcagggatgcctggtgaacccgactgggaaccttccaatgtggagcaaccagacctggaacaattcaacctggagcaaccagacccagaacatccagtcctggagcaaccactcctggaacactcagacctggtgcacccaatcctggaacaatcaggcctggaacagtcccttctataactgtggagaggaatctctgcagtcctgcatgcagttccagccaaattctcctgccagtgacttggaggctgccttggaagctgctggggaaggccttaatgtaatacagcagaccactaggtattttagtactccacaaaccatggatttattcctaaactactccatgaacatgcaacctgaagacgtgtga

SEQ ID NO: 112163 - DNA, 870 bp, Artificial Sequence
  derived and/or modified sequence
atgtctgtggaccctgcctgcccccagagcctgccctgctttgaggccagtgactgcaaggagagcagccccatgcctgtgatctgtggccctgaggagaactaccccagcctgcagatgagcagcgctgagatgccccacacagagaccgtgagccccctgcccagctccatggacctgctgatccaggacagcccagacagcagcaccagccccaagggcaagcagcccaccagcgctgagaagtctgtggccaagaaggaggacaaggtgcctgtgaagaagcagaagaccaggacagtgttcagcagcacccagctgtgtgtgctgaatgaccgcttccagaggcagaagtacctgagcctgcagcagatgcaggagctgagcaacatcctgaacctgagctacaagcaggtgaagacctggttccagaaccagaggatgaagagcaagcgctggcagaagaacaactggcccaagaacagcaatggagtgacccagggctgcctggtgaaccccaccggcaacctgcccatgtggagcaaccagacctggaacaacagcacctggagcaaccagacccagaacatccagagctggagcaaccacagctggaacacccagacctggtgcacccagagctggaacaaccaggcctggaacagccccttctacaactgtggggaggagagcctgcagagctgcatgcagttccagcccaacagccctgccagtgacctggaggccgccctggaggccgccggggagggcctgaatgtcatccagcagaccacccgctacttcagcaccccccagaccatggacctcttcctgaactacagcatgaacatgcagccagaagatgtgtag

SEQ ID NO: 112164 - DNA, 870 bp, Artificial Sequence
  derived and/or modified sequence
atgagcgtggaccccgcctgcccccagagcctgccctgcttcgaggcctccgattgtaaagaatctagtcccatgcctgtcatctgcggccccgaagagaattacccatcattgcaaatgagttcagccgaaatgccccatacagaaaccgtatctcccttgccctcctcaatggatctgctcatccaggattctccagactcgagtactagccccaagggaaagcagccaacctccgccgagaaaagtgtggccaaaaaggaagataaggtccccgtcaaaaagcaaaaaactcgaaccgtgttttcatccactcagctctgcgttctgaacgacaggtttcagcggcagaaatacctaagtcttcagcagatgcaggagttgtctaatattttgaatctctcatacaaacaagtaaagacgtggtttcagaaccagcgtatgaaaagtaagcgttggcagaaaaacaactggcctaagaactctaacggagttacacaagggtgtctcgtgaaccccaccggcaacctgcccatgtggtcaaatcagacttggaacaattctacttggagtaatcagacacaaaacatacagtcgtggtccaatcacagttggaacacccagacatggtgtacacagtcctggaataaccaagcttggaacagtcccttttataactgcggcgaagagtcactgcagagttgtatgcagttccagcctaattcccccgctagcgatttggaggccgctctggaggccgctggggaggggttgaacgtcattcagcagacaacaaggtatttttcaactccccaaaccatggatctgtttctgaactattcaatgaatatgcaaccagaagatgtttag

SEQ ID NO: 112165 - DNA, 870 bp, Artificial Sequence
  derived and/or modified sequence
atgagcgtggaccccgcttgcccgcagagcctgccctgctttgaggccagcgattgtaaggagtcttccccaatgccagtgatctgcggcccagaagagaattacccttctctccaaatgtccagtgcagaaatgccccatacagagaccgtgagccccctaccttcaagcatggatctactgattcaggactcacccgacagttccacctcgcccaagggtaagcagcccacgagtgccgagaagagtgtagcaaaaaaggaggataaagtacccgtaaagaagcagaagactcgcaccgtgttctcatctactcagctctgcgtcctcaatgaccgtttccagcgccaaaagtacctgtccctgcaacagatgcaggagctcagcaacattcttaatctgtcatataagcaggtgaagacgtggttccaaaaccagcgtatgaagtccaagagatggcagaaaaataactggcccaagaactccaatggagtgactcaggggtgcctggttaatccaactggcaatttgcctatgtggtccaatcaaacttggaacaatagcacctggtctaatcagacccagaatatccagtcctggtccaatcactcttggaacacccagacatggtgtacgcagagttggaacaaccaggcttggaactcaccattttacaactgtggcgaagaatccttgcaaagctgcatgcagttccaacctaacagcccagctagtgacctggaggcagccctcgaggcggctggtgaaggtctgaacgtgatccaacaaaccactcgatacttctccacaccacagacaatggacctgttcctcaactattctatgaatatgcaaccagaagacgtgtag

SEQ ID NO: 112166 - DNA, 870 bp, Artificial Sequence
  derived and/or modified sequence
atgagcgtggaccccgcctgcccccagagcctgccctgcttcgaggccagcgactgcaaggagagcagccccatgcccgtgatctgcggccccgaggagaactaccccagcctgcagatgagcagcgccgagatgccccacaccgagaccgtgagccccctgcccagcagcatggacctgctgatccaggacagccccgacagcagcaccagccccaagggcaagcagcccaccagcgccgagaagagcgtggccaagaaggaggacaaggtgcccgtgaagaagcagaagaccagaaccgtgttcagcagcacccagctgtgcgtgctgaacgacagattccagagacagaagtacctgagcctgcagcagatgcaggagctgagcaacatcctgaacctgagctacaagcaggtgaagacctggttccagaaccagagaatgaagagcaagagatggcagaagaacaactggcccaagaacagcaacggcgtgacccagggctgcctggtgaaccccaccggcaacctgcccatgtggagcaaccagacctggaacaacagcacctggagcaaccagacccagaacatccagagctggagcaaccacagctggaacacccagacctggtgcacccagagctggaacaaccaggcctggaacagccccttctacaactgcggcgaggagagcctgcagagctgcatgcagttccagcccaacagccccgccagcgacctggaggccgccctggaggccgccggcgagggcctgaacgtgatccagcagaccaccagatacttcagcaccccccagaccatggacctgttcctgaactacagcatgaacatgcagcccgaggacgtgtag

SEQ ID NO: 112167 - DNA, 699 bp, Artificial Sequence
  derived and/or modified sequence
atggacctgcccatccaggacagccacgacagcagcaccagccccaagggcaagcagcccaccaccgccgagaagagcgccaccaagaaggaggacaaggtgcccgtgaagaagcagaagaccagaaccgtgttcagcagcacccagctgtgcgtgctgaacgacagattccagagacagaagtacctgagcctgcagcagatgcaggagctgagcaacatcctgaacctgagctacaagcaggtgaagacctggttccagaaccagagaatgaagagcaagagatggcagaagaacaactggctgaagaacagcaacggcgtgacccagggctgcctggtgaaccccaccggcaacctgcccatgtggagcaaccagacctggaacaacagcacctggagcaaccagacccagaacatccagagctggagcaaccacagctggaacacccagacctggtgcacccagagctggaacaaccaggcctggaacagccccttctacaactgcggcgaggagagcctgcagagctgcatgcagttccagcccaacagccccgccagcgacctggaggccgccctggaggccgccggcgagggcctgaacgtgatccagcagaccaccagatacttcaacaccccccagaccatggacctgttcctgaactacagcatgaacatgcagcccgaggacgtgtag

SEQ ID NO: 112168 - DNA, 699 bp, Artificial Sequence
  derived and/or modified sequence
atggatctgccaattcaggacagccacgacagttccacttcacccaaggggaaacagcctactaccgccgagaaatctgctacaaaaaaggaggacaaagtgccagtgaagaagcaaaagacccgaacagtgtttagttcaactcagctctgcgtcctgaatgatcgtttccagcgacagaaatatctgagtttacagcagatgcaggaattgtcgaacatactcaatttgtcgtataaacaagtaaaaacgtggtttcagaaccagcgcatgaaaagcaaacggtggcagaaaaacaattggctgaagaattctaacggcgtcacacaaggatgcctggtgaatcccacaggtaatttgcccatgtggagtaaccagacttggaacaactccacatggtctaaccaaacacagaacattcagtcatggtctaaccattcctggaatacccagacttggtgcactcagtcttggaacaaccaggcttggaacagtccattctataactgtggcgaagagtcccttcaatcatgcatgcaatttcagccgaattctcctgcctccgatctggaagcagccttggaagcggccggggagggacttaatgtaattcagcaaactacacgttacttcaacaccccccagaccatggatctttttctcaactattccatgaacatgcagccagaggatgtttag

SEQ ID NO: 112169 - DNA, 699 bp, Artificial Sequence
  derived and/or modified sequence
atggacctgcccatccaggacagccatgacagcagcaccagccccaagggcaagcagcccaccacagctgagaagagcgccaccaagaaggaggacaaggtgcctgtgaagaagcagaagaccaggacagtgttcagcagcacccagctgtgtgtgctgaatgaccgcttccagaggcagaagtacctgagcctgcagcagatgcaggagctgagcaacatcctgaacctgagctacaagcaggtgaagacctggttccagaaccagaggatgaagagcaagcgctggcagaagaacaactggctgaagaacagcaatggagtgacccagggctgcctggtgaaccccactggaaacctgcccatgtggagcaaccagacctggaacaacagcacctggagcaaccagacccagaacatccagagctggagcaaccacagctggaacacccagacctggtgcacccagagctggaacaaccaggcctggaacagccccttctacaactgtggggaggagagcctgcagagctgcatgcagttccagcccaacagccctgccagtgacctggaggccgccctggaggccgccggggagggcctgaatgtcatccagcagaccacccgctacttcaacaccccccagaccatggacctcttcctgaactacagcatgaacatgcagccagaagatgtgtag

SEQ ID NO: 112170 - DNA, 699 bp, Artificial Sequence
  derived and/or modified sequence
atggacctgcccatccaggacagccacgacagcagcaccagccccaaaggcaagcaaccaacgacagccgagaagagtgccaccaaaaaggaggacaaggtgccagtgaaaaaacaaaaaaccaggacggtgtttagttcaactcagctgtgtgtcctgaatgatcggtttcagaggcagaagtacctcagtttacaacagatgcaggaactgtcaaatattctaaacctgagttataaacaagtgaagacgtggttccagaatcagcgaatgaagtcaaagcgatggcagaagaacaactggctgaaaaattcaaatggcgtgacccaaggatgtcttgttaatcctactgggaacttgccaatgtggtccaatcagacatggaacaatagtacctggagtaaccaaacccaaaacatccagagttggagcaaccactcatggaatacccaaacttggtgtacccagagttggaataaccaggcatggaactcaccattctacaactgcggagaggagtccctgcagtcttgcatgcagttccagccgaacagccctgcatctgatttggaggcagcgctggaagcagccggcgaggggcttaatgttatccagcagacaacaagatattttaataccccacaaaccatggatctttttttgaactactctatgaacatgcagcctgaggatgtctag

SEQ ID NO: 112171 - DNA, 1954 bp, Artificial Sequence
  derived and/or modified sequence
gactttgaatggtccgttaatgtggttacaaaacgtgactcggttcatcgggagccctcctctctcctcttccttcctccatggatctgcctattcaggacagccatgattcttccaccagtcccaaaggcaaacaacccactactgcagagaagagtgccacaaaaaaggaagacaaggtcccggtcaagaaacagaagaccagaactgtgttctcttccacccagctgtgtgtactcaatgatagatttcagagacagaaatacctcagcctccagcagatgcaagaactttccaacatcctgaacctcagctacaaacaggtgaagacctggttccagaaccagagaatgaaatctaagaggtggcagaaaaacaactggctgaagaatagcaatggtgtgacgcagggatgcctggtgaacccgactgggaaccttccaatgtggagcaaccagacctggaacaattcaacctggagcaaccagacccagaacatccagtcctggagcaaccactcctggaacactcagacctggtgcacccaatcctggaacaatcaggcctggaacagtcccttctataactgtggagaggaatctctgcagtcctgcatgcagttccagccaaattctcctgccagtgacttggaggctgccttggaagctgctggggaaggccttaatgtaatacagcagaccactaggtattttaatactccacaaaccatggatttattcctaaactactccatgaacatgcaacctgaagacgtgtgaagatgagtgaaattgatgttactcagtttcagtctggacactggctgaatccttcctctcccctcctcccatccctcataggatttttcttgtatggaaactacgtgttctggtttccatgatgcctatccagtcaatctcatggagggtggggtatggttggagcctaatcagagaggtttctttcttttttcctattggatctttcctgagaaaagatattttaataaccttggctgctaaagacaacttgatagaagctgtctctggctatagataagtagatgtaatactagtttggatatctttagggtttagaatctaacctcaagaatgagaaataagctgggcgcggtggcttacatctgtaatcccagcactttgggagaccaaggcgggcggatcacgaggtcaggagatcgagaccatcctggctaacacggtgaaaacctgtctctactaaaaaatacaaaaaagttagctgggcatggtggtgggcgcctgtagtgccagctactcgggaggcggaggttgcagtgagccaagatcgcgccactgcactccagcctgggcgacagagtgagactctgtctcaaaaaaaaaaaaagaaaaagaaaaagaaaaggaaataaaagtacaaattggtgtgatgaagatatattcctattgtttgggattgggaggctttgtttatttttttaaaaactctattgaggctgggtgtggtggctcacacctgtaatggcagcactttgggaggccaaggtaggcagatcaccacaggttaggaattcaagaccagtctggccaacatggtgaaatcccgtctctactaaaatacaaaaattagctgggcatggtggcaggcgcctgtaatcccagctactcgggaggctgagcggagatggtgccacagcaatccagcctggatgacagagccagactccatgtcaaaataaaataaaaactctattgaggtgaagggtgaagctttaagttgttacatacttcactgatttcctcaaccctttttggctccgttttactatagcccgtattttgttggttatgactaatatttgtggaaagaggtcttgtgtttagtgcattataatggcatcagtactacttcggctggtttaagtactaatgaataaaacaaccatttttccttc

SEQ ID NO: 112172 - DNA, 699 bp, Artificial Sequence
  derived and/or modified sequence
atggacctccctattcaggattctcatgacagctccaccagcccaaaaggtaaacagcccacgactgccgagaagtccgccacgaagaaggaggacaaagtgcctgtgaaaaagcagaagacgagaacggtattcagtagcacccagctctgtgtgctcaatgatcgcttccagaggcagaagtatctttccctgcagcagatgcaggagctgtccaatatcctgaacctatcctataaacaggtgaaaacatggtttcagaatcagcgcatgaagtccaaacgttggcaaaagaataattggctaaaaaatagcaacggggtgacccagggctgtctggtcaatccaaccgggaatctgcccatgtggtcaaaccagacctggaataacagtacatggagcaatcagacacagaatatccaaagttggtcaaatcactcatggaacacccagacatggtgcacccagtcttggaataaccaggcatggaatagccccttttacaattgcggcgaggagtcccttcaaagctgcatgcagtttcaacctaatagtcctgccagcgacctggaggccgcactcgaggccgcaggcgaaggactgaatgttattcagcagacaaccagatatttcaacactcctcagactatggatctttttctcaactattcaatgaatatgcagcctgaggacgtgtag

SEQ ID NO: 112173 - DNA, 1131 bp, Artificial Sequence
  derived and/or modified sequence
atggacgtcctggccgaggcaaacggaacctttgctctgaacctgctcaagaccctgggaaaagacaattccaagaatgtgtttttttcacccatgagcatgtcctgcgccttggccatggtgtatatgggagctaagggcaatactgccgctcagatggcccagattctttccttcaacaaaagcggcgggggcggtgacatccatcagggattccagtccctgttgaccgaagttaataaaactgggacacaatacctcctgcgcatggcaaaccgcctgttcggggaaaagagctgcgatttcctttccagctttagagacagctgtcagaagttctatcaggctgaaatggaggagttggatttcatctcagccgtggagaagagccggaaacacatcaacacttgggtggctgagaagactgaaggaaagatcgccgagcttttaagcccaggatctgtggatcccctgactaggctagtgctagttaatgctgtttacttcagaggcaattgggacgaacagtttgacaaggagaataccgaggaaagactgttcaaagtgagcaagaatgaggagaagcctgtccagatgatgttcaagcagtctacctttaaaaaaacttatataggggagatcttcacccagatcctggttctcccctatgtggggaaagagctcaacatgattatcatgctgcctgacgaaacaacagacctgagaaccgtggagaaggagttgacctacgagaagtttgtggagtggacacggcttgatatgatggacgaagaggaagtggaagtgtcactcccgcgttttaagctcgaggagagctacgatatggagagcgttctgagaaacctcgggatgacggatgccttcgagctggggaaggcagattttagcggtatgtctcaaacagacctctcactcagtaaagtggtgcacaagtcatttgtcgaagttaacgaggagggcaccgaggccgccgcggctaccgctgccatcatgatgatgagatgcgcccgatttgtaccaaggttttgtgctgatcacccatttcttttcttcatccagcattcgaagacaaacggcatccttttttgtggtcggttttcaagtccgtag

SEQ ID NO: 112174 - DNA, 1131 bp, Artificial Sequence
  derived and/or modified sequence
atggatgttcttgccgaggccaacggtacgtttgcactcaacctgctgaagaccctaggcaaggataattccaagaatgtattcttctcccctatgtctatgagctgcgccctggccatggtttatatgggagcgaagggaaacaccgccgctcagatggctcagatcctgtcattcaataagagcggtggagggggcgatattcaccagggttttcagagtctgctgactgaagtgaacaagacagggacacagtaccttttacggatggccaatcgcttgttcggggaaaagtcatgtgatttcctctcctcatttcgcgatagttgtcagaaattctatcaggccgaaatggaagagttagacttcatcagcgcagttgaaaagtctcgcaaacacatcaatacttgggtggccgagaagacagaaggaaagattgccgagctcctgtcacccgggtcggtcgacccccttacacgactcgtcctggtcaatgccgtgtacttccgcggaaattgggacgagcagtttgataaggaaaatacggaggaaagactctttaaggtcagcaagaatgaagaaaagcctgtccaaatgatgtttaaacaatcaacttttaagaagacctatattggagagatcttcactcagattctcgtgttgccatacgtggggaaagagctgaacatgatcataatgttacctgatgagactactgatctgaggactgtggagaaggaactaacctatgagaagttcgttgagtggacccgcctcgatatgatggacgaagaggaagtggaagtgtcacttcccagattcaagttggaggagagctatgacatggagtctgttcttagaaatctgggcatgacagacgccttcgagctggggaaagccgatttcagcggcatgtcacaaaccgatctgagcctctccaaggtcgtccacaaaagttttgtcgaagtgaacgaagagggcaccgaggcagccgccgccactgcagccatcatgatgatgaggtgcgctcgcttcgttccaaggttttgtgctgatcatcccttcttgttttttattcagcacagcaaaacaaacggcatactcttctgtggccgcttttcatcaccatag

SEQ ID NO: 112175 - DNA, 1131 bp, Artificial Sequence
  derived and/or modified sequence
atggacgttttggctgaggccaacggcacctttgccctcaacctccttaaaaccttgggcaaagataattccaagaacgtctttttttcccccatgtccatgagctgtgccctagcaatggtgtacatgggggcgaagggcaacacagccgctcagatggcccaaattctgagctttaacaagtcagggggtggcggagatattcatcagggcttccagtcgttgctcacggaggttaataagaccgggacgcaatatctcctgcgcatggctaatagactcttcggggaaaagtcatgtgattttctgtccagtttccgggattcctgccagaaattttaccaggccgagatggaggagctagactttatttccgcagttgagaagtctagaaaacacattaacacatgggtggccgaaaaaaccgaaggcaagatcgctgaattactgagtcccggaagcgtggatccactgactagactggtcctggtcaatgcagtgtacttcagagggaattgggacgagcagttcgataaggagaacaccgaagaacggctgtttaaggtgtccaagaatgaggagaaaccagtgcagatgatgttcaaacagtcaacgtttaagaagacctacatcggtgagatctttacccagattcttgtattaccttacgtgggtaaggagctcaacatgataatcatgttgccagacgagactaccgacctgcgcaccgtggagaaggaactgacctatgaaaaattcgtcgaatggacacgcctggatatgatggatgaggaggaagtggaggtgagccttcccaggttcaaactggaggaatcatatgacatggaaagcgtcctccgaaacttgggtatgaccgatgctttcgaactggggaaagctgacttcagcggaatgtcccaaaccgacctgtctctatcaaaggttgtccacaagagctttgtggaggtcaatgaagaagggacagaggctgcggctgctactgccgccatcatgatgatgaggtgtgcccgtttcgtgcctagattttgcgcagaccatcccttcttgttcttcattcaacattctaagaccaatgggatacttttttgtggacggttctcatcgccatag

SEQ ID NO: 112176 - DNA, 1131 bp, Artificial Sequence
  derived and/or modified sequence
atggatgtgctcgccgaagccaatggaacttttgcgctcaacctgctaaagacgttgggaaaagacaattctaaaaatgtcttcttctctccaatgtccatgtcctgtgcactcgccatggtgtatatgggcgctaaggggaacactgcagctcaaatggcacagatcctgagcttcaacaaaagcggaggcggaggggatattcaccaaggtttccagagtttactgactgaagtcaacaaaactggtacacagtacctcttacgcatggccaatcgacttttcggagaaaagtcctgtgacttcttatccagttttcgggactcctgtcagaaattttatcaggctgagatggaggaactggatttcatcagtgccgttgagaaaagtcggaaacacatcaacacatgggtggctgaaaaaacagaagggaagattgccgaacttcttagtcctggatcagtggatccacttacaagactggttctcgtcaatgctgtgtatttccgtggcaattgggacgagcaatttgataaggaaaacaccgaagagcgcctgttcaaggtctcgaagaacgaggaaaagccagtacagatgatgtttaagcaaagcacttttaagaaaacttacattggtgaaatctttacccagattttggtgctcccctatgtagggaaggaactcaatatgataattatgctgccagatgagacaaccgatctgaggaccgtcgagaaagagctcacctacgagaaattcgtggaatggacaagacttgacatgatggatgaagaagaagtagaggtctccctgcctcgcttcaagctggaggagtcttacgacatggagtctgtgctacgcaatctcggaatgaccgatgcttttgagcttggcaaggccgacttcagcgggatgagccagaccgatttgagcctttccaaggttgttcataagtcttttgttgaagtgaacgaagagggcacggaggctgcagctgcaaccgccgcgatcatgatgatgagatgcgctcgttttgttcctcggttttgcgcggatcaccccttcttgttcttcatacagcattcgaagaccaatggcatcctgttttgcggtagattctcaagtccatag

SEQ ID NO: 112177 - DNA, 1131 bp, Artificial Sequence
  derived and/or modified sequence
atggacgtccttgcagaggcaaatggaaccttcgcactcaacttgctgaagactttaggcaaagataacagcaagaatgtgttctttagccctatgtccatgagttgcgcgctggccatggtgtatatgggtgctaagggtaacactgccgcacagatggcccagattctcagcttcaataaatcgggcggagggggcgatattcatcaaggctttcaatcactgctcacagaggtaaataagacagggactcagtacctgttacgtatggctaatcgactgtttggagagaaatcatgtgacttcctctccagtttcagagattcctgccagaaattttatcaggccgagatggaggagctggattttatttctgcagtcgagaaaagtaggaagcatatcaatacttgggtggccgagaagacggaaggaaaaattgcggagctgctctcacccggatcagtggaccctctgactcggttggtgttagtgaatgctgtgtactttcgtggaaactgggacgagcagttcgacaaagagaatacagaggaacggctgtttaaagtatccaagaacgaggagaagcccgtgcagatgatgttcaaacagagcacttttaaaaagacctatatcggcgaaatctttacccagattctggtacttccttacgtgggcaaagagctcaacatgatcatcatgctgccggatgagaccactgaccttagaactgtcgagaaggagcttacctacgagaaattcgtggaatggactcgattagacatgatggacgaagaagaggtggaggtgagccttccgcgattcaagcttgaggaatcctatgacatggaatctgtactgcggaaccttggtatgaccgacgcctttgagctcggtaaagctgacttctccggaatgtcacaaaccgacttgagtctctctaaggtggttcacaaaagctttgtcgaggtgaatgaagaagggacggaggctgccgccgcaaccgcggcgattatgatgatgaggtgtgccagattcgtgccacgattctgcgccgatcacccattcctgtttttcatccagcacagtaagaccaacggcatactcttttgtggccgcttcagttcaccttag

SEQ ID NO: 112178 - DNA, 1131 bp, Artificial Sequence
  derived and/or modified sequence
atggacgtgttggcagaggccaatgggacttttgcccttaacctcctgaaaactctaggcaaagacaatagcaaaaatgtgttcttctcaccaatgagcatgagctgtgcccttgctatggtctacatgggagctaaaggtaatacagcagcccagatggcccagatccttagctttaataagtccggcggaggcggcgatatccatcagggctttcagagccttctaactgaagtgaataagaccggaacccagtacctgctaaggatggccaatcgcttatttggggaaaagtcttgtgatttcctcagctcatttcgggattcctgtcaaaagttctaccaggcggagatggaggaactggattttatctctgccgtggaaaagtcacggaagcacatcaacacatgggtggcggagaaaactgagggtaagatcgcggagctattatcacccggcagtgtggatcctctaacaaggctggttttagtcaacgccgtatatttccgcggaaactgggatgaacagttcgacaaagaaaacactgaagagagactgttcaaggtgagtaagaacgaagaaaaacccgtccagatgatgttcaaacaatctacctttaagaaaacctacatcggcgaaatattcacccagatattagtgctgccgtacgttggcaaagaactgaacatgatcataatgctgccagatgaaactaccgacctccgaaccgtggagaaagagctgacatacgagaaatttgtcgagtggacacggctcgatatgatggacgaagaagaagtagaagtgtctctgcccaggtttaagctggaagagtcgtatgacatggaatccgtcctccgtaatttggggatgactgacgcttttgagctcgggaaagctgacttctctggaatgtcccagaccgacctgtccctctctaaagtggtgcacaagtcttttgtagaagttaacgaggaaggaacggaagctgccgctgccacagccgctatcatgatgatgaggtgcgctagattcgtcccacgcttctgcgcagaccaccccttcctcttctttatccaacattcaaaaaccaacgggatcctcttctgtggccgctttagcagcccctag

SEQ ID NO: 112179 - DNA, 579 bp, Artificial Sequence
  derived and/or modified sequence
atggacgtcctagccgaggccaacggcaccttcgccctgaacttacttaagaccctggggaaagacaattctaaaaatgtgtttttcagcccaatgagtatgtcttgcgcgctagccatggtctatatgggtgcaaagggaaacacggcagcccagatggcacaaattctgagcttcaacaaatccggtggcgggggcgatattcaccaaggattccagtcgttgctgacagaggtaaacaaaacagggacccagtatctcctgcgcatggcaaacagagaaagttatgatatggagagcgtgctcagaaatcttggcatgaccgatgccttcgagttaggcaaggccgatttttcgggcatgtctcaaaccgacctgtcgctgagcaaggtggtccacaagtcatttgtggaagtgaatgaggaaggcactgaggctgccgctgccacggctgcaattatgatgatgaggtgtgccagatttgtgccgaggttttgcgccgaccaccctttcctcttcttcatccagcactctaagaccaatggcattctcttctgtggacgtttttctagcccttag

SEQ ID NO: 112180 - DNA, 1131 bp, Artificial Sequence
  derived and/or modified sequence
atggatgtgctggccgaggccaacggcacctttgccctgaacctgctgaagaccctgggcaaggacaacagcaagaatgtgttcttcagccccatgtccatgagctgtgccctggccatggtgtacatgggcgccaagggcaacacagctgcccagatggcccagatcctgtccttcaacaagagcggcggcggcggggacatccaccagggcttccagagcctgctgacagaggtgaacaagacaggcacccagtacctgctgaggatggccaaccggctgtttggagagaagagctgtgacttcctgagcagcttccgggacagctgccagaagttctaccaggccgagatggaggagctggacttcatctctgctgtggagaagagcaggaagcacatcaacacctgggtggccgagaagacagagggcaagattgctgagctgctgagccctggctctgtggaccccctgacccggctggtgctggtgaatgctgtgtacttccggggcaactgggatgagcagtttgacaaggagaacacagaggagcggctcttcaaggtgtccaagaatgaggagaagcctgtgcagatgatgttcaagcagagcaccttcaagaagacctacatcggggagatcttcacccagatcctggtgctgccctacgtgggcaaggagctgaacatgatcatcatgctgcctgatgagaccacagacctgaggacagtggagaaggagctgacctatgagaagtttgtggagtggacccggctggacatgatggatgaggaggaggtggaggtgtccctgccccgcttcaagctggaggagagctatgacatggagagcgtgctgaggaacctgggcatgacagatgcctttgagctgggcaaggctgacttcagcggcatgagccagacagacctgagcctgagcaaggtggtgcacaagagctttgtggaggtgaatgaggagggcacagaggccgccgccgccacagctgccatcatgatgatgagatgtgccaggtttgtgccccgcttctgtgccgaccaccccttcctgttcttcatccagcacagcaagaccaacggcatcctcttctgtggccgcttcagcagcccctag

SEQ ID NO: 112181 - DNA, 579 bp, Artificial Sequence
  derived and/or modified sequence
atggatgtgctggccgaggccaacggcacctttgccctgaacctgctgaagaccctgggcaaggacaacagcaagaatgtgttcttcagccccatgtccatgagctgtgccctggccatggtgtacatgggcgccaagggcaacacagctgcccagatggcccagatcctgtccttcaacaagagcggcggcggcggggacatccaccagggcttccagagcctgctgacagaggtgaacaagacaggcacccagtacctgctgaggatggccaaccgggagagctatgacatggagagcgtgctgaggaacctgggcatgacagatgcctttgagctgggcaaggctgacttcagcggcatgagccagacagacctgagcctgagcaaggtggtgcacaagagctttgtggaggtgaatgaggagggcacagaggccgccgccgccacagctgccatcatgatgatgagatgtgccaggtttgtgccccgcttctgtgccgaccaccccttcctgttcttcatccagcacagcaagaccaacggcatcctcttctgtggccgcttcagcagcccctag

SEQ ID NO: 112182 - DNA, 1131 bp, Artificial Sequence
  derived and/or modified sequence
atggacgtgctggccgaggccaacggcaccttcgccctgaacctgctgaaaacactgggtaaggacaatagtaaaaacgtgttttttagtcccatgtctatgtcctgtgcactggccatggtctacatgggtgctaagggtaatacagcggctcagatggcccaaatccttagcttcaacaaatccggcggcgggggagacatccatcagggctttcagagtttgctgactgaagtgaataaaaccgggacacagtacctgttgagaatggccaaccgtttattcggggagaagagctgtgattttctctccagctttcgggactcttgccagaaattctaccaggccgagatggaagagctagactttatttcggccgtcgaaaaatcccgtaaacacattaatacttgggtggctgagaagacggagggcaagattgccgaattactgagcccaggttcagtcgacccccttactagactggtcctcgttaatgcggtttactttcggggcaattgggatgagcagttcgacaaggaaaatactgaggagcgcctgttcaaagtctccaagaatgaggaaaagcctgtgcagatgatgttcaaacagagtacctttaagaaaacctatataggcgaaattttcacacaaatactggtcttgccctatgtaggaaaagagttgaacatgatcataatgttacccgatgaaaccaccgatttaagaacagttgagaaagagctgacctacgaaaaattcgtggaatggacccggttggatatgatggacgaggaagaagtggaagtcagtctccctcggtttaaattggaggagtcatacgacatggagtctgtccttcgaaacttggggatgacagatgcgttcgaactgggaaaggccgacttctccggcatgagccaaacagacctcagcctcagcaaagttgtccacaagtcctttgtcgaggtaaacgaagaagggactgaagcagccgccgccacggcagctataatgatgatgcgctgcgctcgcttcgtcccgcgtttttgcgctgatcacccatttctgttctttatacaacatagcaaaactaatgggatcctcttttgcgggcggttctcttcaccctag

SEQ ID NO: 112183 - DNA, 1131 bp, Artificial Sequence
  derived and/or modified sequence
atggacgtgctggccgaggccaacggcaccttcgccctgaacctgctcaaaaccctgggtaaagataacagcaagaacgttttctttagcccaatgtctatgtcatgtgctttagcaatggtgtatatgggggcaaaagggaacactgcagcacagatggcacagatcctgtccttcaacaagtcaggaggagggggggacatccatcaaggcttccaaagtttgctgaccgaggttaacaaaaccggcacacagtacctgcttaggatggctaatcgcctgtttggcgaaaaaagttgtgactttctcagctcctttcgcgactcatgccagaaattttaccaggctgaaatggaggaactggattttatcagtgccgtggaaaagagccggaagcacattaacacctgggtggccgaaaagacagagggcaagatcgctgagctcctttccccaggcagcgtggacccgctgacgagactggttctggtcaacgctgtgtatttccgaggcaactgggacgaacagttcgacaaggaaaatactgaagagagattatttaaggttagcaagaatgaggagaaacccgtccaaatgatgtttaagcaaagtaccttcaagaagacgtacatcggtgaaatctttactcagatcctagttttgccatacgtgggaaaagaactaaacatgatcatcatgctacccgatgaaacaaccgatcttagaaccgttgaaaaggaacttacgtacgaaaaatttgtggagtggacccggctggatatgatggatgaagaggaggttgaagtttctttacccagattcaagctggaggaatcctacgacatggagtctgtgctaaggaatctagggatgactgacgcgtttgagctgggaaaggcagatttttccgggatgtcacaaaccgaccttagtctcagcaaagttgttcataagtctttcgtcgaagtcaacgaagaaggcactgaagctgcagccgccaccgccgccattatgatgatgagatgcgcccgctttgtgccccgattctgcgcggaccacccctttctgtttttcatccagcactctaagactaatgggatattgttttgcgggagatttagcagcccttag

SEQ ID NO: 112184 - DNA, 1131 bp, Artificial Sequence
  derived and/or modified sequence
atggacgtgctggccgaggccaacggcaccttcgccctgaacctgctcaaaacgttggggaaggataattcaaaaaatgtgttttttagtcccatgtccatgagttgtgccctggccatggtctacatgggggccaagggtaacaccgccgcacagatggcacaaatcttgtcctttaataagtcagggggcggaggggacatccatcaaggttttcagtccctccttacggaggtcaacaagacaggcacccagtatctccttcggatggctaatcgtctatttggagagaaatcgtgtgattttctcagctccttccgtgacagttgtcagaagttttatcaagctgagatggaggagctcgatttcatcagcgctgtagaaaaatctcgaaaacatatcaacacgtgggttgcagagaaaaccgagggaaaaattgccgaacttctaagtccgggaagtgtagaccccctgacaaggcttgtgcttgtgaatgcggtctacttcagggggaactgggacgagcaatttgacaaagagaacaccgaggagagactgttcaaggtctcaaaaaacgaagagaaacctgttcagatgatgtttaagcaatctacttttaagaagacgtacatcggagaaatctttacacagattttggtgcttccttacgtgggcaaggagctgaacatgatcataatgctgccggacgaaacaactgatctccgtactgtggaaaaagagctcacttacgagaagttcgtggagtggaccaggctggatatgatggatgaggaagaagtcgaggtaagtctgccccggtttaagctggaagagtcctacgacatggagtcagtcctccgcaacctgggcatgaccgacgctttcgagctgggaaaagctgacttttccggcatgtctcagaccgatctgtcccttagtaaggtcgtccataaaagctttgtcgaggtgaacgaagaaggaactgaggccgcggcagcgacggctgcaatcatgatgatgcgctgcgcccgattcgtgcccaggttctgcgccgatcatccctttctgttttttatacaacactccaaaacaaacggaatcttattctgcggccggttttcttccccctag

SEQ ID NO: 112185 - DNA, 1131 bp, Artificial Sequence
  derived and/or modified sequence
atggacgtgctggccgaggccaacggcaccttcgccctgaacctgctcaaaaccctcggcaaggacaactccaaaaacgttttcttctcaccaatgtcaatgagttgcgcactcgcaatggtatacatgggggccaagggtaacactgccgcccaaatggctcagatcctgagttttaacaagtccggcggtggcggagatattcaccagggctttcagagccttctaaccgaagttaacaagactgggacacagtatttactcagaatggctaataggctattcggggagaaaagttgtgacttcctctccagctttagggatagctgccagaaattctaccaggcagagatggaagaactggactttatcagcgctgtggaaaaatctcgcaagcatatcaatacctgggtagctgagaagaccgagggaaagatcgccgagttgctttctcccgggtcagtcgatcctcttacaagattagtgctcgtcaatgccgtgtattttagggggaattgggacgaacaatttgacaaggagaacactgaggagagactgtttaaagttagtaaaaacgaggagaagccagtccagatgatgttcaaacagagcaccttcaagaagacctatataggagagatattcacacaaatcctggtgctgccatacgtgggcaaggaacttaacatgataataatgctgcctgacgagaccactgacctgagaaccgtcgagaaagaacttacctatgaaaaatttgtcgagtggaccagactcgacatgatggacgaggaggaggtggaagtgtctctgccccgtttcaagctagaggaatcatatgacatggagtctgtactcagaaacttgggaatgactgacgcgttcgaactcgggaaggctgatttcagtgggatgagtcaaaccgatctgtcactgtctaaggtcgtgcataagtctttcgtagaggtgaatgaagagggcactgaagcggctgcggccaccgcagccatcatgatgatgcgctgcgctaggttcgtccccaggttttgtgctgaccacccatttctgttctttatccagcactccaaaactaacggtatactcttctgtggcagattctctagcccgtag

SEQ ID NO: 112186 - DNA, 1131 bp, Artificial Sequence
  derived and/or modified sequence
atggacgtgctggccgaggccaacggcaccttcgccctgaacctgctgaagacactcggcaaagacaacagtaagaatgtatttttctccccaatgtctatgtcctgtgctctggcaatggtctacatgggagcaaaggggaacaccgccgctcagatggctcagatcctgtccttcaataaatcgggtggtggtggagatatacaccaaggattccaatcactgcttactgaagtcaacaagaccggcacacagtacctcctgcggatggcaaatcgactgtttggggagaagtcttgcgacttcctttcctccttccgagacagttgccagaaattttatcaggccgaaatggaagaactggattttatctctgccgtggagaaatcgcggaaacatatcaatacatgggtggcagaaaagaccgagggcaaaattgcagagctgctgagccctggatctgtggaccccctgactaggttagtgctggttaatgctgtgtattttcggggaaactgggacgagcaattcgataaggagaatactgaagagagattgtttaaagtcagcaagaatgaagagaagccggtccagatgatgtttaagcaatctacattcaaaaaaacttacatcggggaaatttttacgcagatcctcgtgttgccctatgttggcaaggagctaaacatgatcataatgctgcccgacgagacaactgacctaaggacagtggaaaaagagcttacttacgaaaagttcgtggaatggacacggctggacatgatggatgaggaagaggtggaagttagccttccacgcttcaaactggaagagtcttatgatatggaatctgtcttgcgaaatctgggcatgactgatgctttcgaactcggaaaggctgatttctcaggcatgtctcagaccgacctgtctctgtccaaagttgtccataaatcgttcgtcgaggtaaacgaggagggcacagaggccgcggccgccaccgccgctatcatgatgatgcggtgcgccagattcgtaccacgtttctgcgccgaccacccgttcctgttcttcatccagcacagcaaaaccaacgggatcctcttttgcggtcgattttcttccccttag

SEQ ID NO: 112187 - DNA, 1131 bp, Artificial Sequence
  derived and/or modified sequence
atggacgtgctggccgaggccaacggcaccttcgccctgaacctgctcaagacactgggaaaggataatagtaaaaacgtctttttctcacctatgtctatgagttgcgctctcgcgatggtgtacatgggagccaagggcaatacagcagcccaaatggcacagatcttgagcttcaacaagagcggcggaggtggcgacatccaccaaggtttccagagccttctgacagaggtgaataagactggtactcaatacctgctccggatggcaaacaggctgttcggcgagaaatcatgcgatttcctgagctcttttagggactcctgtcaaaagttttaccaagcagagatggaggagctggatttcatctccgccgtggagaaaagccgcaagcacataaacacctgggtcgccgagaagacggaaggaaagattgctgagctcctgagccccggctcagtggatccactcacgcgactcgtccttgtgaatgcagtgtactttcgtggcaattgggatgagcaatttgacaaggaaaataccgaagagaggctctttaaggtatcaaagaacgaagaaaaaccggtccagatgatgttcaagcagtctacattcaaaaagacttacatcggagaaattttcacccagattttagtgctcccgtatgtgggtaaggagctgaatatgattatcatgctccctgatgaaacaaccgacctgcgcactgtggaaaaagagctgacatatgaaaaatttgtcgagtggacccggctcgatatgatggatgaggaggaagtagaggtgtcactcccgcgattcaagctagaggagtcctacgatatggagagtgtcctgaggaatctcggcatgacagacgcttttgaactgggcaaagccgacttctccggaatgtctcagaccgacctcagcctatctaaagtagttcataagtctttcgtggaggtaaatgaggaaggcaccgaggccgcggctgccaccgccgccatcatgatgatgaggtgtgctagattcgtgcctaggttttgcgccgaccaccccttcctattttttatacagcattcaaaaactaatggaatattattctgcggtaggttctcctctccttag

SEQ ID NO: 112188 - DNA, 579 bp, Artificial Sequence
  derived and/or modified sequence
atggacgtgctggccgaggccaacggcaccttcgccctgaacctgttgaaaacactgggcaaggataatagtaagaatgtctttttttctccaatgtccatgagttgcgctcttgctatggtttacatgggcgccaaggggaacacggctgcccaaatggcccaaatactgtccttcaataagagcggcggaggtggggatattcaccagggcttccagagcctacttaccgaggtgaataaaacaggtacccagtatctgctgcggatggccaatagggaatcgtatgacatggagagcgtactacggaaccttggtatgactgacgcatttgaactggggaaggctgacttctcaggcatgtcccagacagacctgagcctgtcaaaagttgttcacaagtccttcgttgaggtgaacgaagagggaacagaagctgcggccgccacagctgccatcatgatgatgcggtgcgccagattcgttccgcggttttgtgccgatcaccctttcctcttcttcatccaacatagtaagactaacggtatcctgttctgcgggaggttttcgtcaccgtag

SEQ ID NO: 112189 - DNA, 1131 bp, Artificial Sequence
  derived and/or modified sequence
atggacgttttggcggaggcgaacgggacctttgctctgaatttgctgaaaaccctggggaaagacaattctaagaatgtgtttttttcccccatgtctatgtcctgcgcattagcgatggtgtatatgggtgcgaaggggaacaccgctgcccaaatggcgcagatcctgtctttcaacaagtccggtgggggaggcgatattcaccaggggttccagtccctgctgactgaggtcaacaagaccggaacccagtatctgttaaggatggccaaccggttgttcggagagaaatcctgcgatttcctgagtagtttcagagatagctgccaaaagttttaccaagccgagatggaggagctggatttcatcagtgctgtggagaagtcccgcaagcatattaatacctgggtggccgaaaagactgaagggaaaatcgccgagcttctctctccagggtcggttgaccctctaacccgtctcgtgttggttaacgccgtctacttccgcggtaactgggacgagcagttcgacaaggaaaacactgaggagcggctgttcaaggtaagcaaaaatgaggagaaaccagtgcagatgatgttcaaacaatctactttcaagaaaacatatattggggagatattcactcagatactcgtgctgccctacgtgggcaaggaactgaatatgatcattatgcttcccgacgagaccacggatttaagaacagtcgaaaaggagctgacctacgaaaagtttgtggagtggacacgcttagatatgatggacgaggaagaagtagaggtctccctgcctcggttcaagctcgaggagtcatacgacatggagtccgtgctcagaaacttgggcatgacggacgccttcgagctcggtaaagctgacttttccggcatgagtcagaccgacctaagtttgtctaaggtagtgcataagtcatttgtggaggtgaatgaagagggtactgaggcggcagctgcaaccgctgcgattatgatgatgagatgtgctagatttgtcccccgtttctgcgcagaccacccgtttctgtttttcatccagcattccaagacaaacggtatcctcttctgcggacggttcagttctccctag

SEQ ID NO: 112190 - DNA, 1131 bp, Artificial Sequence
  derived and/or modified sequence
atggacgttcttgcagaggcaaacggtacattcgctctgaatctgctgaagactctgggaaaagacaatagcaagaacgtgttcttttcgcccatgagcatgtcttgcgcactcgccatggtgtacatgggagcaaaaggaaataccgctgcgcagatggcccagatcctcagcttcaataagtctggaggagggggtgacattcatcaaggtttccagagcttactgacagaagtaaacaaaaccggcacacagtatcttcttagaatggccaatcggctgttcggggagaaaagctgtgattttctgtcttccttccgcgactcttgtcagaagttttatcaggctgagatggaagaactggattttatttctgcagtcgagaaaagtagaaagcacattaacacgtgggtcgctgagaagaccgaagggaagatcgccgaacttctgtctccagggagtgtcgacccccttactcggctggtcctcgtgaacgccgtttacttcaggggcaattgggatgaacagttcgataaggaaaacacagaagaaagactgttcaaggtgtccaagaatgaggaaaagcctgtgcaaatgatgttcaaacagtctacttttaagaaaacgtacattggtgaaatctttacacagattcttgtactcccctatgtcgggaaagagctcaacatgatcataatgctgccagacgagacaaccgatctccggactgtagaaaaggagcttacatacgaaaaatttgtggagtggaccagattggatatgatggatgaggaggaggtggaggtgtcccttccgagattcaaactcgaggagtcctatgacatggaaagtgtactccgaaacttgggtatgacggatgcctttgagctcggaaaagctgacttttctggcatgtctcagactgatctctcgctgtccaaagtcgtacacaagagctttgtggaagtgaatgaggagggcactgaggcagctgccgctacagctgctataatgatgatgcgatgcgccaggttcgtgcccaggttttgtgcagatcatccctttctcttctttattcagcacagcaaaaccaatggtatactattctgcggccgattcagcagcccctag

SEQ ID NO: 112191 - DNA, 1131 bp, Artificial Sequence
  derived and/or modified sequence
atggacgtgttagcggaggcgaatggaactttcgccttaaaccttcttaaaactttgggcaaggataactcgaaaaatgtgttcttcagcccaatgagtatgagctgtgccttggccatggtctacatgggcgctaagggaaacaccgcagcccagatggctcagatcctcagttttaataagtcaggcggagggggagacatccaccaaggttttcaatcactgctgacggaggtgaataaaaccggcactcagtatctcttgcgcatggcaaaccgcctgttcggtgagaaatcttgcgattttctgtcttcctttcgcgactcttgccagaaattttatcaggcagagatggaggagctcgactttattagtgcggtggagaagtcaaggaaacatatcaatacatgggtagccgaaaagactgaggggaaaatcgctgagttgctttcaccaggcagtgttgatccccttactagactggttttagtgaacgctgtgtatttccgcggaaactgggacgaacagtttgacaaagaaaacaccgaagaaagactttttaaagtttcaaagaatgaggaaaagcctgtgcagatgatgttcaaacagtccaccttcaaaaaaacttacatcggtgagatttttacccagattctggtccttccctacgtggggaaggagctgaatatgataatcatgctgcctgatgaaactaccgacctgcgcacagttgaaaaggagctcacctacgagaagtttgtagagtggactagacttgatatgatggatgaagaggaagtcgaagtgtctctgcctagattcaagcttgaagagtcctacgacatggagtctgtcctccgcaatctggggatgacagatgcattcgagttgggtaaggccgatttctccggaatgagccaaaccgatctctccctctcaaaagtggttcacaaatcctttgtagaagtgaacgaggagggtacggaggccgctgccgctaccgctgccataatgatgatgcgttgcgccaggtttgtgcctaggttttgcgctgaccacccttttctgtttttcatccagcattccaaaaccaacggcatcctcttttgcgggagattcagttccccatag

SEQ ID NO: 112192 - DNA, 1131 bp, Artificial Sequence
  derived and/or modified sequence
atggacgttttggcggaagcaaacggaacttttgcccttaacctcttgaagactttagggaaagataatagtaagaacgttttctttagtcctatgtcgatgagttgcgcacttgcaatggtgtacatgggagccaaaggcaacacagctgctcagatggctcagatcctgtcctttaacaagtctggaggcggaggagacatccatcagggtttccagtcactccttaccgaggtgaataagactgggactcagtacctgctacggatggccaatagactcttcggcgaaaagagttgcgatttcctttcttctttccgcgacagctgtcaaaaattttaccaggcggagatggaagaactggactttatctcggcggtggagaaaagccggaagcacattaacacatgggtggctgaaaaaacggaaggcaagatcgcagaactgctaagcccaggcagtgtggacccgctcacacgcctagtgctcgtgaatgctgtttactttcgaggcaactgggatgagcaattcgataaggagaataccgaagagcgcttattcaaagtgtcaaagaatgaagaaaaaccagtgcagatgatgtttaagcagtccacattcaaaaagacctacattggggaaatttttacccagatcttggtgttgccatacgtgggtaaggagttgaacatgattattatgctccctgacgaaacgactgatctgcgcaccgtggagaaagagctgacgtacgaaaagttcgtcgagtggacaaggcttgatatgatggacgaggaggaggtcgaagtgtcactccctagatttaaactggaagagtcatatgacatggaatccgtgctgagaaacctcggcatgacagacgccttcgagctgggaaaggccgacttcagcggcatgagtcagaccgacctgtctctcagcaaggtcgtacataagagtttcgtagaggtcaacgaagagggcacggaggctgccgcagcgaccgcagcaattatgatgatgcggtgcgctagattcgttccaaggttctgtgctgatcaccctttcctttttttcattcagcacagcaaaactaacggcattctgttttgcggacgtttctcttccccatag

SEQ ID NO: 112193 - DNA, 1131 bp, Artificial Sequence
  derived and/or modified sequence
atggacgtactggctgaggccaacggcactttcgccctcaatctgttgaagactttaggaaaagataatagtaaaaatgtttttttttctccaatgtctatgagctgtgctctggcaatggtgtatatgggtgcaaagggcaataccgctgcccagatggcacaaattctgtcgttcaataagagcgggggagggggagatatccaccaggggtttcagtcgctgctgactgaagtcaacaagactggcacccagtatctgctccgcatggcaaacaggttgtttggggagaaaagctgcgactttctctcatcctttagggactcttgccagaaattctaccaggctgagatggaggagttagattttatctccgcagtagagaagagccgtaagcacatcaacacttgggtggccgagaaaactgaagggaagattgccgagttgttgtcccctggctccgtagaccctttgacccgtttggtgctcgttaacgccgtgtacttccggggtaactgggacgaacagttcgacaaggaaaatactgaagagcgactgtttaaggtgtctaagaatgaggagaagcctgtgcagatgatgtttaagcagagcacctttaagaagacctatattggagaaatttttacccagatcctggtgttgccctatgtgggaaaggagctgaatatgatcatcatgctgccggacgagacgaccgatctgcggaccgtggagaaggaattgacctacgagaagttcgttgaatggacccgtcttgacatgatggacgaggaagaggttgaagtgtcactcccgaggtttaaattggaggaatcctatgacatggaaagcgttttgcggaatctgggcatgactgacgcctttgaactgggcaaagccgacttttcagggatgagccagactgacctttccctaagcaaagtagtgcataagtcctttgtagaggttaatgaggagggcactgaagcagccgcagccacggcagccataatgatgatgagatgtgcgaggttcgttcccaggttctgtgccgatcatccgttcctctttttcatccagcatagtaaaaccaatggcattctgttctgcggtcgcttttcttctccctag

SEQ ID NO: 112194 - DNA, 1131 bp, Artificial Sequence
  derived and/or modified sequence
atggacgtgttggctgaggccaatggcaccttcgctctgaatctgctgaaaacgctggggaaggataactccaaaaatgtgttcttcagccccatgtcgatgtcatgtgcattggccatggtctacatgggagctaaaggcaacaccgccgctcaaatggcccagatcctctcattcaacaagtccggaggcggaggcgacatccaccaaggcttccagagcctgttgaccgaagtgaacaaaactggtacccagtacctactccgcatggccaaccgcctgttcggcgaaaaaagctgcgattttttgtctagttttagagattcctgtcagaaattctatcaggcagaaatggaagagctggattttatatccgcagtggaaaagagtcgcaaacacataaacacctgggtcgcggagaagacagagggcaaaattgctgagctcttatctcctggctctgttgaccctcttaccagacttgtcctggtgaatgcagtgtactttcgcggaaactgggatgagcagttcgacaaggaaaatactgaggagaggctatttaaagtgtctaaaaatgaagagaaaccagtgcagatgatgttcaagcagagtacattcaaaaagacctatataggggagattttcacccagattcttgttctgccgtatgtcgggaaagagctgaacatgattatcatgctgcccgacgaaaccacggaccttagaactgtggaaaaagagctgacttatgaaaaattcgtcgagtggacaaggttagatatgatggacgaggaagaggtagaagtgtcccttccaaggtttaagctggaggagagttacgacatggagtctgtgctgaggaatctcgggatgacagacgcctttgaactggggaaagctgatttttcggggatgagtcagacagatttatccctgagtaaggttgtccataaatcttttgtcgaagtcaacgaggagggaacggaggcagctgccgcaaccgccgctattatgatgatgcggtgcgcgcgtttcgtgcctaggttttgcgcagaccaccccttcttgtttttcatccagcacagcaagaccaatggaatcctattctgcgggagatttagttctccatag

SEQ ID NO: 112195 - DNA, 579 bp, Artificial Sequence
  derived and/or modified sequence
atggacgtcttggcagaggccaacggcacatttgctctgaaccttctgaaaacgctgggtaaggataacagtaagaacgtgtttttttctccaatgtccatgagttgtgccctggccatggtttacatgggtgcgaagggcaacaccgccgctcaaatggcccaaatcctgtccttcaataagagtggcggaggtggcgatattcaccagggtttccagagcttgttgaccgaggttaataagaccgggacccagtacctactgcggatggcaaatcgagagagctatgatatggaaagcgtgcttcgcaacttgggaatgaccgacgcatttgagttgggaaaggctgacttttccggcatgtcgcagaccgatttgtctctgagtaaagtcgtacataagtccttcgtggaagtcaatgaggagggcacagaggcggcagcagccacagccgctataatgatgatgcggtgtgcacgttttgtcccgcgattctgtgctgatcaccccttcttattttttatccaacactccaagacaaatggaattctgttctgtggcaggttttcttctccctag

SEQ ID NO: 112196 - DNA, 1131 bp, Artificial Sequence
  derived and/or modified sequence
atggacgtgctggccgaggccaacggcaccttcgccctgaacctgctgaagaccctgggcaaggacaacagcaagaacgtgttcttcagccccatgagcatgagctgcgccctggccatggtgtacatgggcgccaagggcaacaccgccgcccagatggcccagatcctgagcttcaacaagagcggcggcggcggcgacatccaccagggcttccagagcctgctgaccgaggtgaacaagaccggcacccagtacctgctgagaatggccaacagactgttcggcgagaagagctgcgacttcctgagcagcttcagagacagctgccagaagttctaccaggccgagatggaggagctggacttcatcagcgccgtggagaagagcagaaagcacatcaacacctgggtggccgagaagaccgagggcaagatcgccgagctgctgagccccggcagcgtggaccccctgaccagactggtgctggtgaacgccgtgtacttcagaggcaactgggacgagcagttcgacaaggagaacaccgaggagagactgttcaaggtgagcaagaacgaggagaagcccgtgcagatgatgttcaagcagagcaccttcaagaagacctacatcggcgagatcttcacccagatcctggtgctgccctacgtgggcaaggagctgaacatgatcatcatgctgcccgacgagaccaccgacctgagaaccgtggagaaggagctgacctacgagaagttcgtggagtggaccagactggacatgatggacgaggaggaggtggaggtgagcctgcccagattcaagctggaggagagctacgacatggagagcgtgctgagaaacctgggcatgaccgacgccttcgagctgggcaaggccgacttcagcggcatgagccagaccgacctgagcctgagcaaggtggtgcacaagagcttcgtggaggtgaacgaggagggcaccgaggccgccgccgccaccgccgccatcatgatgatgagatgcgccagattcgtgcccagattctgcgccgaccaccccttcctgttcttcatccagcacagcaagaccaacggcatcctgttctgcggcagattcagcagcccctag

SEQ ID NO: 112197 - DNA, 579 bp, Artificial Sequence
  derived and/or modified sequence
atggacgtgctggccgaggccaacggcaccttcgccctgaacctgctgaagaccctgggcaaggacaacagcaagaacgtgttcttcagccccatgagcatgagctgcgccctggccatggtgtacatgggcgccaagggcaacaccgccgcccagatggcccagatcctgagcttcaacaagagcggcggcggcggcgacatccaccagggcttccagagcctgctgaccgaggtgaacaagaccggcacccagtacctgctgagaatggccaacagagagagctacgacatggagagcgtgctgagaaacctgggcatgaccgacgccttcgagctgggcaaggccgacttcagcggcatgagccagaccgacctgagcctgagcaaggtggtgcacaagagcttcgtggaggtgaacgaggagggcaccgaggccgccgccgccaccgccgccatcatgatgatgagatgcgccagattcgtgcccagattctgcgccgaccaccccttcctgttcttcatccagcacagcaagaccaacggcatcctgttctgcggcagattcagcagcccctag

SEQ ID NO: 112198 - protein, 1489 aa, Artificial Sequence
  derived and/or modified sequence
MGDAADPREMRKTFIVPAIKPFDHYDFSRAKIACNLAWLVAKAFGTENVPEELQEPFYTDQYDQEHIKPPVVNLLLSAELYCRAGSLILKSDAAKPLLGHDAVIQALAQKGLYVTDQEKLVTERDLHKKPIQMSAHLAMIDTLMMAYTVEMVSIEKVIACAQQYSAFFQATDLPYDIEDAVMYWINKVNEHLKDIMEQEQKLKEHHTVEAPGGQKSPSKWFWKLVPARYRKEQTLLKQLPCIPLVENLLKDGTDGCALAALIHFYCPDVVRLEDICLKETMSLADSLYNLQLIQEFCQEYLNQCCHFTLEDMLYAASSIKSNYLVFMAELFWWFEVVKPSFVQPRVVRPQGAEPVKDMPSIPVLNAAKRNVLDSSSDFPSSGEGATFTQSHHHLPSRYSRPQAHSSASGGIRRSSSMSYVDGFIGTWPKEKRSSVHGVSFDISFDKEDSVQRSTPNRGITRSISNEGLTLNNSHVSKHIRKNLSFKPINGEEEAESIEEELNIDSHSDLKSCVPLNTNELNSNENIHYKLPNGALQNRILLDEFGNQIETPSIEEALQIIHDTEKSPHTPQPDQIANGFFLHSQEMSILNSNIKLNQSSPDNVTDTKGALSPITDNTEVDTGIHVPSEDIPETMDEDSSLRDYTVSLDSDMDDASKFLQDYDIRTGNTREALSPCPSTVSTKSQPGSSASSSSGVKMTSFAEQKFRKLNHTDGKSSGSSSQKTTPEGSELNIPHVVAWAQIPEETGLPQGRDTTQLLASEMVHLRMKLEEKRRAIEAQKKKMEAAFTKQRQKMGRTAFLTVVKKKGDGISPLREEAAGAEDEKVYTDRAKEKESQKTDGQRSKSLADIKESMENPQAKWLKSPTTPIDPEKQWNLASPSEETLNEGEILEYTKSIEKLNSSLHFLQQEMQRLSLQQEMLMQMREQQSWVISPPQPSPQKQIRDFKPSKQAGLSSAIAPFSSDSPRPTHPSPQSSNRKSASFSVKSQRTPRPNELKITPLNRTLTPPRSVDSLPRLRRFSPSQVPIQTRSFVCFGDDGEPQLKESKPKEEVKKEELESKGTLEQRGHNPEEKEIKPFESTVSEVLSLPVTETVCLTPNEDQLNQPTEPPPKPVFPPTAPKNVNLIEVSLSDLKPPEKADVPVEKYDGESDKEQFDDDQKVCCGFFFKDDQKAENDMAMKRAALLEKRLRREKETQLRKQQLEAEMEHKKEETRRKTEEERQKKEDERARREFIRQEYMRRKQLKLMEDMDTVIKPRPQVVKQKKQRPKSIHRDHIESPKTPIKGPPVSSLSLASLNTGDNESVHSGKRTPRSESVEGFLSPSRCGSRNGEKDWENASTTSSVASGTEYTGPKLYKEPSAKSNKHIIQNALAHCCLAGKVNEGQKKKILEEMEKSDANNFLILFRDSGCQFRSLYTYCPETEEINKLTGIGPKSITKKMIEGLYKYNSDRKQFSHIPAKTLSASVDAITIHSHLWQTKRPVTPKKLLPTKA

SEQ ID NO: 112199 - DNA, 4470 bp, Artificial Sequence
  derived and/or modified sequence
atgggagacgctgccgatcctcgcgaaatgcggaagactttcattgtccccgccatcaaaccgttcgaccactacgacttcagccgggcaaagatcgcctgcaatctggcctggcttgtggcaaaagctttcgggacagagaatgttccagaagagctccaggagcctttctatacagaccaatacgaccaagagcacattaaacctcccgtggtgaacttactactctccgccgagttatactgtcgtgctggtagcctgattctcaagagtgatgccgccaagccacttttagggcatgacgccgttatacaggcattagcccagaagggcctgtacgtgacagaccaagagaaactcgttaccgaaagagacctgcataaaaagccgattcaaatgtccgcacacctggcaatgatcgataccctgatgatggcctacactgttgagatggtgtctatagaaaaagtcattgcctgtgctcagcaatacagcgcatttttccaggctacagatctgccttacgatatcgaagacgcggttatgtattggataaacaaggttaacgagcatctgaaggatattatggagcaggagcaaaagcttaaggagcaccacactgtcgaggctccgggcggccaaaaaagcccaagcaagtggttttggaagctggtccccgcccgctacagaaaggagcagaccctgctgaaacaactgccatgtatcccgctggtggagaatctgctcaaagacgggacagacggatgcgccctggctgctctgatccacttttattgtcctgatgttgtgcggcttgaagatatctgcctcaaggaaactatgtctctcgccgactctttgtataatctgcagttaatccaggaattttgccaggaatatctcaaccaatgctgtcactttacactggaagacatgttatatgcggcctcttcaattaaatcaaactaccttgtgttcatggccgaattgttttggtggtttgaggtggtcaagccatcttttgttcaacctcgcgtggttcgccctcaaggtgccgaaccagtgaaagacatgccttcaatccccgtgttaaatgccgccaaacggaatgtcctggacagcagtagcgatttcccgtcaagcggcgaaggtgcaacctttacccagagccaccatcacttgccttcacgctactcccgcccccaagcgcattcaagtgctagtggcggtataagacgaagctcaagcatgtcctacgttgatggctttatcggcacttggcccaaggaaaagcgctcctctgtgcacggcgtgagcttcgatatcagttttgacaaggaggactctgtgcagagatcaacacctaatcgtggtattacaaggtccatttctaatgaggggctgacattgaacaattctcacgtatctaaacacatacgcaaaaacctatcctttaagcccatcaatggagaggaggaggcagagtctatcgaggaagaactaaacatcgacagccattccgatctgaaaagttgtgtccccctgaataccaatgaattgaatagtaacgagaacatacactataaattacctaacggagccttacaaaatcgcattctactcgacgaatttggcaatcagattgagacaccctccattgaagaagccctgcagataattcatgacaccgagaagtcacctcatactccgcagcccgatcagattgctaatggcttctttctccattcacaggagatgagtattctgaacagcaacataaaactgaatcagtcatcccccgacaatgtaaccgatactaagggcgctctgtcccctatcacagacaacacggaggtggacacaggaattcacgtcccgtctgaggacatccctgaaaccatggatgaggactcgtccctgcgtgactataccgtgagtctggattctgacatggatgatgcatccaaattcttgcaggactatgatattcgcactgggaacaccagagaggccctttcaccatgtccctcaacggtgagcaccaaaagccagcctggctccagcgccagctcatcctccggggtgaaaatgacctcgtttgctgaacagaagttccgaaagttaaaccacactgacggcaaatcctccggatcctcctctcagaaaaccacgccagaaggctctgaactcaacattccccacgtcgtagcttgggcacagatacccgaggaaaccgggctaccccagggccgcgacactactcaattactcgcaagcgagatggtccacctgaggatgaagctggaagagaaacgtcgggctatagaggcacaaaagaaaaaaatggaggctgcctttactaagcaaaggcagaaaatgggtaggactgcatttctgactgtagtcaaaaaaaagggcgacggaatcagtccgctgagggaggaagccgctggtgccgaggatgagaaagtttataccgaccgagcaaaggaaaaggaaagccagaagacagacggccagcggtccaaaagtttggccgatatcaaggaaagtatggaaaatccacaagctaaatggctgaagtccccgaccacaccaatagacccagaaaaacaatggaatctggcctctccatctgaagaaacgctgaacgaaggagagattttggaatatacgaaaagcatagaaaagctgaattcttccctccatttcctgcagcaggagatgcagaggttgagccttcaacaggaaatgctgatgcagatgagagaacaacagtcgtgggtcatttctcctccccaaccctctccacagaagcagatccgcgatttcaaaccatctaagcaggcaggcttatcctccgcgattgcaccgttcagttctgactctccaaggcccacacatccatcccctcagtcctccaaccggaagagcgctagcttttccgtcaaatcccagcggaccccgcgcccgaatgaactgaagataactcctctcaaccggaccctgacacctcccaggagtgtggattccttaccccggctaagaagattttcacctagccaggttccaatccagacccggtcatttgtgtgcttcggagatgacggcgaaccacaactaaaggagagtaagccaaaagaggaagtcaagaaggaggaactcgaaagcaaaggtaccctggaacagcgtggccacaacccagaggagaaagaaatcaagcctttcgagagtacggtctctgaggtcctcagtcttccggttaccgagactgtctgtctgacaccgaacgaggatcagctgaaccagcccaccgaaccaccccctaaacctgtcttcccccccactgcaccaaaaaacgtaaatctcatcgaagtgagtctctccgatttaaaaccacccgagaaggctgacgttcctgttgagaaatatgatggagagtctgataaggagcagtttgatgatgaccagaaagtttgttgcggcttttttttcaaggacgaccagaaagccgagaacgatatggccatgaaacgggctgcacttctggaaaagcgcttgaggcgggaaaaggaaactcagttaagaaagcaacagctggaagccgagatggagcacaaaaaagaagaaacaaggcgcaagacggaggaggaaaggcagaagaaagaggatgagcgcgcccggcgcgaattcatcagacaagagtatatgcgtcgcaaacagctgaagctgatggaggacatggacaccgtcatcaagcctcgtccacaagtggtgaagcagaagaagcagaggcctaagtcgatccatcgagatcacattgagtccccaaaaacgccgattaagggcccacccgtttcctcattaagcctggcgtccctgaacacaggcgacaacgaatctgtccactcaggtaagcgaaccccacgttcagagagcgtggaaggcttcctgtctcctagccgctgtgggtcccgtaatggggagaaggactgggaaaatgcgtctaccacctcctccgtcgcctcaggaactgagtatactggccctaaactgtataaggaaccctctgctaagagcaataagcatattattcaaaacgccctcgctcactgctgtctggcaggaaaagtaaatgagggccagaagaaaaaaatcttggaggagatggagaaatcggacgcaaacaactttctgattctctttcgcgattcaggctgtcagttcagaagtctgtatacttactgccccgagaccgaggaaatcaacaagctcacagggatagggcctaagagtataaccaaaaaaatgattgaaggcctctataagtataattcagatcgcaaacaattctcgcatatccctgccaagacactgtctgcatccgtggatgctatcaccatccattcccatctgtggcaaactaagagacccgtaacccccaaaaagctgttgccaaccaaagcctag

SEQ ID NO: 112200 - DNA, 4470 bp, Artificial Sequence
  derived and/or modified sequence
atgggagatgctgctgacccccgggagatgaggaagaccttcatcgtgcctgccatcaagccctttgaccactatgacttcagccgggccaagatcgcctgcaacctggcctggctggtggccaaggccttcggcacagaaaatgtgcctgaggagctgcaggagcccttctacacagaccagtatgaccaggagcacatcaagccccctgtggtgaacctgctgctgtctgctgagctgtactgccgggccggcagcctcatcctgaagagtgatgctgccaagcccctgctgggccatgatgctgtgatccaggccctggcccagaagggcctgtatgtgacagaccaggagaagctggtgacagagcgggacctgcacaagaagcccatccagatgtctgcccacctggccatgattgacaccctgatgatggcctacacagtggagatggtgtccattgagaaggtgattgcctgtgcccagcagtacagcgccttcttccaggccacagacctgccctatgacattgaagatgctgtgatgtactggatcaacaaggtgaatgagcacctgaaggacatcatggagcaggagcagaagctgaaggagcaccacacagtggaggcccctgggggccagaagagccccagcaagtggttctggaagctggtgcctgcccgctacaggaaggagcagaccctgctgaagcagctgccctgcatccccctggtggagaacctgctgaaggatggaacagatggctgtgccctggccgccctgatccacttctactgcccagatgtggtgcggctggaggacatctgcctgaaggagaccatgagcctggccgacagcctgtacaacctgcagctgatccaggagttctgccaggagtacctgaaccagtgctgccacttcaccctggaggacatgctgtatgctgccagcagcatcaagagcaactacctggtgttcatggccgagctgttctggtggtttgaggtggtgaagcccagctttgtgcagccccgggtggtgcggccccagggcgctgagcctgtgaaggacatgcccagcatccctgtgctgaatgctgccaagagaaatgtgctggacagcagcagtgacttccccagcagtggagagggcgccaccttcacccagagccaccaccacctgcccagccgctacagccggccccaggcccacagcagcgccagcggcggcatccgccgcagcagctccatgtcctatgtggatggcttcatcggcacctggcccaaggagaagaggagctctgtgcacggcgtgtcctttgacatcagctttgacaaggaggacagcgtgcagaggagcacccccaacagaggcatcaccaggagcatcagcaatgaaggcctgaccctgaacaacagccacgtgtccaagcacatcaggaagaacctgtccttcaagcccatcaatggagaggaggaggccgagagcattgaggaggagctgaacatcgacagccacagcgacctgaagagctgtgtgcccctgaacaccaatgagctgaacagcaatgaaaacatccactacaagctgcccaacggggccctgcagaaccgcatcctgctggatgaatttggaaaccagatcgagacccccagcattgaggaggccctgcagatcatccatgacacagagaagagcccccacaccccccagcctgaccagatcgccaacggcttcttcctgcacagccaggagatgagcatcctgaacagcaacatcaagctgaaccagagcagcccagacaacgtgacagacaccaagggggccctgagccccatcacagacaacacagaggtggacaccggcatccacgtgcccagcgaggacatccctgagaccatggatgaggacagcagcctgcgggactacacagtgtccctggacagcgacatggatgatgccagcaagttcctgcaggactatgacatcagaactggaaacacccgggaggccctgagcccctgccccagcacagtgtccaccaagagccagcccggcagcagcgccagcagcagcagtggagtgaagatgaccagctttgctgagcagaagttcaggaagctgaaccacacagatggcaagagcagcggcagcagcagccagaagaccaccccagagggcagcgagctgaacatcccccacgtggtggcctgggcccagatccctgaggagaccggcctgccccagggccgggacaccacccagctgctggccagcgagatggtgcacctgaggatgaagctggaggagaagaggcgggccatcgaggcccagaagaagaagatggaggccgccttcaccaagcagaggcagaagatgggccgcacagccttcctgactgtggtgaagaagaagggagatggcatcagccccctgcgggaggaggccgccggggctgaagatgagaaggtgtacacagaccgggccaaggagaaggagagccagaagacagatggccagaggagcaagagcctggccgacatcaaggagagcatggagaacccccaggccaagtggctgaagagccccaccacccccattgatcctgagaagcagtggaacctggccagccccagcgaggagaccctgaatgaaggagagatcctggagtacaccaagagcattgagaagctgaacagcagcctgcacttcctgcagcaggagatgcagaggctgagcctgcagcaggagatgctgatgcagatgagggagcagcagagctgggtgatcagccccccccagcccagcccccagaagcagatccgggacttcaagcccagcaagcaggccggcctgagcagcgccatcgcccccttcagcagtgacagcccccggcccacccaccccagcccccagagcagcaacaggaagagcgccagcttctctgtgaagagccagaggaccccccggcccaatgagctgaagatcacccccctgaacagaaccctgaccccacccaggtctgtggacagcctgccccggctgcggcgcttcagccccagccaggtgcccatccagaccaggagctttgtgtgctttggagatgatggagagccccagctgaaggagagcaagcccaaggaggaggtgaagaaggaggagctggagagcaagggcaccctggagcagaggggccacaaccctgaggagaaggagatcaagccctttgagagcacagtgtctgaggtgctgagcctgcctgtgacagaaacagtgtgcctgaccccaaatgaagaccagctgaaccagcccacagagcccccacccaagcctgtgttccccccaacagcccccaagaatgtgaacctgattgaggtgtccctgagtgacctgaagcccccagagaaggcagatgtgcctgtggagaagtatgatggagagagtgacaaggagcagtttgatgatgaccagaaggtgtgctgcggcttcttcttcaaggatgaccagaaggccgagaatgacatggccatgaagagagctgccctgctggagaagaggctgcggcgggagaaggagacccagctgaggaagcagcagctggaggccgagatggagcacaagaaggaggagaccaggaggaagacagaggaggagcggcagaagaaggaggatgagcgggcccggcgggagttcatccggcaggagtacatgaggaggaagcagctgaagctgatggaggacatggacaccgtcatcaagccccggccccaggtggtgaagcagaagaagcagaggcccaagagcatccaccgggaccacatcgagagccccaagacccccatcaagggcccccctgtgagcagcctgagcctggccagcctgaacacaggagacaatgaatctgtgcacagcggcaagaggacccccaggtctgagagcgtggagggcttcctgagccccagccgctgtggcagcagaaatggagagaaggactgggagaatgccagcaccaccagctctgtggccagcggcacagagtacacaggccccaagctgtacaaggagcccagcgccaagagcaacaagcacatcatccagaatgccctggcccactgctgcctggccggcaaggtgaatgaaggccagaagaagaagatcctggaggagatggagaagagtgatgccaacaacttcctgatcctcttccgggacagcggctgccagttccgcagcctgtacacctactgcccagagacagaggagatcaacaagctgaccggcatcggccccaagagcatcaccaagaagatgattgagggcctgtacaagtacaacagcgacaggaagcagttcagccacatcccagccaagaccctgagcgcctctgtggatgccatcaccatccacagccacctgtggcagaccaagaggcctgtgacccccaagaagctgctgcccaccaaggcctag

SEQ ID NO: 112201 - DNA, 4470 bp, Artificial Sequence
  derived and/or modified sequence
atgggcgacgccgccgacccccgggagatgcggaagaccttcatcgtgccggccataaaacctttcgaccattatgatttttcccgggctaagattgcctgtaaccttgcctggctcgtggcaaaagcatttggtacggagaatgtaccagaggagttacaggagccattttatacagatcagtatgaccaagagcacatcaagccaccagtggtaaatctgctgctctccgcggagctgtactgccgagcaggctcccttattctcaagtctgatgcagctaaacctcttcttggtcatgatgcggtgatccaggctttagcacagaaagggttgtacgttactgaccaggagaagcttgtgaccgagcgagatcttcataagaagcccatccagatgtctgcacacctggctatgattgacaccctaatgatggcctacacagtcgaaatggtgtccattgaaaaagtcatagcatgtgcacaacagtatagcgccttctttcaagccaccgacctgccctatgacatagaagatgccgtgatgtattggatcaacaaggtcaatgaacatctgaaggacattatggaacaggagcagaaactgaaagagcaccacaccgtggaggccccgggaggccagaaaagcccttccaaatggttctggaagctcgtgccagcccgatacagaaaggagcagacacttctcaaacagctaccctgtataccactggttgaaaatttgttgaaagacggtactgacgggtgtgcgctggccgcgctgatacatttttattgtccagatgtggtccggctggaagatatctgtctgaaagagactatgagtctcgctgactcgctttataaccttcagctgatccaggaattctgtcaagagtaccttaaccagtgttgccatttcacactggaggatatgctgtacgccgcatcctctatcaaaagcaattatctggtctttatggccgagctgttctggtggttcgaagtcgtgaagccatcttttgtgcagccaagggtcgtccggccacagggagcggagcctgttaaagacatgccaagtattcctgtactgaacgccgccaagcggaacgtgctggatagttcttcagatttcccgagctcgggagaaggagccacctttactcaatcccatcaccacctgccctcccggtacagcagacctcaagcccactccagtgcatccggagggattagacgtagtagttcaatgtcatatgtcgatggctttatcggcacatggcctaaggaaaaacgttcttcagtccacggcgtgtcgtttgacatcagctttgataaagaagacagtgtgcagcgatccacacctaatagaggcattaccaggagtatctcaaacgaggggctgactcttaataatagccacgtcagcaagcatattagaaaaaacctgtcgttcaagccaataaatggggaggaggaagccgagtctatcgaggaagagctcaacatcgacagtcactccgaccttaaatcgtgtgttcccctgaatacgaacgagctaaacagtaatgagaatattcactacaagctccctaatggggccctgcagaataggatcctcttggacgagtttgggaaccaaatagaaacccccagtattgaggaggcgctgcaaattattcacgataccgaaaaaagccctcacactcctcagcccgatcagatcgctaacgggtttttcctgcatagtcaggagatgagcattctcaattcgaatatcaagctgaaccaaagttcccctgacaacgttacagataccaagggtgcactttctccaatcaccgacaacactgaagtcgacaccggaattcatgtcccctccgaggatattcctgagactatggatgaggattcctcactgagggactatacagtaagtctggattctgacatggatgatgctagtaagtttctgcaagactacgacatcaggaccggcaacaccagagaagccctgagcccctgtccaagtactgttagcacgaagtcacagccagggtcgagcgcatcctcctcttctggggtgaaaatgaccagcttcgcagagcagaagttcagaaaacttaaccatacagacggaaagagtagcggctcttctagccagaagacaacccctgaggggtcagagctcaacatccctcacgtagtagcatgggcccagatcccagaagagactggacttcctcaaggcagggatactacccaattactcgccagcgaaatggttcatctcagaatgaaacttgaggaaaagcggcgagccatcgaggcccagaagaaaaagatggaggcagccttcacaaagcaacggcagaaaatgggtaggaccgcatttctgactgtggtaaagaagaaaggtgacgggattagcccactccgggaagaggccgcaggcgctgaggacgagaaggtctataccgatcgggccaaggaaaaagaaagccagaagactgacggacagcgtagcaagtcccttgcagacatcaaggagtcaatggaaaacccacaggctaaatggctgaaatctcctaccaccccgatcgacccggagaagcaatggaatctggcaagccccagcgaggaaacgctgaatgaaggagagatcctggaatataccaagtcaattgagaagctaaactcctccctgcactttctgcaacaggaaatgcagcgcctgagcctccagcaggagatgttgatgcagatgagagagcagcaatcttgggtgatctcccccccgcaaccgtcgccccagaagcagatcagggatttcaagcccagtaagcaggccgggttgtctagcgcaatagcccccttttccagcgatagccccaggcctacacatcccagtccgcaaagcagtaacagaaaatcagcctccttcagtgtgaaaagccagcgtactcctagaccgaacgagttgaagatcaccccactaaaccggacgctgaccccaccgagatctgttgatagtctcccacgcctgcgacgtttttcgccatcacaggttcctattcagacccgttctttcgtctgcttcggagatgacggtgagccccaactcaaggaatctaagcctaaggaagaagtcaagaaggaagagctagaaagcaagggaactcttgaacagcggggccacaatcccgaggagaaagagattaagccttttgaatcaacggtgtcagaggtactgtctcttcccgtcacagaaactgtgtgcttgactcctaacgaggaccaactcaaccagcccacagagccccctccgaagccggtgtttccccctaccgcaccaaaaaacgtcaatctgattgaggtctcactcagcgaccttaaacctccggagaaggcagacgtgccggtggaaaaatacgacggggaatctgacaaggaacagttcgacgacgaccaaaaagtttgttgtgggttcttctttaaagacgatcagaaggccgaaaatgacatggcgatgaagcgggcggcactgctggagaaacgcttgagacgggagaaggagacgcagctgcgcaaacagcagctggaagcagagatggaacataaaaaggaggaaaccagaaggaaaactgaggaagagagacagaaaaaagaagacgaacgcgcacgtcgggagtttataaggcaggagtacatgcggcgtaagcagctcaaattgatggaggatatggataccgtcatcaagcctcgcccacaggtagtgaagcaaaagaagcagagaccaaagagcatccatagggaccatatcgagtcacctaagacacctattaagggaccacctgttagcagcctgtccctcgcctctctgaacaccggtgataacgagtcagttcatagcgggaagaggaccccccgttccgaaagtgtggagggcttcttaagcccctcacggtgtggatctcgtaacggtgaaaaagattgggagaacgcgagcactacaagtagtgttgcttccgggactgagtacaccggaccaaaactgtataaggagccgtctgccaagtctaacaagcatattattcagaatgctctggcgcactgttgcctggctgggaaggtgaacgaaggacaaaaaaagaaaattctcgaggaaatggagaagtctgatgcaaataactttctgattctttttcgcgatagtggatgtcagtttaggagcttgtacacgtactgtccagaaaccgaagagataaataagttgaccggcataggccccaagagcataacgaaaaagatgatcgagggtttatataagtataacagtgaccggaagcagttttcgcatatacctgccaagacactgtctgcctccgttgatgcaataactatccactcacacttgtggcagaccaagaggcccgtaacgcctaagaagttattacccaccaaggcgtag

SEQ ID NO: 112202 - DNA, 4470 bp, Artificial Sequence
  derived and/or modified sequence
atgggtgatgcagcggaccctagagaaatgcggaaaacgtttatagtgcccgcaattaaaccattcgatcactatgatttctcaagggccaagatcgcctgcaatcttgcttggctggttgctaaggcttttggcacagagaatgtaccagaggagcttcaggaaccattttacacggatcaatacgaccaggagcatattaaaccaccagtggttaacctactgttgtccgcagaactttattgcagagctgggtctctgattctgaagtccgacgcggcaaaaccgctcctggggcacgatgccgttatccaggcattagcccaaaagggtctctacgttacagatcaggagaaactggtcacagaacgcgacctgcacaagaagcctattcagatgtcagcccatctggcaatgatcgatacccttatgatggcatatacagtcgagatggtcagcatcgaaaaggtcatcgcttgcgcgcagcaatactctgcctttttccaggcaaccgacctgccatacgacatcgaggatgccgtaatgtattggatcaacaaagtcaacgagcatctcaaggacatcatggagcaagaacagaagctaaaggaacaccacacagtcgaggcaccaggtgggcagaagtcaccttcaaagtggttctggaaactggttcctgctcggtacaggaaggaacagactctgctaaagcagctgccctgtatacccctggtcgagaatctgctaaaagatggcactgacggatgcgccctggcagccctgattcacttctactgccccgatgtagtgaggttggaggatatttgtctgaaggaaactatgagtctggccgatagcttgtataatctacagttgatccaagaattttgccaggaatacttaaaccaatgttgtcacttcaccctggaggacatgttgtacgccgcatcgagcatcaaaagtaattacttagtgtttatggctgagttattttggtggttcgaggtcgttaaaccaagctttgttcagccacgggtggtgaggccacagggagccgaaccagtgaaggatatgccatcgatccccgtactgaatgctgccaaaaggaatgttctcgatagcagctccgatttcccatcctccggcgaaggagccacatttacacagtctcaccaccacctgccatcaagatacagtcggccacaggctcacagttcagcttcaggcggaatccgacggtcttcctctatgtcttacgtggatggtttcatagggacctggccaaaggaaaaaaggtcttctgtgcacggggtgtctttcgacatctctttcgataaggaggacagcgtgcaacggtctacacccaatagaggcatcactaggagtatttctaacgaaggactgactctcaataatagccacgtctcaaaacatattcgaaagaatctgagctttaagccgatcaatggagaagaggaagccgaaagcatcgaggaggaattgaacatcgattcacattctgacttaaaatcgtgcgtccctctcaatacaaacgagctcaactccaatgagaacattcattataaactccctaacggcgcactgcaaaaccggatcctgctggacgagttcggcaaccagattgagacaccttccattgaagaagccctgcagattatccatgatactgagaaatcccctcatacgccgcaacctgaccaaattgcaaacggtttttttctccactcccaagagatgtctattttgaattcaaacatcaaactcaatcaatcatcccccgacaatgtgacagatactaagggagccctgagcccgataacggataacaccgaggtcgacaccggcattcacgtgccatctgaagacatcccagaaaccatggacgaggactcatccctgcgagattatactgtgagtcttgatagtgacatggatgacgcttccaaatttctccaggactacgacattcggaccggcaacaccagggaggcactgtctccgtgtccctctactgtgtcgaccaagagccaacctggttcctccgcttccagcagttcaggggtaaaaatgactagttttgccgagcaaaagttccgaaaactaaatcacaccgatggaaaatcctccggatcctcttcgcagaaaactacccccgaagggagtgaactgaatatccctcacgtagtcgcttgggcccagatcccagaggaaactggcctccctcagggaagagacaccacccaacttctggcaagtgaaatggtgcatctacgaatgaagctcgaggaaaagcggcgagccattgaggctcagaagaaaaaaatggaggctgcgttcacaaaacaaagacagaaaatggggagaactgcattccttacggtggtcaagaaaaaaggcgatggaatcagcccactgcgagaggaagccgcaggagccgaggatgagaaagtctataccgatcgggctaaggagaaggagagccaaaagacagacggacagcggtcaaagtcattagcagacatcaaggagtccatggagaaccctcaggcaaagtggctgaaatcccctaccactcccatcgaccctgagaagcagtggaatctcgccagcccaagcgaagagacattgaacgaaggtgagatccttgagtatactaaatccatcgagaagctgaattcttccctgcatttcctgcagcaggagatgcagcgactgagtctgcagcaggagatgctgatgcagatgagagaacagcagtcttgggtgatctcccctccacagcctagcccacagaagcagatcagagattttaagcccagcaaacaagccggactgagtagcgccattgcccctttttcctcagactccccaagaccaactcacccaagccctcagtcctcaaatcgaaaaagcgcctcgtttagcgtgaagtcacagagaacacccagaccgaatgagctgaagataactccactgaaccgaaccctaactcctccgaggagtgtggattctctccccagattgcggcgattctctccaagccaagtgcccatacaaactcggtccttcgtgtgttttggagacgacggtgaaccacaattgaaggagagcaagcccaaggaagaggtaaaaaaagaagaactcgaatctaagggaactctagaacaacggggacacaatcctgaagagaaagaaattaagccattcgagtcaacagtatctgaagtgttgagtctccctgtcacagaaacagtatgtctcacaccaaacgaggatcagttgaatcagcccacagagccccctcccaagccggtgtttccaccaaccgcccctaaaaatgttaacttgatcgaagtgagtctgagtgatttgaaaccgccagagaaggccgacgtcccggttgagaaatacgacggggaatcagataaggaacagtttgacgacgatcagaaagtttgctgcgggttcttcttcaaagatgaccaaaaagccgagaacgacatggcaatgaagcgtgcagccttgcttgaaaaaagactgcggagggagaaagagactcaactccgcaagcagcaattggaggctgaaatggagcacaagaaggaggagacacgtagaaagactgaggaagagcggcagaagaaagaggatgaacgcgctaggagagagtttattcggcaggaatatatgcgcaggaagcagctcaagttgatggaggacatggatacagtcatcaagcctaggccacaagtcgtgaaacagaagaagcaacggccaaagagcatccacagagatcatatcgagtctcctaagacccccatcaagggcccaccagtctcttctttgagcttggcaagcctcaatacaggcgataacgaaagtgtccactcgggtaagagaacccctcgttcagagagtgttgagggcttcctctctccctctcgttgcggttccagaaacggcgagaaggactgggagaacgccagtacaacctcctccgtggcatcaggaaccgagtataccggtcctaaattatataaagagcctagcgcaaagtccaataaacacataattcagaacgcccttgcacattgctgtctagcaggaaaggtcaatgagggccaaaagaagaagatactcgaagaaatggagaagtccgacgccaataatttcttaatccttttccgggattcgggatgccagttccggagcttatatacctactgtcctgagacggaagagattaataagctgacagggataggtcctaagtcaatcaccaagaagatgatagagggattatataagtataactctgatcggaaacagttttctcatatccccgcaaagacactgagcgcttctgtcgacgcaattactattcattcccacctgtggcagacgaagcggcctgtcacaccaaaaaaactgctgcctactaaggcttag

SEQ ID NO: 112203 - DNA, 7161 bp, Artificial Sequence
  derived and/or modified sequence
cgccatgtgaaggttagggccgggacatcccgaggagccgcggtgaaagatgggggatgctgcagaccccagggagatgagaaagacgttcattgttccagccatcaagccttttgaccactatgatttctccagggccaaaatcgcctgcaatctggcctggctggtggccaaagcctttgggacagaaaatgtgccagaggaacttcaagaaccattttacacagatcagtatgaccaggaacacatcaaaccacctgttgttaatttgcttctatcggctgaactatactgtcgtgctgggagtctcattctcaagagtgatgctgcaaaaccccttttgggccatgatgctgtaatccaggctttagcacagaaaggtctttatgtcactgaccaggaaaaattggtaactgaacgagatctccacaagaaacccatacagatgagtgcacatttggccatgatcgataccctcatgatggcttatactgtagaaatggtcagtatagaaaaagtaattgcgtgtgctcagcagtattcagctttttttcaagccacagatctgccctatgatattgaggacgctgtcatgtactggataaataaggtaaatgaacatttgaaagacataatggaacaagaacaaaaactgaaagaacatcacacagttgaagctccaggaggtcaaaagtctccttccaaatggttttggaaactggttccagctcgttatcggaaagagcaaacattgcttaagcaactgccttgcattccattggtagaaaatttgttgaaggatgggacagatggctgtgcattagctgcccttattcatttttactgtcctgatgttgtcagattagaggatatttgtttgaaagaaactatgtctttggctgatagcctgtataatctgcagctgattcaagaattttgccaagaatacttgaaccagtgttgccatttcactctggaagatatgctctatgctgcttcatccataaagagtaattatttggtgttcatggcggaactgttctggtggtttgaagtggtgaagccgtcttttgtacagcctcgtgttgttcgtccacaaggagctgaacctgtaaaagatatgccttcaattcctgtcttgaatgctgccaaaagaaatgtcttagatagtagttctgacttcccttcaagtggggaaggagctacatttacacagtctcatcatcatttgccttctaggtattcacgtccccaggctcattcttcagcctcaggaggaattagaaggtcttcatctatgtcttatgttgatggcttcatagggacatggcccaaagagaaaagatcatcagtgcatggcgtatcatttgatatttcttttgataaagaagatagtgtacagagatccactccaaaccgaggaatcactcgttctattagtaatgaaggacttactctgaacaacagtcatgtatctaaacacattaggaaaaatttgtccttcaagccaataaatggagaagaggaagcagagagcattgaagaagaacttaatatagattctcacagtgacctcaaatcttgtgtgccccttaacacaaatgaactaaattctaatgagaatattcattacaagcttccaaatggagctttacaaaatagaatacttcttgacgagtttggcaatcagatcgagacaccaagcattgaagaagcattacaaataattcatgatactgaaaaatctcctcatacacctcagccagaccaaattgctaatggcttctttcttcatagtcaagaaatgagtatcttaaattcaaatatcaagttaaatcaatctagtcctgataatgtaactgatacgaaaggtgccttgagtcccataactgacaatactgaagtagacactggaattcacgttccttcagaagatattcctgaaactatggacgaagattcttcgttgagagattatactgtaagcttggactctgacatggatgatgcatctaaatttcttcaggattatgatattcgaactggcaacaccagggaagctttgagtccttgtccaagtactgtaagtaccaagtctcagccaggcagcagtgcttcttctagttctggagttaaaatgaccagctttgctgaacaaaaattcaggaaactgaatcataccgatggaaaaagtagtggaagcagttctcaaaaaactacaccagaaggctctgaacttaatattcctcatgtggttgcttgggcacaaattccagaagaaacagggcttccacagggacgggacactacccagctgttggcctctgaaatggtgcatcttaggatgaaactagaagaaaagaggcgtgctatagaagcccagaaaaagaaaatggaagctgcttttaccaaacagagacagaaaatgggaaggacagcattccttactgtagtgaaaaagaaaggggatgggatatctcctctacgagaggaagcggcgggtgcagaagatgagaaagtatatactgatcgagcaaaagaaaaggaatcacaaaaaactgatggacaaaggagcaagtcactggcagatataaaagagagcatggagaatcctcaagccaaatggctaaagtctccaactacacctattgatcctgagaagcagtggaacctggcaagcccctcagaagaaactttaaatgaaggagagattttagaatataccaaatccattgaaaagttaaattcatccctgcattttctacaacaagaaatgcaacgcttgtcacttcagcaggagatgttaatgcagatgagagagcaacaatcttgggtgatttcacctccacaaccctctccacagaaacagattcgagattttaagccttctaagcaggcaggcctgtcatcagccattgcaccattctcctcagactcccctcgtcctactcacccatctccacagtcttctaacaggaaaagtgcatctttttctgttaaaagtcaaaggactcctaggccaaatgagttaaaaataacacctttgaatcgaaccttgacacctcctcggtctgtggatagccttcctcggttaaggaggttttcaccaagtcaagttcctattcaaactaggtcatttgtatgttttggggatgatggagaacctcagttaaaggaatccaaacctaaagaggaagttaaaaaggaggaattggaatccaaagggactttggaacagcgtggacataatccagaagaaaaggaaatcaaaccttttgagtcaacagtctctgaagtcctatcactgcctgtcacagagactgtatgtctgacaccaaatgaggaccaattgaatcaacccacagaaccccctcctaaacccgttttcccacccactgctccaaaaaatgttaatctgattgaagtttccctctcagatttgaaaccccctgaaaaggctgatgtacctgttgaaaaatatgatggagaaagtgataaagaacaatttgatgatgaccagaaagtatgctgtggattcttttttaaggatgatcaaaaagcagaaaatgatatggcaatgaaacgggcagctttgttggagaaaagattaagaagggaaaaggaaactcagctccggaaacaacagttggaagcagaaatggagcataagaaggaggaaacaaggcgtaaaactgaggaagaacgtcagaagaaagaagatgagagagcacgcagagaatttattaggcaagaatatatgaggcggaaacaactgaaactaatggaagatatggatacagtaattaaaccccgtcctcaagtagtaaaacaaaaaaaacagcgaccaaaatctattcacagagatcatattgaatcccccaaaacaccaataaagggtcctccagtctctagcctttctttggcatcgctgaacacgggtgataacgagagtgtacattcaggcaagaggacgccaagatcagagtctgtagaaggcttcttatctccaagtcgttgtggcagtcgaaatggagaaaaagactgggagaatgcatcaacaacttcttcagtggcttctggaacagaatatacaggaccaaagctctacaaagaacccagtgcaaaatccaataagcacataatacaaaatgctttagctcattgctgtttggctggaaaagtaaatgaaggtcagaagaaaaaaatactggaggaaatggagaaatcagatgccaacaacttcttaatcttgttccgggattcaggatgccagttcagatctttatacacttattgcccagaaactgaagaaatcaataaactgactgggataggccctaaatctatcactaaaaaaatgattgaaggactttacaaatataattctgacaggaaacagtttagccacatacccgctaaaactttatctgccagtgttgatgcaattaccattcatagccatttatggcagaccaaaagaccagtaacacccaaaaaacttttacccactaaggcatagaagttgggaaatacttgcttcagaacattcatggtaaatttgcacttcatctttcctgcctatagaaaatctttctaattgccaacaagacttttattaattaaaactggacattaagctctgttgtcatgaacaactggaatgtaaaccacagtattttggagtgcagaacattctcaattaagtgataagtccaaatgatgaaggaaatgttttaattcacaaatggagatttgtatgtgttatcaggttcacctgcttgatattagatacattaaagcactgaattttcatggatattagttggatttatcattgaaatatggttaagattacaaattatgtgttttatttgttgcttttttttaaccttttaatgtatattcttgtcttcagatggtttgctatttttctctcctgggggtttattctaagatacctttgtattttatttcatgtggagatcatgaaagtaggaaatatacctttagaagtaactcgcacctttcttatgatgttaagagaaacactagtgtttagttttacagtaaccctcatattttaatggtgttacagcatttgcaaaaattattctgctaagtatttacaactctatttattattcactcaagtattaacattctctattaaataagaggaggtgttgtaaagagctgctagtaggttcgctttaaaccacatgagcttaaccaagaatatgttatgagaagttgctgattaaatcagtgctgtttttacaccacttctggccaactcagaataatttagattgttcttttaacaaaaaaggctttctatctcttttaaagtaagtcactttataagttggcagaagtgaatgacactttgagagtagtctttcaatctgaagatgtaagacttcctgaaacaagttctcaagaagtctttacattatatttataactcatataaaaattatatttagaatttttaaacatgtacaaagggctacattttaattttaaaatagcttcacattattttacttatattgggtttttcttcattttaatccttttcaagtggaatggcttagaataagtatacacttgaaatctcctctacatgatctttgttctttaacagtgtataccagagggttagttggggaaaaacttcattctcaggaaaagacttgaatgattatgtgaccctgttatatttcagtgttgtgacaaatgtgtaaactagcgggggaagacagtattgtatcataaatgagatgcgtagtttgttttctttcatgggaagtagagataaaaatatatacatttctctaattgagttgtttagagaaagaactaatgtctcatatgatgtatttacttattttaaaaaaaagaataggaatgagatgtccctgagctgtacttttctattattataaggcctttaggcatcagtgcatctgggttatcaacattttctcaaatgctgtcaatattttactgtaatttatgttcttatatttatgtatatttgttaaaactgtaaaaaaatttcacagatttttttccaatacctgtgcaagatacatgtgtagctcaaaactatttgtgatctactgtttgcatgtaagagaccaggatatgtaactcttatattttaagtgtatacatattgtgtatataacatatggatattaaaaatggggaattgcacattttaccttttggacagtaatttctatcacagttagaaggaaatgatagtcaaatacacgtttagattaaaactagtttaaaaaattataaatgaatctaatcaaaatgtgaatagtagtcaaaaggataatttaataagcattttacgttactaaatttgttcatttcaatattaactaaatttccctcatcaaagcaatctttgtgatattacttcgctattaaataaagaaaattggatgcaagacaatggagaaactttaaaactaaacaggaccaccctttattcttaaatttgtgtgtgtccaacagttgaattgaatgtctataaggtctaaaggtagaatgtgaatattgccacagagttcattgctctcagtataagattttactttattaatgcagaaggaatatggatatatttctttaagtctgcagatttttttattatggtgcagcttttttttaattatgtttttaaaattatacagttgaaaaatatgccatttcataaagtctgaggattttcgtcaaccttactgaaacacactggtgctttcatcatcagaggtcaaattattatgataactattccattaagtttgccaaacatttgtcgtggttaccagtgcagcctgtcaaattctgctatttgacacagctttggaaagatttagttcttggtttttccgttttgtattagaatgactgttacagttttatttggctgtttaaagccaaattcagctatttaattatggtttcatggacactgttgagcaatgtacagtgtatggtgtgcttacctgtccactctagagcattgcttacaggttttttgttttttaagatgctgtgctgtaaaatactgtcatacttgctatttcctggtacagtgtagtttttcccctttcatttgaataaaagcatggcacc

SEQ ID NO: 112204 - DNA, 4470 bp, Artificial Sequence
  derived and/or modified sequence
atgggcgacgccgccgaccccagagagatgagaaagaccttcatcgtgcccgccatcaagcccttcgaccactacgacttcagcagagccaagatcgcctgcaacctggcctggctggtggccaaggccttcggcaccgagaacgtgcccgaggagctgcaggagcccttctacaccgaccagtacgaccaggagcacatcaagccccccgtggtgaacctgctgctgagcgccgagctgtactgcagagccggcagcctgatcctgaagagcgacgccgccaagcccctgctgggccacgacgccgtgatccaggccctggcccagaagggcctgtacgtgaccgaccaggagaagctggtgaccgagagagacctgcacaagaagcccatccagatgagcgcccacctggccatgatcgacaccctgatgatggcctacaccgtggagatggtgagcatcgagaaggtgatcgcctgcgcccagcagtacagcgccttcttccaggccaccgacctgccctacgacatcgaggacgccgtgatgtactggatcaacaaggtgaacgagcacctgaaggacatcatggagcaggagcagaagctgaaggagcaccacaccgtggaggcccccggcggccagaagagccccagcaagtggttctggaagctggtgcccgccagatacagaaaggagcagaccctgctgaagcagctgccctgcatccccctggtggagaacctgctgaaggacggcaccgacggctgcgccctggccgccctgatccacttctactgccccgacgtggtgagactggaggacatctgcctgaaggagaccatgagcctggccgacagcctgtacaacctgcagctgatccaggagttctgccaggagtacctgaaccagtgctgccacttcaccctggaggacatgctgtacgccgccagcagcatcaagagcaactacctggtgttcatggccgagctgttctggtggttcgaggtggtgaagcccagcttcgtgcagcccagagtggtgagaccccagggcgccgagcccgtgaaggacatgcccagcatccccgtgctgaacgccgccaagagaaacgtgctggacagcagcagcgacttccccagcagcggcgagggcgccaccttcacccagagccaccaccacctgcccagcagatacagcagaccccaggcccacagcagcgccagcggcggcatcagaagaagcagcagcatgagctacgtggacggcttcatcggcacctggcccaaggagaagagaagcagcgtgcacggcgtgagcttcgacatcagcttcgacaaggaggacagcgtgcagagaagcacccccaacagaggcatcaccagaagcatcagcaacgagggcctgaccctgaacaacagccacgtgagcaagcacatcagaaagaacctgagcttcaagcccatcaacggcgaggaggaggccgagagcatcgaggaggagctgaacatcgacagccacagcgacctgaagagctgcgtgcccctgaacaccaacgagctgaacagcaacgagaacatccactacaagctgcccaacggcgccctgcagaacagaatcctgctggacgagttcggcaaccagatcgagacccccagcatcgaggaggccctgcagatcatccacgacaccgagaagagcccccacaccccccagcccgaccagatcgccaacggcttcttcctgcacagccaggagatgagcatcctgaacagcaacatcaagctgaaccagagcagccccgacaacgtgaccgacaccaagggcgccctgagccccatcaccgacaacaccgaggtggacaccggcatccacgtgcccagcgaggacatccccgagaccatggacgaggacagcagcctgagagactacaccgtgagcctggacagcgacatggacgacgccagcaagttcctgcaggactacgacatcagaaccggcaacaccagagaggccctgagcccctgccccagcaccgtgagcaccaagagccagcccggcagcagcgccagcagcagcagcggcgtgaagatgaccagcttcgccgagcagaagttcagaaagctgaaccacaccgacggcaagagcagcggcagcagcagccagaagaccacccccgagggcagcgagctgaacatcccccacgtggtggcctgggcccagatccccgaggagaccggcctgccccagggcagagacaccacccagctgctggccagcgagatggtgcacctgagaatgaagctggaggagaagagaagagccatcgaggcccagaagaagaagatggaggccgccttcaccaagcagagacagaagatgggcagaaccgccttcctgaccgtggtgaagaagaagggcgacggcatcagccccctgagagaggaggccgccggcgccgaggacgagaaggtgtacaccgacagagccaaggagaaggagagccagaagaccgacggccagagaagcaagagcctggccgacatcaaggagagcatggagaacccccaggccaagtggctgaagagccccaccacccccatcgaccccgagaagcagtggaacctggccagccccagcgaggagaccctgaacgagggcgagatcctggagtacaccaagagcatcgagaagctgaacagcagcctgcacttcctgcagcaggagatgcagagactgagcctgcagcaggagatgctgatgcagatgagagagcagcagagctgggtgatcagccccccccagcccagcccccagaagcagatcagagacttcaagcccagcaagcaggccggcctgagcagcgccatcgcccccttcagcagcgacagccccagacccacccaccccagcccccagagcagcaacagaaagagcgccagcttcagcgtgaagagccagagaacccccagacccaacgagctgaagatcacccccctgaacagaaccctgaccccccccagaagcgtggacagcctgcccagactgagaagattcagccccagccaggtgcccatccagaccagaagcttcgtgtgcttcggcgacgacggcgagccccagctgaaggagagcaagcccaaggaggaggtgaagaaggaggagctggagagcaagggcaccctggagcagagaggccacaaccccgaggagaaggagatcaagcccttcgagagcaccgtgagcgaggtgctgagcctgcccgtgaccgagaccgtgtgcctgacccccaacgaggaccagctgaaccagcccaccgagcccccccccaagcccgtgttcccccccaccgcccccaagaacgtgaacctgatcgaggtgagcctgagcgacctgaagccccccgagaaggccgacgtgcccgtggagaagtacgacggcgagagcgacaaggagcagttcgacgacgaccagaaggtgtgctgcggcttcttcttcaaggacgaccagaaggccgagaacgacatggccatgaagagagccgccctgctggagaagagactgagaagagagaaggagacccagctgagaaagcagcagctggaggccgagatggagcacaagaaggaggagaccagaagaaagaccgaggaggagagacagaagaaggaggacgagagagccagaagagagttcatcagacaggagtacatgagaagaaagcagctgaagctgatggaggacatggacaccgtgatcaagcccagaccccaggtggtgaagcagaagaagcagagacccaagagcatccacagagaccacatcgagagccccaagacccccatcaagggcccccccgtgagcagcctgagcctggccagcctgaacaccggcgacaacgagagcgtgcacagcggcaagagaacccccagaagcgagagcgtggagggcttcctgagccccagcagatgcggcagcagaaacggcgagaaggactgggagaacgccagcaccaccagcagcgtggccagcggcaccgagtacaccggccccaagctgtacaaggagcccagcgccaagagcaacaagcacatcatccagaacgccctggcccactgctgcctggccggcaaggtgaacgagggccagaagaagaagatcctggaggagatggagaagagcgacgccaacaacttcctgatcctgttcagagacagcggctgccagttcagaagcctgtacacctactgccccgagaccgaggagatcaacaagctgaccggcatcggccccaagagcatcaccaagaagatgatcgagggcctgtacaagtacaacagcgacagaaagcagttcagccacatccccgccaagaccctgagcgccagcgtggacgccatcaccatccacagccacctgtggcagaccaagagacccgtgacccccaagaagctgctgcccaccaaggcctag

SEQ ID NO: 112205 - protein, 1462 aa, Artificial Sequence
  derived and/or modified sequence
MGDAADPREMRKTFIVPAIKPFDHYDFSRAKIACNLAWLVAKAFGTENVPEELQEPFYTDQYDQEHIKPPVVNLLLSAELYCRAGSLILKSDAAKPLLGHDAVIQALAQKGLYVTDQEKLVTERDLHKKPIQMSAHLAMIDTLMMAYTVEMVSIEKVIACAQQYSAFFQATDLPYDIEDAVMYWINKVNEHLKDIMEQEQKLKEHHTVEAPGGQKARYRKEQTLLKQLPCIPLVENLLKDGTDGCALAALIHFYCPDVVRLEDICLKETMSLADSLYNLQLIQEFCQEYLNQCCHFTLEDMLYAASSIKSNYLVFMAELFWWFEVVKPSFVQPRVVRPQGAEPVKDMPSIPVLNAAKRNVLDSSSDFPSRYSRPQAHSSASGGIRRSSSMSYVDGFIGTWPKEKRSSVHGVSFDISFDKEDSVQRSTPNRGITRSISNEGLTLNNSHVSKHIRKNLSFKPINGEEEAESIEEELNIDSHSDLKSCVPLNTNELNSNENIHYKLPNGALQNRILLDEFGNQIETPSIEEALQIIHDTEKSPHTPQPDQIANGFFLHSQEMSILNSNIKLNQSSPDNVTDTKGALSPITDNTEVDTGIHVPSEDIPETMDEDSSLRDYTVSLDSDMDDASKFLQDYDIRTGNTREALSPCPSTVSTKSQPGSSASSSSGVKMTSFAEQKFRKLNHTDGKSSGSSSQKTTPEGSELNIPHVVAWAQIPEETGLPQGRDTTQLLASEMVHLRMKLEEKRRAIEAQKKKMEAAFTKQRQKMGRTAFLTVVKKKGDGISPLREEAAGAEDEKVYTDRAKEKESQKTDGQRSKSLADIKESMENPQAKWLKSPTTPIDPEKQWNLASPSEETLNEGEILEYTKSIEKLNSSLHFLQQEMQRLSLQQEMLMQMREQQSWVISPPQPSPQKQIRDFKPSKQAGLSSAIAPFSSDSPRPTHPSPQSSNRKSASFSVKSQRTPRPNELKITPLNRTLTPPRSVDSLPRLRRFSPSQVPIQTRSFVCFGDDGEPQLKESKPKEEVKKEELESKGTLEQRGHNPEEKEIKPFESTVSEVLSLPVTETVCLTPNEDQLNQPTEPPPKPVFPPTAPKNVNLIEVSLSDLKPPEKADVPVEKYDGESDKEQFDDDQKVCCGFFFKDDQKAENDMAMKRAALLEKRLRREKETQLRKQQLEAEMEHKKEETRRKTEEERQKKEDERARREFIRQEYMRRKQLKLMEDMDTVIKPRPQVVKQKKQRPKSIHRDHIESPKTPIKGPPVSSLSLASLNTGDNESVHSGKRTPRSESVEGFLSPSRCGSRNGEKDWENASTTSSVASGTEYTGPKLYKEPSAKSNKHIIQNALAHCCLAGKVNEGQKKKILEEMEKSDANNFLILFRDSGCQFRSLYTYCPETEEINKLTGIGPKSITKKMIEGLYKYNSDRKQFSHIPAKTLSASVDAITIHSHLWQTKRPVTPKKLLPTKA

SEQ ID NO: 112206 - DNA, 4389 bp, Artificial Sequence
  derived and/or modified sequence
atgggagatgcagcagatccccgtgaaatgagaaaaacatttatcgtcccagcaatcaagccttttgatcattatgacttctcgagagccaagatagcatgcaacctggcctggctggtcgctaaggcatttggaaccgaaaacgtccctgaggaactgcaggaacccttttataccgaccagtatgaccaagagcatataaagccgccagttgtgaacttactgctgtccgccgagctatattgcagagccggatccctaatcctgaaatccgacgctgccaagccactgcttggccatgacgctgtgattcaggcgcttgcgcagaagggcctgtatgtgactgaccaggaaaaacttgtcactgagagggatcttcacaaaaaacccatccagatgagtgctcatctagccatgatcgacacactcatgatggcctacactgtggagatggtgtcaattgaaaaggtgatcgcatgcgcccagcagtacagcgcatttttccaggctacggacctcccctatgacattgaggatgctgtaatgtattggatcaataaggtgaacgagcatcttaaagacatcatggagcaagagcagaaattgaaggaacatcataccgtagaggctcccggaggccagaaggcaaggtaccgtaaagagcaaaccctgctgaaacaactgccttgcatccccctggttgaaaatctgctgaaggatgggacagatggctgtgccctggccgccctgatccatttctactgtcctgacgtagtaaggctcgaagatatctgcctaaaggaaactatgagcctcgccgactccctctacaacctgcagctgattcaagagttttgccaggaatatctgaaccagtgttgtcatttcaccctggaagatatgctttatgctgcctcctccattaaatcaaactacctggtcttcatggcagagttattttggtggtttgaggttgtgaaacctagcttcgtacaaccgagagttgttcggccacagggcgccgaacccgttaaagatatgccctctatccctgttctcaacgctgctaagagaaatgtgttggactcgtcttctgactttccctcccggtactcccggccacaggcacatagctccgcctccggcggaataagacgctcgtcttccatgtcttacgtcgacgggtttatcggtacatggccaaaggaaaagagatctagcgttcatggtgtgtctttcgacatctcctttgacaaggaagattcagtccaaagatcaacaccaaaccgaggaatcaccagatccattagcaacgaggggctaaccttgaacaactcccatgtgagcaagcacatcagaaagaacctcagcttcaagccaatcaacggcgaggaggaggccgagtctattgaagaggaactgaatattgattctcatagcgatctgaagagttgcgtgccgctgaataccaatgaattgaattcaaatgagaacattcactataaattgccaaatggtgcgttacagaatagaatcctcctagacgagttcggtaaccaaatcgaaaccccgtctattgaggaggccctgcagattatccacgacactgagaagtcaccccatactccacagccggatcagatcgccaacggctttttcttgcactcccaggaaatgtctattctcaactctaatatcaagcttaaccagagctcccccgataatgtaactgatacgaagggcgctctgagcccaatcacggacaacaccgaggtggacactggtatccatgttccctctgaagacattcctgaaacaatggatgaagactctagtttacgggattacacggtgtctctcgactcagatatggatgatgcctctaagttcttgcaggactatgacattagaacaggtaataccagagaagctttgagtccttgtcctagtaccgtgagcacaaaaagccaacccggtagctcagcttcttcttcttcaggagtcaagatgacttctttcgcagagcagaagttccggaagctcaatcatacggatggcaagagtagcgggagcagcagccagaagacaaccccagagggcagcgagctgaatattccccacgtcgtggcgtgggcgcagattccggaagagactggacttccccaagggagagacacgacccagcttctggcctccgagatggtgcacctccgaatgaaacttgaagagaaaagacgggccattgaggctcaaaaaaaaaaaatggaggctgcttttacaaagcagagacagaagatggggcggactgccttcctgacggtcgtgaaaaagaagggcgacgggatcagccctctaagagaggaggccgcaggagcagaagacgaaaaagtgtacaccgacagagccaaagagaaagagtcccaaaagacagacgggcagcgcagtaagagcctagctgacatcaaggagtccatggaaaatcctcaggccaaatggctgaagtcgcccactactcctattgatcctgaaaagcagtggaatctagcatcccccagtgaagagactctgaacgaaggcgagattcttgagtacactaaaagcattgagaagttaaatagcagtcttcatttcctgcagcaggagatgcagagattaagtttgcagcaggaaatgttaatgcagatgcgggagcagcagtcatgggtaattagtcctcctcaaccctcacctcagaagcagattagggacttcaaacccagtaagcaagccgggctgtccagtgcaatcgcaccgtttagttccgactccccacgacccacccatccttcaccccagtcatccaatcggaaatcagccagtttcagcgtgaagtcccaacgcaccccccgccccaacgagttaaaaattaccccactcaaccgcactctcactccgccaagatccgtggacagcttgcctagacttaggcggttcagcccctctcaagtgcctatccagactagatcctttgtatgctttggcgacgatggagagccccaacttaaggaatccaagccaaaagaagaagtcaaaaaggaggagctcgagtctaaaggaaccttagaacagcgcggccacaacccagaggagaaggaaataaaaccttttgaatcaacagtgagcgaggttctaagcctcccagtgaccgaaacagtgtgtttaacaccgaatgaggatcagctgaatcagcccacggaacctccaccaaagcctgtattcccacctactgcacctaaaaatgtgaatctaatcgaagttagcctctccgacctgaaacctccggagaaggctgatgttcccgtggaaaaatacgatggcgagagcgataaagaacaattcgatgacgaccagaaggtctgctgcggatttttctttaaggacgaccagaaagctgagaatgatatggccatgaaacgcgccgctttgctagagaagcggctgaggagggagaaggaaactcagttacggaagcagcagctggaagcagagatggaacacaaaaaggaggaaacaaggcgaaagacggaggaagaacgacaaaaaaaggaggacgagagagctcgacgcgaattcattcggcaggaatacatgcggcggaaacagcttaagctcatggaggacatggatactgtgataaaacctagacctcaggtcgtcaaacagaagaagcagcgacctaagagtatccaccgggatcacatcgaaagccccaaaacccctatcaaaggcccaccagtgagttcattatctctggcctcacttaataccggtgataatgagtccgtccattctggtaagaggacaccaaggtcggagtctgttgagggcttcctctctccatctcgctgtgggtcaaggaatggtgagaaggattgggagaacgcgtctacaacatcatcagtagcctccggcactgagtacacgggccccaaactttataaggagccctccgccaaatcgaataaacacatcattcagaacgccctagcccactgttgtctcgctggcaaggtcaacgaggggcagaagaagaagattctggaggagatggaaaaatcggacgccaataacttcctgattcttttccgcgactccggctgtcagttcagaagcttgtacacttactgcccagaaaccgaggagataaacaaactaacaggaattggcccaaagtcaatcacaaagaaaatgatcgagggcctgtataaatacaatagtgatcggaaacagttttcacacatccccgccaaaaccctgtccgctagtgtcgacgcgataacgatccatagccacctctggcagacaaaaaggccggtcacaccgaagaagctgctgccgaccaaggcttag

SEQ ID NO: 112207 - DNA, 4389 bp, Artificial Sequence
  derived and/or modified sequence
atgggagatgctgctgacccccgggagatgaggaagaccttcatcgtgcctgccatcaagccctttgaccactatgacttcagccgggccaagatcgcctgcaacctggcctggctggtggccaaggccttcggcacagaaaatgtgcctgaggagctgcaggagcccttctacacagaccagtatgaccaggagcacatcaagccccctgtggtgaacctgctgctgtctgctgagctgtactgccgggccggcagcctcatcctgaagagtgatgctgccaagcccctgctgggccatgatgctgtgatccaggccctggcccagaagggcctgtatgtgacagaccaggagaagctggtgacagagcgggacctgcacaagaagcccatccagatgtctgcccacctggccatgattgacaccctgatgatggcctacacagtggagatggtgtccattgagaaggtgattgcctgtgcccagcagtacagcgccttcttccaggccacagacctgccctatgacattgaagatgctgtgatgtactggatcaacaaggtgaatgagcacctgaaggacatcatggagcaggagcagaagctgaaggagcaccacacagtggaggcccctgggggccagaaggcccgctacaggaaggagcagaccctgctgaagcagctgccctgcatccccctggtggagaacctgctgaaggatggaacagatggctgtgccctggccgccctgatccacttctactgcccagatgtggtgcggctggaggacatctgcctgaaggagaccatgagcctggccgacagcctgtacaacctgcagctgatccaggagttctgccaggagtacctgaaccagtgctgccacttcaccctggaggacatgctgtatgctgccagcagcatcaagagcaactacctggtgttcatggccgagctgttctggtggtttgaggtggtgaagcccagctttgtgcagccccgggtggtgcggccccagggcgctgagcctgtgaaggacatgcccagcatccctgtgctgaatgctgccaagagaaatgtgctggacagcagcagtgacttccccagccgctacagccggccccaggcccacagcagcgccagcggcggcatcagaagaagcagctccatgtcctatgtggatggcttcatcggcacctggcccaaggagaagaggagctctgtgcatggagtgtcctttgacatcagctttgacaaggaggacagcgtgcagaggagcacccccaacagaggcatcaccaggagcatcagcaatgaaggcctgaccctgaacaacagccacgtgtccaagcacatcaggaagaacctgtccttcaagcccatcaacggggaggaggaggccgagagcattgaggaggagctgaacatcgacagccacagcgacctgaagagctgtgtgcccctgaacaccaatgagctgaacagcaatgaaaacatccactacaagctgcccaatggagccctgcagaaccgcatcctgctggatgaatttggaaaccagatcgagacccccagcattgaggaggccctgcagatcatccatgacacagagaagagcccccacaccccccagcctgaccagatcgccaacggcttcttcctgcacagccaggagatgagcatcctgaacagcaacatcaagctgaaccagagcagcccagacaacgtgacagacaccaagggggccctgagccccatcacagacaacacagaggtggacaccggcatccacgtgcccagcgaggacatccctgagaccatggatgaggacagcagcctgcgggactacacagtgtccctggacagcgacatggatgatgccagcaagttcctgcaggactatgacatcagaacaggcaacacccgggaggccctgagcccctgccccagcacagtgtccaccaagagccagcccggcagcagcgccagcagcagcagcggcgtgaagatgaccagctttgctgagcagaagttcaggaagctgaaccacacagatggcaagagcagcggcagcagcagccagaagaccaccccagagggcagcgagctgaacatcccccacgtggtggcctgggcccagatccctgaggagaccggcctgccccagggccgggacaccacccagctgctggccagcgagatggtgcacctgaggatgaagctggaggagaagagaagagccatcgaggcccagaagaagaagatggaggccgccttcaccaagcagaggcagaagatgggccgcacagccttcctgactgtggtgaagaagaagggagatggcatcagccccctgcgggaggaggccgccggggctgaagatgagaaggtgtacacagaccgggccaaggagaaggagagccagaagacagatggccagaggagcaagagcctggccgacatcaaggagagcatggagaacccccaggccaagtggctgaagagccccaccacccccatcgaccctgagaagcagtggaacctggccagccccagcgaggagaccctgaatgaaggagagatcctggagtacaccaagagcattgagaagctgaacagcagcctgcacttcctgcagcaggagatgcagaggctgagcctgcagcaggagatgctgatgcagatgagggagcagcagagctgggtgatcagccccccccagcccagcccccagaagcagatccgggacttcaagcccagcaagcaggccggcctgagcagcgccatcgcccccttcagcagtgacagcccccggcccacccaccccagcccccagagcagcaacaggaagagcgccagcttctctgtgaagagccagaggaccccccggcccaatgagctgaagatcacccccctgaacagaaccctgaccccacccaggtctgtggacagcctgccccggctgcggcgcttcagccccagccaggtgcccatccagaccaggagctttgtgtgctttggagatgatggagagccccagctgaaggagagcaagcccaaggaggaggtgaagaaggaggagctggagagcaagggcaccctggagcagaggggccacaaccctgaggagaaggagatcaagccctttgagagcacagtgtctgaggtgctgagcctgcctgtgacagagaccgtgtgcctgaccccaaatgaagaccagctgaaccagcccacagagcccccacccaagcctgtgtttcctcccacagcccccaagaatgtgaacctgattgaggtgtccctgagtgacctgaagcccccagagaaggcagatgtgcctgtggagaagtatgatggagagagtgacaaggagcagtttgatgatgaccagaaggtgtgctgcggcttcttcttcaaggatgaccagaaggcagaaaatgacatggccatgaagagagctgccctgctggagaagaggctgcggcgggagaaggagacccagctgaggaagcagcagctggaggccgagatggagcacaagaaggaggagaccaggaggaagacagaggaggagcggcagaagaaggaggatgagcgggcccggcgggagttcatccggcaggagtacatgaggaggaagcagctgaagctgatggaggacatggacaccgtcatcaagccccggccccaggtggtgaagcagaagaagcagaggcccaagagcatccaccgggaccacatcgagagccccaagacccccatcaagggcccccctgtgagcagcctgagcctggccagcctgaacacaggagacaatgaatctgtgcacagcggcaagaggacccccaggtctgagagcgtggagggcttcctgagccccagccgctgtggcagcagaaatggagagaaggactgggagaatgccagcaccaccagctctgtggccagcggcacagagtacacaggccccaagctgtacaaggagcccagcgccaagagcaacaagcacatcatccagaatgccctggcccactgctgcctggccggcaaggtgaatgaaggccagaagaagaagatcctggaggagatggagaagagtgatgccaacaacttcctgatcctcttccgggacagcggctgccagttccgcagcctgtacacctactgcccagagacagaggagatcaacaagctgactggaattggccccaagagcatcaccaagaagatgattgagggcctgtacaagtacaacagcgacaggaagcagttcagccacatcccagccaagaccctgagcgcctctgtggatgccatcaccatccacagccacctgtggcagaccaagaggcctgtgacccccaagaagctgctgcccaccaaggcctag

SEQ ID NO: 112208 - DNA, 4389 bp, Artificial Sequence
  derived and/or modified sequence
atgggcgacgccgccgacccccgggagatgcggaagaccttcatcgtgcccgccataaagccctttgaccactacgatttctctcgagctaagatcgcctgcaacctcgcctggctcgtggctaaggccttcggcacagagaacgtaccagaggaactgcaggagcctttctacacggaccagtacgaccaagagcacattaagccaccagtggtgaatctcttgttgtcggccgaactctattgtagggccggctcgctgattcttaaatctgacgctgctaagccccttttggggcacgacgcagttatccaggcactagcccagaagggtctttacgtcaccgaccaagagaagttagtgaccgagcgggatctgcataagaagcctatccagatgtcagctcacctcgcaatgatcgacactcttatgatggcgtatacagtagaaatggtgagcatcgagaaggtgatcgcatgtgcccagcagtactctgcattctttcaagccactgatctgccatatgatatcgaagacgctgtaatgtactggattaacaaagtgaacgagcacctgaaggacatcatggagcaggaacagaaactgaaagaacatcatacagtcgaggccccaggaggtcagaaggcacggtatcggaaagagcagactctgcttaagcagctgccatgcataccacttgttgagaatttactgaaagacgggaccgatggctgcgccttggccgctctgattcatttttactgtccagacgtggtccggctggaggacatctgcctcaaggagaccatgagccttgccgattcactgtacaatctccagctgattcaagagttttgccaggaatacctgaatcagtgctgtcatttcactcttgaagatatgctgtacgcggcctcctctattaaaagtaattacctagtcttcatggcagaacttttttggtggttcgaggtcgtaaaacccagctttgtgcaaccaagggtggttcggccccagggggccgaacccgtgaaggatatgccatctatcccagtcttgaatgcggccaagaggaacgttctagacagctccagtgactttccctcacggtatagccggcctcaggctcactctagcgcttccggcgggatcagaagatcctcaagcatgtcctacgttgatggtttcatcggtacctggcccaaggagaagcgtagttccgtgcacggcgtgagtttcgacatctcgtttgacaaagaggacagcgtgcagcgcagcacgccaaatagaggcatcacacggagtatctccaatgaaggcttgaccctgaataactcccatgtgtccaaacatatcagaaaaaatttgtcatttaaaccaattaatggtgaggaagaagccgagagcattgaggaagagctgaacatcgatagccattccgatcttaagagctgcgttccacttaataccaacgaactgaacagcaatgagaatatccactacaagttaccgaatggagccctgcagaaccggatcctacttgacgaatttggcaatcagatcgaaacaccttcaattgaagaggccctgcagataatccacgatactgagaaatccccccacacaccccagccagatcaaattgccaacggcttttttctgcactcgcaagagatgtctatcctgaacagcaatatcaaacttaatcagagctcacccgacaatgtgactgatacgaaaggtgccctttcacctattactgacaatactgaagtggacactgggattcatgtgccctccgaagacattccagagaccatggatgaggattcctccctgcgcgactataccgtaagtctggattcggacatggatgatgcttccaaatttctccaggactacgatatcagaaccgggaatacccgggaggccctatctccctgtccttcgaccgtgtctaccaaatcgcagcccggctcttccgcatcatcctccagcggagtgaaaatgacctcatttgctgaacagaagtttagaaagttaaatcataccgacggtaaaagtagtgggtctagcagtcagaaaaccactcctgaaggaagcgagctcaacatccctcacgtggttgcgtgggcacaaattccggaagagactggtcttcctcagggacgggacacaacgcagctgttggcgtccgaaatggtgcacctgcgtatgaaactggaggaaaagagacgggccattgaggctcagaaaaagaagatggaagccgccttcaccaaacagcgccaaaaaatggggaggactgcatttctgaccgtggtcaagaaaaaaggggacggtatctctcccctccgcgaggaggccgcaggcgccgaggatgaaaaggtgtacaccgatagagcaaaagaaaaggagagccagaaaacggacggtcagcgcagcaagtcactggccgacataaaggaatccatggagaatccacaggctaagtggcttaaatccccaactactcccattgatcctgagaaacaatggaacctggcaagcccatcagaggaaaccctaaacgagggggagatcctggaatacaccaaatccattgaaaagctcaattcttctttacacttccttcagcaagaaatgcaacgcctttctttgcaacaggagatgttaatgcagatgagggaacaacagtcctgggtgattagcccccctcagccatctcctcagaagcagatccgcgacttcaagccatctaaacaagccgggttgtcttcggccatcgccccgttttcttcagactcaccaaggcccacccacccctccccccagagttccaatcggaaaagtgctagcttctctgtgaaatctcagcgaacacctaggcccaatgagctgaaaattacccctctgaatcgcactctcacacccccccggagcgtggactccctaccgcgtctaaggagattcagccccagtcaggtgccgatccagacacgttcctttgtgtgtttcggggacgatggggaacctcagttaaaggagagcaagccaaaggaggaagtgaaaaaggaggaactggagagcaagggaacacttgaacagaggggtcataaccctgaagaaaaggagatcaagcctttcgagagtactgtgtctgaagtactctccctgccagtgacggagaccgtatgcctgacccccaacgaggatcagcttaaccagccaaccgaaccaccaccaaaacccgtgttcccccccactgcacccaagaatgtgaatttgatcgaggtgtccctctccgatctcaagccacccgagaaggctgacgtgcctgtcgagaagtacgatggcgagagcgataaagagcagttcgacgatgaccaaaaggtctgctgcgggtttttttttaaagacgaccagaaggcggaaaacgatatggctatgaaacgggccgcactcctcgaaaaacggctacgacgcgagaaggagacccagctgagaaagcaacagttggaggcagagatggaacacaaaaaagaggagaccaggcgtaagacggaagaggagaggcagaaaaaggaggacgagcgcgctagaagagagtttatccggcaggaatatatgaggcgaaaacagctcaaactgatggaagacatggacactgtgattaagccacggccacaagtagttaagcagaagaagcagaggcctaagtctatccaccgtgaccacattgaatctccaaaaacgcccatcaaagggcccccagtgagttccctgtccctggctagccttaatacaggagacaacgaatccgtgcattccggcaaacgtaccccaaggagcgagagcgtggaggggttcctcagtcccagtaggtgcgggtccaggaatggagaaaaagattgggaaaatgccagcaccacatcaagcgtagcgagcggcacggagtataccggcccaaaactgtataaggagcctagtgccaaatctaataagcacattattcagaatgctctggcgcattgttgcttggccggcaaagtgaacgaaggtcagaaaaaaaaaattctcgaagagatggaaaagagtgacgccaataacttcctcatattgttcagggatagcgggtgccagtttaggtctctgtatacatactgccctgagacagaggagattaataagctgactggcataggccccaagtcaattactaagaagatgattgagggtctgtataaatacaactccgaccgcaagcagttttcacacattcctgctaagactctctccgctagcgtcgacgccatcactatccatagtcacttgtggcagactaaacggccagttactccgaaaaaacttctgcccactaaggcatag

SEQ ID NO: 112209 - DNA, 4389 bp, Artificial Sequence
  derived and/or modified sequence
atgggggacgccgctgatccacgcgagatgaggaagaccttcatcgtgcctgcaattaagccgttcgaccattatgatttctcccgggcaaaaattgcctgtaatctggcctggctggtcgcaaaggcattcggcacagagaacgtccctgaagagctccaagaacccttctacaccgatcagtatgatcaggagcacataaagcctcccgtggtgaacctgctcctgtccgctgagctctattgccgggcagggtccctgatccttaaatccgacgccgcaaagcctctcctcggccatgatgccgtcatacaggccctagctcagaagggactttacgtcacggaccaggaaaagttggtaactgaaagagatttacacaagaagccaattcaaatgtcggcccatctggctatgattgacaccctaatgatggcgtacaccgtggaaatggtgtcaattgagaaagtgattgcatgtgctcagcaatacagtgcatttttccaggcgactgatcttccatacgacattgaggatgccgtgatgtattggattaacaaagtaaacgaacacctgaaagacattatggaacaggagcagaagctgaaagagcatcacactgtcgaggcacctggcggacagaaggctagatatagaaaagaacagaccttactcaaacaactcccctgcattcctctcgtcgaaaacctgctgaaggacgggacggatggttgcgctctggccgcactcatccacttctactgcccagacgtggtccgtctcgaggatatttgcctgaaggagaccatgtctctggctgacagtctctacaacctgcagctgattcaggaattttgtcaggagtacctaaaccagtgctgtcatttcacactggaagatatgctgtacgctgcctcctccatcaagtctaattacctcgtcttcatggctgaactattctggtggttcgaggtagttaaaccatcatttgtgcagccgagggtcgtgcgccctcagggtgcggagcccgtgaaggatatgccctccatccctgttctaaacgcagccaaaagaaatgtactcgatagttcgtcagacttcccttcacggtactcaaggccacaggcgcactcgtctgccagtggcggtattaggcgctcctctagcatgtcctacgtggacgggttcatcgggacttggccaaaggagaagaggagttccgtccatggggtcagtttcgacattagctttgacaaagaggacagcgttcagcgctccaccccgaaccgagggataactaggagtattagcaacgaggggttgacactgaacaactcccatgtttctaagcacatccgaaaaaatttatcattcaagccaatcaatggtgaggaggaggccgagtcaattgaggaggagctaaatattgatagccattcagatctgaagagctgcgtgcctctgaacaccaacgagctcaatagcaatgagaacatccattacaagcttccaaacggagccctgcagaaccgtattctgctggatgagttcggcaaccaaattgaaacaccatccattgaagaagctttgcagattattcacgataccgaaaaatctccacacaccccacagccagaccagatcgcgaatggattctttctgcacagccaagagatgtcgatactgaatagcaatatcaagttgaaccaatcctcccctgataacgtaacagatacaaagggagcgttgagccccattactgacaacacagaggttgataccgggatccacgtgccatcagaagacattccggaaacaatggacgaggattctagtctgcgtgactatactgtttcgctggacagcgacatggacgatgcctccaaattcctccaagattatgatatcagaactggtaatacacgggaagctctgagcccttgcccgtcaactgtgtctaccaagtcacagcccggaagctcagcatcgagctcctccggagtgaaaatgacttcttttgcagaacagaagttccgaaagctgaatcacacagacgggaagtccagcgggtcctctagccaaaaaaccacacccgagggttcagaactcaacatccctcacgttgtggcttgggcccagattcctgaggaaacagggctaccccagggacgggacactacccagctgctggcctctgagatggttcacctgagaatgaaactcgaagaaaaaagacgggcaattgaagctcagaagaagaagatggaggcagcctttaccaagcagcgtcagaaaatgggtcggacagcctttctcactgtcgtcaaaaaaaagggcgatgggatttctcctttgcgcgaggaggcagcgggagcagaagacgagaaggtctataccgatcgtgccaaggaaaaggaaagtcagaagactgatggccagcgctccaaatcactcgctgatattaaagaaagcatggaaaacccacaagcaaagtggctgaagtctccaactaccccaatagaccccgagaaacagtggaatcttgctagcccaagtgaggagacacttaacgagggcgagatccttgaatataccaagagcatcgaaaagctgaactcctcacttcactttctgcagcaggagatgcagcgactgtccttgcagcaggagatgttgatgcaaatgagagagcagcaaagctgggtgatatcaccccctcagccctcaccacagaaacaaattagagacttcaaacctagcaagcaggcagggctatcatcggcgattgcccctttctcatctgacagccctcgccctacccatccgtcaccccagagcagtaacaggaagtccgcttctttttccgttaagagtcagaggactcctcgcccaaacgaacttaagataacgccattaaatcgaacgctcacaccacccagaagcgtcgattcattgcccagactgcggaggttcagcccctcacaggtcccgatccagacccgcagcttcgtgtgttttggcgacgacggcgagcctcagttgaaggagtcgaagcccaaggaggaagtcaagaaagaagagctggaaagcaagggtacactggagcagaggggtcacaatccggaggagaaggaaattaagccgtttgagtctactgtgtcagaagttttgagcctgcctgtcacagaaacagtgtgtttgactcctaatgaggaccaactcaatcagcccacagagccaccaccaaagcccgttttcccacccaccgcccctaagaacgtgaacctgatcgaagtcagcctgtctgacctgaagccgccagaaaaagcggacgtgcctgtggagaaatacgacggagagagcgacaaggagcaatttgatgacgaccagaaggtgtgttgtgggttttttttcaaggatgaccagaaggctgaaaatgatatggcaatgaagcgggctgccctgctggagaaacgacttcgacgagagaaggagacacagctcagaaagcaacagctggaggcggagatggagcacaaaaaggaggagacccgaaggaagactgaggaggaacgccaaaaaaaagaggatgaacgcgcacggcgtgagttcataaggcaggagtatatgcggaggaaacagctgaaactcatggaggatatggatacagtgattaagccacgtccacaagtcgtaaaacagaagaagcagcggcctaaatctatccaccgcgaccatatcgaaagccctaagacacctatcaagggtcctcctgtgtcatctctgagcctcgctagtttgaatacgggagataacgagagtgtccacagcgggaagcgcacacccaggtcagaaagtgttgagggattcctctcgcctagtagatgcggttcccgaaacggcgagaaagattgggaaaacgccagtactacctcctcagttgcctccggcacagaatacacaggcccaaaactgtacaaggagccttccgctaaaagcaataagcatatcatccagaacgctttggcccactgttgtctcgccggaaaggtgaacgagggccagaaaaaaaagattctcgaggaaatggaaaagagtgatgccaataacttcctgatactcttccgcgactcaggatgccagtttaggtctctctatacatactgtcctgaaactgaagaaatcaataagctcactggaattggacctaagagcatcactaaaaaaatgatcgagggactgtacaagtacaacagcgaccgaaagcaattttcccacattccagccaaaacattgagcgctagcgtcgacgcgataacgatccactcacacttatggcagaccaagaggcccgtgaccccaaaaaagctgttgcctacaaaagcttag

SEQ ID NO: 112210 - DNA, 4498 bp, Artificial Sequence
  derived and/or modified sequence
cgccatgtgaaggttagggccgggacatcccgaggagccgcggtgaaagatgggggatgctgcagaccccagggagatgagaaagacgttcattgttccagccatcaagccttttgaccactatgatttctccagggccaaaatcgcctgcaatctggcctggctggtggccaaagcctttgggacagaaaatgtgccagaggaacttcaagaaccattttacacagatcagtatgaccaggaacacatcaaaccacctgttgttaatttgcttctatcggctgaactatactgtcgtgctgggagtctcattctcaagagtgatgctgcaaaaccccttttgggccatgatgctgtaatccaggctttagcacagaaaggtctttatgtcactgaccaggaaaaattggtaactgaacgagatctccacaagaaacccatacagatgagtgcacatttggccatgatcgataccctcatgatggcttatactgtagaaatggtcagtatagaaaaagtaattgcgtgtgctcagcagtattcagctttttttcaagccacagatctgccctatgatattgaggacgctgtcatgtactggataaataaggtaaatgaacatttgaaagacataatggaacaagaacaaaaactgaaagaacatcacacagttgaagctccaggaggtcaaaaggctcgttatcggaaagagcaaacattgcttaagcaactgccttgcattccattggtagaaaatttgttgaaggatgggacagatggctgtgcattagctgcccttattcatttttactgtcctgatgttgtcagattagaggatatttgtttgaaagaaactatgtctttggctgatagcctgtataatctgcagctgattcaagaattttgccaagaatacttgaaccagtgttgccatttcactctggaagatatgctctatgctgcttcatccataaagagtaattatttggtgttcatggcggaactgttctggtggtttgaagtggtgaagccgtcttttgtacagcctcgtgttgttcgtccacaaggagctgaacctgtaaaagatatgccttcaattcctgtcttgaatgctgccaaaagaaatgtcttagatagtagttctgacttcccttcaaggtattcacgtccccaggctcattcttcagcctcaggaggaattagaaggtcttcatctatgtcttatgttgatggcttcatagggacatggcccaaagagaaaagatcatcagtgcatggcgtatcatttgatatttcttttgataaagaagatagtgtacagagatccactccaaaccgaggaatcactcgttctattagtaatgaaggacttactctgaacaacagtcatgtatctaaacacattaggaaaaatttgtccttcaagccaataaatggagaagaggaagcagagagcattgaagaagaacttaatatagattctcacagtgacctcaaatcttgtgtgccccttaacacaaatgaactaaattctaatgagaatattcattacaagcttccaaatggagctttacaaaatagaatacttcttgacgagtttggcaatcagatcgagacaccaagcattgaagaagcattacaaataattcatgatactgaaaaatctcctcatacacctcagccagaccaaattgctaatggcttctttcttcatagtcaagaaatgagtatcttaaattcaaatatcaagttaaatcaatctagtcctgataatgtaactgatacgaaaggtgccttgagtcccataactgacaatactgaagtagacactggaattcacgttccttcagaagatattcctgaaactatggacgaagattcttcgttgagagattatactgtaagcttggactctgacatggatgatgcatctaaatttcttcaggattatgatattcgaactggcaacaccagggaagctttgagtccttgtccaagtactgtaagtaccaagtctcagccaggcagcagtgcttcttctagttctggagttaaaatgaccagctttgctgaacaaaaattcaggaaactgaatcataccgatggaaaaagtagtggaagcagttctcaaaaaactacaccagaaggctctgaacttaatattcctcatgtggttgcttgggcacaaattccagaagaaacagggcttccacagggacgggacactacccagctgttggcctctgaaatggtgcatcttaggatgaaactagaagaaaagaggcgtgctatagaagcccagaaaaagaaaatggaagctgcttttaccaaacagagacagaaaatgggaaggacagcattccttactgtagtgaaaaagaaaggggatgggatatctcctctacgagaggaagcggcgggtgcagaagatgagaaagtatatactgatcgagcaaaagaaaaggaatcacaaaaaactgatggacaaaggagcaagtcactggcagatataaaagagagcatggagaatcctcaagccaaatggctaaagtctccaactacacctattgatcctgagaagcagtggaacctggcaagcccctcagaagaaactttaaatgaaggagagattttagaatataccaaatccattgaaaagttaaattcatccctgcattttctacaacaagaaatgcaacgcttgtcacttcagcaggagatgttaatgcagatgagagagcaacaatcttgggtgatttcacctccacaaccctctccacagaaacagattcgagattttaagccttctaagcaggcaggcctgtcatcagccattgcaccattctcctcagactcccctcgtcctactcacccatctccacagtcttctaacaggaaaagtgcatctttttctgttaaaagtcaaaggactcctaggccaaatgagttaaaaataacacctttgaatcgaaccttgacacctcctcggtctgtggatagccttcctcggttaaggaggttttcaccaagtcaagttcctattcaaactaggtcatttgtatgttttggggatgatggagaacctcagttaaaggaatccaaacctaaagaggaagttaaaaaggaggaattggaatccaaagggactttggaacagcgtggacataatccagaagaaaaggaaatcaaaccttttgagtcaacagtctctgaagtcctatcactgcctgtcacagagactgtatgtctgacaccaaatgaggaccaattgaatcaacccacagaaccccctcctaaacccgttttcccacccactgctccaaaaaatgttaatctgattgaagtttccctctcagatttgaaaccccctgaaaaggctgatgtacctgttgaaaaatatgatggagaaagtgataaagaacaatttgatgatgaccagaaagtatgctgtggattcttttttaaggatgatcaaaaagcagaaaatgatatggcaatgaaacgggcagctttgttggagaaaagattaagaagggaaaaggaaactcagctccggaaacaacagttggaagcagaaatggagcataagaaggaggaaacaaggcgtaaaactgaggaagaacgtcagaagaaagaagatgagagagcacgcagagaatttattaggcaagaatatatgaggcggaaacaactgaaactaatggaagatatggatacagtaattaaaccccgtcctcaagtagtaaaacaaaaaaaacagcgaccaaaatctattcacagagatcatattgaatcccccaaaacaccaataaagggtcctccagtctctagcctttctttggcatcgctgaacacgggtgataacgagagtgtacattcaggcaagaggacgccaagatcagagtctgtagaaggcttcttatctccaagtcgttgtggcagtcgaaatggagaaaaagactgggagaatgcatcaacaacttcttcagtggcttctggaacagaatatacaggaccaaagctctacaaagaacccagtgcaaaatccaataagcacataatacaaaatgctttagctcattgctgtttggctggaaaagtaaatgaaggtcagaagaaaaaaatactggaggaaatggagaaatcagatgccaacaacttcttaatcttgttccgggattcaggatgccagttcagatctttatacacttattgcccagaaactgaagaaatcaataaactgactgggataggccctaaatctatcactaaaaaaatgattgaaggactttacaaatataattctgacaggaaacagtttagccacatacccgctaaaactttatctgccagtgttgatgcaattaccattcatagccatttatggcagaccaaaagaccagtaacacccaaaaaacttttacccactaaggcatagaagttgggaaatacttgcttcagaacattcatggtaaatttgcacttcatctttcctgcc

SEQ ID NO: 112211 - DNA, 4389 bp, Artificial Sequence
  derived and/or modified sequence
atgggcgacgccgccgaccccagagagatgagaaagaccttcatcgtgcccgccatcaagcccttcgaccactacgacttcagcagagccaagatcgcctgcaacctggcctggctggtggccaaggccttcggcaccgagaacgtgcccgaggagctgcaggagcccttctacaccgaccagtacgaccaggagcacatcaagccccccgtggtgaacctgctgctgagcgccgagctgtactgcagagccggcagcctgatcctgaagagcgacgccgccaagcccctgctgggccacgacgccgtgatccaggccctggcccagaagggcctgtacgtgaccgaccaggagaagctggtgaccgagagagacctgcacaagaagcccatccagatgagcgcccacctggccatgatcgacaccctgatgatggcctacaccgtggagatggtgagcatcgagaaggtgatcgcctgcgcccagcagtacagcgccttcttccaggccaccgacctgccctacgacatcgaggacgccgtgatgtactggatcaacaaggtgaacgagcacctgaaggacatcatggagcaggagcagaagctgaaggagcaccacaccgtggaggcccccggcggccagaaggccagatacagaaaggagcagaccctgctgaagcagctgccctgcatccccctggtggagaacctgctgaaggacggcaccgacggctgcgccctggccgccctgatccacttctactgccccgacgtggtgagactggaggacatctgcctgaaggagaccatgagcctggccgacagcctgtacaacctgcagctgatccaggagttctgccaggagtacctgaaccagtgctgccacttcaccctggaggacatgctgtacgccgccagcagcatcaagagcaactacctggtgttcatggccgagctgttctggtggttcgaggtggtgaagcccagcttcgtgcagcccagagtggtgagaccccagggcgccgagcccgtgaaggacatgcccagcatccccgtgctgaacgccgccaagagaaacgtgctggacagcagcagcgacttccccagcagatacagcagaccccaggcccacagcagcgccagcggcggcatcagaagaagcagcagcatgagctacgtggacggcttcatcggcacctggcccaaggagaagagaagcagcgtgcacggcgtgagcttcgacatcagcttcgacaaggaggacagcgtgcagagaagcacccccaacagaggcatcaccagaagcatcagcaacgagggcctgaccctgaacaacagccacgtgagcaagcacatcagaaagaacctgagcttcaagcccatcaacggcgaggaggaggccgagagcatcgaggaggagctgaacatcgacagccacagcgacctgaagagctgcgtgcccctgaacaccaacgagctgaacagcaacgagaacatccactacaagctgcccaacggcgccctgcagaacagaatcctgctggacgagttcggcaaccagatcgagacccccagcatcgaggaggccctgcagatcatccacgacaccgagaagagcccccacaccccccagcccgaccagatcgccaacggcttcttcctgcacagccaggagatgagcatcctgaacagcaacatcaagctgaaccagagcagccccgacaacgtgaccgacaccaagggcgccctgagccccatcaccgacaacaccgaggtggacaccggcatccacgtgcccagcgaggacatccccgagaccatggacgaggacagcagcctgagagactacaccgtgagcctggacagcgacatggacgacgccagcaagttcctgcaggactacgacatcagaaccggcaacaccagagaggccctgagcccctgccccagcaccgtgagcaccaagagccagcccggcagcagcgccagcagcagcagcggcgtgaagatgaccagcttcgccgagcagaagttcagaaagctgaaccacaccgacggcaagagcagcggcagcagcagccagaagaccacccccgagggcagcgagctgaacatcccccacgtggtggcctgggcccagatccccgaggagaccggcctgccccagggcagagacaccacccagctgctggccagcgagatggtgcacctgagaatgaagctggaggagaagagaagagccatcgaggcccagaagaagaagatggaggccgccttcaccaagcagagacagaagatgggcagaaccgccttcctgaccgtggtgaagaagaagggcgacggcatcagccccctgagagaggaggccgccggcgccgaggacgagaaggtgtacaccgacagagccaaggagaaggagagccagaagaccgacggccagagaagcaagagcctggccgacatcaaggagagcatggagaacccccaggccaagtggctgaagagccccaccacccccatcgaccccgagaagcagtggaacctggccagccccagcgaggagaccctgaacgagggcgagatcctggagtacaccaagagcatcgagaagctgaacagcagcctgcacttcctgcagcaggagatgcagagactgagcctgcagcaggagatgctgatgcagatgagagagcagcagagctgggtgatcagccccccccagcccagcccccagaagcagatcagagacttcaagcccagcaagcaggccggcctgagcagcgccatcgcccccttcagcagcgacagccccagacccacccaccccagcccccagagcagcaacagaaagagcgccagcttcagcgtgaagagccagagaacccccagacccaacgagctgaagatcacccccctgaacagaaccctgaccccccccagaagcgtggacagcctgcccagactgagaagattcagccccagccaggtgcccatccagaccagaagcttcgtgtgcttcggcgacgacggcgagccccagctgaaggagagcaagcccaaggaggaggtgaagaaggaggagctggagagcaagggcaccctggagcagagaggccacaaccccgaggagaaggagatcaagcccttcgagagcaccgtgagcgaggtgctgagcctgcccgtgaccgagaccgtgtgcctgacccccaacgaggaccagctgaaccagcccaccgagcccccccccaagcccgtgttcccccccaccgcccccaagaacgtgaacctgatcgaggtgagcctgagcgacctgaagccccccgagaaggccgacgtgcccgtggagaagtacgacggcgagagcgacaaggagcagttcgacgacgaccagaaggtgtgctgcggcttcttcttcaaggacgaccagaaggccgagaacgacatggccatgaagagagccgccctgctggagaagagactgagaagagagaaggagacccagctgagaaagcagcagctggaggccgagatggagcacaagaaggaggagaccagaagaaagaccgaggaggagagacagaagaaggaggacgagagagccagaagagagttcatcagacaggagtacatgagaagaaagcagctgaagctgatggaggacatggacaccgtgatcaagcccagaccccaggtggtgaagcagaagaagcagagacccaagagcatccacagagaccacatcgagagccccaagacccccatcaagggcccccccgtgagcagcctgagcctggccagcctgaacaccggcgacaacgagagcgtgcacagcggcaagagaacccccagaagcgagagcgtggagggcttcctgagccccagcagatgcggcagcagaaacggcgagaaggactgggagaacgccagcaccaccagcagcgtggccagcggcaccgagtacaccggccccaagctgtacaaggagcccagcgccaagagcaacaagcacatcatccagaacgccctggcccactgctgcctggccggcaaggtgaacgagggccagaagaagaagatcctggaggagatggagaagagcgacgccaacaacttcctgatcctgttcagagacagcggctgccagttcagaagcctgtacacctactgccccgagaccgaggagatcaacaagctgaccggcatcggccccaagagcatcaccaagaagatgatcgagggcctgtacaagtacaacagcgacagaaagcagttcagccacatccccgccaagaccctgagcgccagcgtggacgccatcaccatccacagccacctgtggcagaccaagagacccgtgacccccaagaagctgctgcccaccaaggcctag

SEQ ID NO: 112212 - protein, 163 aa, Artificial Sequence
  derived and/or modified sequence
MSLLGPKVLLFLAAFIITSDWIPLGVNSQRGDDVTQATPETFTEDPNLVNDPATDETVLAVLADIAPSTDDLECWDEKFTCTRLYSVHRPVKQCIHQLCFTSLRRMYIVNKEICSRLVCKEHEAMKDELCRQMAGLPPRRLRRSNYFRLPPCENVDLQRPNGL

SEQ ID NO: 112213 - DNA, 492 bp, Artificial Sequence
  derived and/or modified sequence
atgtctctgcttggccccaaagtgctgctgttcctggcagcctttatcataacctccgattggatcccgctcggggtcaactcccagagaggcgacgacgtaacccaagcgaccccagaaacattcaccgaagatcccaacttggtgaatgaccccgcaacagatgaaaccgtgctggccgtgctcgcagatattgcaccatctactgatgacttagaatgctgggatgagaagtttacttgtacccgattatacagcgtgcaccgcccagttaaacaatgcatccaccagctgtgtttcaccagcctaaggaggatgtatatcgtgaataaggaaatctgtagccgtttggtgtgcaaggaacacgaggccatgaaggatgagctatgtcgccaaatggccggcctaccccccagaagactgcgccggagtaattactttagactgcctccctgcgaaaacgtggaccttcagcgacctaatggactgtag

SEQ ID NO: 112214 - DNA, 492 bp, Artificial Sequence
  derived and/or modified sequence
atgagcctgctaggaccaaaagtgctgctgttcctcgccgcctttatcataacatcggactggatcccactgggagtgaactcccagaggggcgacgacgtcactcaggcgactcccgagactttcactgaagatcctaatcttgtcaacgaccctgccactgatgagaccgtattggctgtccttgcagacatcgctccaagtaccgacgatttggagtgttgggacgagaaattcacatgcactcgactttactctgttcatagacccgtcaagcagtgtattcatcaactgtgctttacctctcttagacgcatgtacatcgtcaacaaggagatctgttcaagactggtctgcaaggagcacgaggccatgaaagatgaactttgccgccaaatggccggtctgccacccagacgcttacgcagatctaattacttcaggctacctccttgtgagaatgtggatcttcaaaggccaaatggactgtag

SEQ ID NO: 112215 - DNA, 492 bp, Artificial Sequence
  derived and/or modified sequence
atgagcctgctgggccccaaggtgctgctcttcctggccgccttcatcatcaccagtgactggatccccctgggcgtgaacagccagagaggagatgatgtgacccaggccaccccagagaccttcacagaggaccccaacctggtgaatgaccctgccacagatgaaacagtgctggccgtgctggccgacatcgcccccagcacagatgacctggagtgctgggatgagaagttcacctgcacccggctgtacagcgtgcacaggcctgtgaagcagtgcatccaccagctgtgcttcaccagcctgcggaggatgtacatcgtgaacaaggagatctgcagccggctggtgtgcaaggagcacgaggccatgaaggatgagctgtgccggcagatggccggcctgcccccccggcggctgcggcgcagcaactacttccggctgcccccctgtgaaaatgtggacctgcagaggcccaacggcctgtag

SEQ ID NO: 112216 - DNA, 1195 bp, Artificial Sequence
  derived and/or modified sequence
attgtaacacacattctacgcctagcctggctttcttgctctccctcatctcattgtttcagcggaggccaaatctgaagtcctttccagggagtggctctgttcatcttattcgccagccaaagtaggaacagcgtaagaggagagagacacattcagcagccaaaggactcggtggaaagagcagaacaccatagacaatatgtcgctcttgggacccaaggtgctgctgtttcttgctgcattcatcatcacctctgactggatacccctgggggtcaatagtcaacgaggagacgatgtgactcaagcgactccagaaacattcacagaagatcctaatctggtgaatgatcccgctacagatgaaacagttttggctgttttggctgatattgcaccttccacagatgacttggagtgctgggatgagaaatttacctgcacaaggctctactctgtgcatcggccggttaaacaatgcattcatcagttatgcttcaccagtttacgacgtatgtacatcgtcaacaaggagatctgctctcgtcttgtctgtaaggaacacgaagctatgaaagatgagctttgccgtcagatggctggtctgccccctaggagactccgtcgctccaattacttccgacttcctccctgtgaaaatgtggatttgcagagacccaatggtctgtgatcattgaaaaagaggaaagaagaaaaaatgtatgggtgagaggaaggaggatctccttcttctccaaccattgacagctaacccttagacagtatttcttaaaccaatccttttgcaatgtccagcttttacccctactctctactttttcacccaaactgataacatttatctcattttctagcacttaaaatacaaagtctatattattgcataattttgctgcttctcaatatcatagacacagtgaatagatgatgactatatggcttatatacaaacattctatgtacaatttcaagggagactaaactttaggctaataatctttactattgaatctgtctgatatagatcttagggttgaagaagctatctttgtctatttgggctaaccatagaatttcatttattttcctcacaatattttcctagaccaactccccatcattcacgtgttcctctttactcttactttaactattttgctggcttgcccga

SEQ ID NO: 112217 - DNA, 492 bp, Artificial Sequence
  derived and/or modified sequence
atgtcgctcttgggacccaaggtgctgctgtttcttgctgcattcatcatcacctctgactggatacccctgggggtcaatagtcaacgaggagacgatgtgactcaagcgactccagaaacattcacagaagatcctaatctggtgaatgatcccgctacagatgaaacagttttggctgttttggctgatattgcaccttccacagatgacttggagtgctgggatgagaaatttacctgcacaaggctctactctgtgcatcggccggttaaacaatgcattcatcagttatgcttcaccagtttacgacgtatgtacatcgtcaacaaggagatctgctctcgtcttgtctgtaaggaacacgaagctatgaaagatgagctttgccgtcagatggctggtctgccccctaggagactccgtcgctccaattacttccgacttcctccctgtgaaaatgtggatttgcagagacccaatggtctgtga

SEQ ID NO: 112218 - DNA, 492 bp, Artificial Sequence
  derived and/or modified sequence
atgagcctgctgggccccaaggtgctgctgttcctggccgccttcataataacctccgattggatccctctgggtgtcaactcccagcgcggcgacgacgtcacacaagccaccccagaaacttttacagaagatcctaacctggtaaatgacccggcaaccgatgaaactgtcctagctgtattagctgacatcgctccatctacagatgacctggagtgctgggacgaaaaatttacatgtactcggctctactcagtccatcgaccagttaagcagtgtattcatcagctctgtttcacatccctgcgccggatgtatatcgtcaacaaggagatttgttcccggttggtctgtaaggaacacgaggctatgaaagacgaactgtgtcgccagatggcagggctgccgcctagacgtttgaggcggtctaactactttaggctgcccccctgcgaaaacgtggacttacagaggcctaatggtctctag

SEQ ID NO: 112219 - DNA, 492 bp, Artificial Sequence
  derived and/or modified sequence
atgagcctgctgggccccaaggtgctgctgttcctggccgccttcattattaccagcgattggattccactgggtgtgaacagtcagcggggtgacgacgtgacccaggccaccccagagactttcacagaagaccccaatctcgttaacgaccccgctaccgatgagaccgttctagcggtcctggccgacattgcacccagcacggatgacttagaatgttgggacgagaaatttacatgtactcggctgtacagcgttcaccggcccgtcaagcagtgcattcaccaactctgctttacctccttgcggcgcatgtacatcgtgaacaaggagatctgcagccggttagtctgcaaagagcacgaggcaatgaaagacgaattgtgtcgtcagatggctggactgcctccacggcggctgaggcggtctaattattttcgactgccaccttgtgagaacgtggacctgcaaaggcctaacggactgtag

SEQ ID NO: 112220 - DNA, 492 bp, Artificial Sequence
  derived and/or modified sequence
atgtccctcctgggaccaaaggtcttgcttttcctggcagccttcattatcacctccgattggattcccttaggtgttaattcccagaggggtgacgacgttacccaggctacccccgagacatttacagaagatccaaatttggttaatgatccggctacagacgaaacagtcctggcagtgctcgctgacattgcaccatccacggacgatctagagtgctgggacgaaaagtttacttgtactagactctactcggtacacaggccagtcaagcaatgtatccaccagctttgtttcacctctctgcgcaggatgtacattgttaacaaggagatctgctcccggctggtatgcaaggaacacgaagccatgaaagacgagctgtgtcgccagatggccggattacctccccgacgacttcggcgttccaactattttaggctgcccccatgtgaaaacgtggatttgcagcggcctaacggtttatag

SEQ ID NO: 112221 - DNA, 492 bp, Artificial Sequence
  derived and/or modified sequence
atgtcattgctggggccaaaagtcctgctttttctcgccgcattcattattacgagcgactggataccactcggtgtcaattctcagcgcggtgacgatgtgacccaagctactcccgaaaccttcaccgaggacccaaatctagtcaacgatcccgcaacagacgagaccgtgctagctgtgcttgccgacatcgcaccatcaaccgatgacctggagtgctgggacgaaaaattcacatgcacacgcttatactctgttcatagaccagtcaagcaatgtatccaccagctgtgctttactagccttagaagaatgtacattgtgaacaaggaaatctgttcccggctggtctgtaaagagcacgaagctatgaaggacgagttgtgcaggcagatggccggtctgcctccaagaaggctgcgtcgctcgaactacttccgcctccctccgtgcgagaatgtggatctccagaggcctaatggattgtag

SEQ ID NO: 112222 - DNA, 492 bp, Artificial Sequence
  derived and/or modified sequence
atgtccttactcggtcctaaggtgcttctattcctggccgcattcataattacatctgattggatccctctcggggtgaattcccagcgaggcgacgatgtgactcaggccactcccgaaacgtttacagaggaccctaatctcgtcaatgatcccgcaacagatgagacagttcttgcagtgctggcagatatagctccgtcgaccgatgacctggaatgttgggacgagaaattcacttgcacccgcttatactccgtgcaccgtcctgtgaagcaatgtattcatcagttgtgtttcacctcccttcgaagaatgtacatcgtcaacaaggaaatatgctcacgcctggtctgcaaggaacacgaagccatgaaagatgaattgtgtcgacagatggccgggctcccccctaggaggctcagaagaagtaattatttccgccttccaccctgtgaaaatgtggatttgcagcgccccaacggactgtag

SEQ ID NO: 112223 - DNA, 492 bp, Artificial Sequence
  derived and/or modified sequence
atgtctctgttggggcctaaggtgttactgtttctagctgctttcataattacaagtgattggattccactgggtgttaattctcagagaggagatgacgtgactcaagcaactcccgaaacatttactgaggatcccaacttggtgaacgacccagccaccgacgagacggttctggccgtgctagcagacattgccccatcaaccgatgacctggaatgttgggatgagaaattcacctgcacaagactgtacagcgtacaccgccccgtcaaacagtgtattcaccaattatgtttcacttccctcagaaggatgtacattgtgaacaaagagatatgttcaaggctggtgtgtaaagagcatgaagccatgaaggacgagctgtgtagacagatggcaggtctccccccccgacggttgcgccgttccaattactttagactcccaccttgtgagaacgtggacttgcaaaggccaaacgggttgtag

SEQ ID NO: 112224 - DNA, 492 bp, Artificial Sequence
  derived and/or modified sequence
atgtctctcctgggccctaaggttctcctgttcctcgcagctttcatcataacttctgattggattccactgggagttaattcgcaaagaggcgatgacgtgacacaggccacccccgaaacctttaccgaggatccaaatctagtcaacgaccctgctacagacgaaacggtgctcgccgtgttggccgacattgctccctccactgacgacttggagtgttgggatgaaaagttcacatgcacgcgactctattcagtgcatagaccggtcaaacagtgcatccaccagctgtgctttacatcactgaggaggatgtatatagtaaataaagagatctgttccagactggtatgcaaagagcacgaagctatgaaggacgaactctgtcggcagatggctggcctccctcctcgccgactcagaagatcaaattattttagactccccccctgtgagaacgtggacctgcagcgacccaacggcctctag

SEQ ID NO: 112225 - DNA, 492 bp, Artificial Sequence
  derived and/or modified sequence
atgtctttgctaggacctaaagttctgttgttcctggccgcctttattattacatctgattggatcccccttggagtgaattcccaacgcggtgatgacgtaacccaggccacccccgaaaccttcactgaggacccaaatcttgtgaacgacccggccactgatgagacggttttagccgtgctggctgacatcgcccccagtacggatgatctggaatgttgggacgaaaagttcacatgtacacgcctttattcagtgcaccgtccagttaaacagtgcatacatcaactttgcttcacttccctcagaaggatgtacattgtgaacaaagagatatgttcaaggctggtgtgtaaagagcatgaagccatgaaggacgagctgtgtagacagatggcaggtctccccccccgacggttgcgccgttccaattactttagactcccaccttgtgagaacgtggacttgcaaaggccaaacgggttgtag

SEQ ID NO: 112226 - DNA, 492 bp, Artificial Sequence
  derived and/or modified sequence
atgagcctgctgggccccaaggtgctgctgttcctggccgccttcatcatcaccagcgactggatccccctgggcgtgaacagccagagaggcgacgacgtgacccaggccacccccgagaccttcaccgaggaccccaacctggtgaacgaccccgccaccgacgagaccgtgctggccgtgctggccgacatcgcccccagcaccgacgacctggagtgctgggacgagaagttcacctgcaccagactgtacagcgtgcacagacccgtgaagcagtgcatccaccagctgtgcttcaccagcctgagaagaatgtacatcgtgaacaaggagatctgcagcagactggtgtgcaaggagcacgaggccatgaaggacgagctgtgcagacagatggccggcctgccccccagaagactgagaagaagcaactacttcagactgcccccctgcgagaacgtggacctgcagagacccaacggcctgtag

SEQ ID NO: 112227 - protein, 148 aa, Artificial Sequence
  derived and/or modified sequence
MSLLGPKVLLFLAAFIITSDWIPLGVNSQRGDDVTQATPETFTEDPNLVNDPATDETECWDEKFTCTRLYSVHRPVKQCIHQLCFTSLRRMYIVNKEICSRLVCKEHEAMKDELCRQMAGLPPRRLRRSNYFRLPPCENVDLQRPNGL

SEQ ID NO: 112228 - DNA, 447 bp, Artificial Sequence
  derived and/or modified sequence
atgagtcttctgggccccaaggtgctcttgtttctcgcagcttttattattacctccgactggatcccattgggggtgaatagccagaggggggacgacgtaacacaggcaacacccgaaacattcactgaagatccaaatctggtgaatgaccctgccacagacgagacagaatgctgggacgaaaagttcacctgtaccaggctttactctgtccacagacctgtgaaacagtgcatccatcagctgtgttttacgagcctgcgacgtatgtacatcgtcaacaaggagatctgctcaagactggtgtgcaaagagcatgaggccatgaaggacgagctgtgcaggcagatggcgggccttcctcctagaagactgagacgatccaactatttcagattgcccccatgcgagaatgtcgatttgcaacgtccaaacggactgtag

SEQ ID NO: 112229 - DNA, 447 bp, Artificial Sequence
  derived and/or modified sequence
atgagcctgctgggccccaaggtgctgctcttcctggccgccttcatcatcaccagtgactggatccccctgggcgtgaacagccagagaggagatgatgtgacccaggccaccccagagaccttcacagaggaccccaacctggtgaatgaccctgccacagatgaaacagagtgctgggatgagaagttcacctgcacccggctgtacagcgtgcacaggcctgtgaagcagtgcatccaccagctgtgcttcaccagcctgcggaggatgtacatcgtgaacaaggagatctgcagccggctggtgtgcaaggagcacgaggccatgaaggatgagctgtgccggcagatggccggcctgcccccccggcggctgcggcgcagcaactacttccggctgcccccctgtgaaaatgtggacctgcagaggcccaacggcctgtag

SEQ ID NO: 112230 - DNA, 2308 bp, Artificial Sequence
  derived and/or modified sequence
atttggaatgagggtgtgagcaactgcaaattcccatctcccttctcattccagcctcattgtaacacacattctacgcctagcctggctttcttgctctccctcatctcattgtttcagcggaggccaaatctgaagtcctttccagggagtggctctgttcatcttattcgccagccaaagtaggaacagcgtaagaggagagagacacattcagcagccaaaggactcggtggaaagagcagaacaccatagacaatatgtcgctcttgggacccaaggtgctgctgtttcttgctgcattcatcatcacctctgactggatacccctgggggtcaatagtcaacgaggagacgatgtgactcaagcgactccagaaacattcacagaagatcctaatctggtgaatgatcccgctacagatgaaacagagtgctgggatgagaaatttacctgcacaaggctctactctgtgcatcggccggttaaacaatgcattcatcagttatgcttcaccagtttacgacgtatgtacatcgtcaacaaggagatctgctctcgtcttgtctgtaaggaacacgaagctatgaaagatgagctttgccgtcagatggctggtctgccccctaggagactccgtcgctccaattacttccgacttcctccctgtgaaaatgtggatttgcagagacccaatggtctgtgatcattgaaaaagaggaaagaagaaaaaatgtatgggtgagaggaaggaggatctccttcttctccaaccattgacagctaacccttagacagtatttcttaaaccaatccttttgcaatgtccagcttttacccctactctctactttttcacccaaactgataacatttatctcattttctagcacttaaaatacaaagtctatattattgcataattttgctgcttctcaatatcatagacacagtgaatagatgatgactatatggcttatatacaaacattctatgtacaatttcaagggagactaaactttaggctaataatctttactattgaatctgtctgatatagatcttagggttgaagaagctatctttgtctatttgggctaaccatagaatttcatttattttcctcacaatattttcctagaccaactccccatcattcacgtgttcctctttactcttactttaactattttgctggcttgcccgaaaatttgcctggcaagtcttccttataagacacatcatggtaagttttgtagtcctgtaagattctgcaacacagtcaagaattatacaatcctactagcaatatataaggacccaaaatgtcttctgctaagctcagaggctggggctaaagcatgaggactatgccagctatagaacttggactcataattcgctatccaatttttcatgcagttgtctagtcgggaagtaaggttggaaactaagtctcatttactgattcgtttatgggtagtaccgggatgaacccaccaccacaaagcaaattagacaacttaatgtgaaatcataccattggttgacgtttccttgagttgctacttcgttcatcttcacaacttaacaagtgcacggtcgaattattgtgcaagtggcttttggatatcctgattggggcctaagaagggcattcagacttgaattttaataggcagacagaaagtttgcctaatagttaatacgaaagagtgaaagaaacacaatattcagacaacccacattcttatcctggctctagcagtaaccacgtagccttggataagccattttccttcattaggtcctggtttaatttcctcatctttaaaatgagaaggttaaatttatcttagtactgctgggcgcagtggctcatgcctgtaatctgagcactttgggaagctgaggcgggtggatcacttgaggtcagaaatttgagacgagcctggccaacatggtgaaaccccatctctactaaaaatacaaaaattagctgggcgtggtggcacgtgcctgtaatcccagctactcgggaggctgaggcaggagaatcaattgaacctgggaggcagaggttgcagtgagccgagatggcgccattgcactccagcctgggtgacaaaagcaaaagtccatcttaagaaatatatatatatattatatatattcttagttctaagatttcctttaattctatgattctctggatttaaatgcattattcatatttcttgaagcttagatacagtctaattcatagcaaccatatctgctttatcctaggtgagggtagcagtccac

SEQ ID NO: 112231 - DNA, 447 bp, Artificial Sequence
  derived and/or modified sequence
atgagcctgctgggccccaaggtgctgctgttcctggccgccttcatcatcaccagcgattggattcctctgggagtgaactctcagcgcggcgacgacgtgacacaagcaacacccgagacctttacagaggatcctaacctcgttaacgaccctgccactgacgaaacagaatgctgggacgaaaagtttacctgcactcgattatacagcgtacacaggcccgtaaagcagtgcatccaccagttgtgtttcaccagccttagaaggatgtacatcgtgaacaaagagatttgcagccgcctggtctgtaaggaacatgaggccatgaaagatgagttgtgcagacagatggctggtttgccaccaaggcgcttgcgacgttcaaactactttcgcctgccaccgtgtgagaatgttgatctccagaggcccaacgggttgtag

SEQ ID NO: 112232 - DNA, 447 bp, Artificial Sequence
  derived and/or modified sequence
atgtcactcctggggcctaaggtgctgttattcttagctgcctttattatcaccagtgactggatcccactgggcgtcaactcccagcgtggagatgatgtgactcaggctactcctgaaacgttcacggaagaccccaatcttgttaatgatccagccaccgatgaaacggagtgctgggacgagaaattcacctgcacacggctatactccgttcatagacccgttaaacagtgcatacaccagctgtgcttcacaagtctgaggcggatgtatatagtcaacaaggaaatctgttcgcggcttgtgtgcaaggagcatgaggcaatgaaagatgaactgtgtaggcagatggctggcttgcccccacgtcgcctgcgaagatctaactatttccggcttcctccgtgcgaaaatgtcgacttacaacgaccaaatggcttgtag

SEQ ID NO: 112233 - DNA, 447 bp, Artificial Sequence
  derived and/or modified sequence
atgtcactactgggtcccaaggtgttactgttcctcgctgcattcataataacatccgattggattccattaggcgttaactcacagcgcggggatgacgttacccaggcaacgccagaaacctttacggaagatcctaacctggtcaatgatccagccaccgacgagacagagtgctgggatgagaaatttacttgtacacgcttgtatagcgtacacagacctgtcaagcagtgtattcaccagctgtgctttactagccttagaagaatgtacatagttaacaaagaaatctgcagccgcttggtttgcaaggagcacgaagctatgaaagacgagttgtgccgccaaatggcaggacttcccccacgacggttgcgtaggtccaattatttcagactgccaccctgtgagaatgtggacctgcaacgaccaaacggcctgtag

SEQ ID NO: 112234 - DNA, 447 bp, Artificial Sequence
  derived and/or modified sequence
atgtcgttgcttgggcctaaagtgcttctttttctggctgccttcataattacatctgactggatccccctgggcgtgaactcgcagcgcggagatgatgtgacacaagctactcccgaaaccttcacggaagatcctaacctggtgaatgatccagccacagacgagaccgaatgttgggatgaaaaattcacctgtactagactctactccgtgcatcgccccgtcaaacagtgcattcaccaactttgttttacttccctacggcgcatgtacatcgtcaataaagagatttgttcgcggctggtatgcaaggaacatgaagctatgaaggatgagctctgccgacaaatggccggcctccccccaagacgactaaggcggtcaaactatttccgattgcctccctgcgaaaatgtcgatctccaacgaccaaatggcttgtag

SEQ ID NO: 112235 - DNA, 447 bp, Artificial Sequence
  derived and/or modified sequence
atgagcctgctgggccccaaggtgctgctgttcctggccgccttcatcatcaccagcgactggatccccctgggcgtgaacagccagagaggcgacgacgtgacccaggccacccccgagaccttcaccgaggaccccaacctggtgaacgaccccgccaccgacgagaccgagtgctgggacgagaagttcacctgcaccagactgtacagcgtgcacagacccgtgaagcagtgcatccaccagctgtgcttcaccagcctgagaagaatgtacatcgtgaacaaggagatctgcagcagactggtgtgcaaggagcacgaggccatgaaggacgagctgtgcagacagatggccggcctgccccccagaagactgagaagaagcaactacttcagactgcccccctgcgagaacgtggacctgcagagacccaacggcctgtag

SEQ ID NO: 112236 - protein, 676 aa, Artificial Sequence
  derived and/or modified sequence
MEDSYKDRTSLMKGAKDIAREVKKQTVKKVNQAVDRAQDEYTQRSYSRFQDEEDDDDYYPAGETYNGEANDDEGSSEATEGHDEDDEIYEGEYQGIPSMNQAKDSIVSVGQPKGDEYKDRRELESERRADEEELAQQYELIIQECGHGRFQWALFFVLGMALMADGVEVFVVGFVLPSAETDLCIPNSGSGWLGSIVYLGMMVGAFFWGGLADKVGRKQSLLICMSVNGFFAFLSSFVQGYGFFLFCRLLSGFGIGGAIPTVFSYFAEVLAREKRGEHLSWLCMFWMIGGIYASAMAWAIIPHYGWSFSMGSAYQFHSWRVFVIVCALPCVSSVVALTFMPESPRFLLEVGKHDEAWMILKLIHDTNMRARGQPEKVFTVNKIKTPKQIDELIEIESDTGTWYRRCFVRIRTELYGIWLTFMRCFNYPVRDNTIKLTIVWFTLSFGYYGLSVWFPDVIKPLQSDEYALLTRNVERDKYANFTINFTMENQIHTGMEYDNGRFIGVKFKSVTFKDSVFKSCTFEDVTSVNTYFKNCTFIDTVFDNTDFEPYKFIDSEFKNCSFFHNKTGCQITFDDDYSAYWIYFVNFLGTLAVLPGNIVSALLMDRIGRLTMLGGSMVLSGISCFFLWFGTSESMMIGMLCLYNGLTISAWNSLDVVTVELYPTDRRRRVLPCCPG

SEQ ID NO: 112237 - DNA, 2031 bp, Artificial Sequence
  derived and/or modified sequence
atggaggacagctacaaggacagaaccagcctgatgaagggcgccaaggacatcgccagagaggtgaagaagcagaccgtgaagaaggtgaaccaggccgtggacagagcccaggacgagtacacccagagaagctacagcagattccaggacgaggaggacgacgacgactactaccccgccggcgagacctacaacggcgaggccaacgacgacgagggcagcagcgaggccaccgagggccacgacgaggacgacgagatctacgagggcgagtaccagggcatccccagcatgaaccaggccaaggacagcatcgtgagcgtgggccagcccaagggcgacgagtacaaggacagaagagagctggagagcgagagaagagccgacgaggaggagctggcccagcagtacgagctgatcatccaggagtgcggccacggcagattccagtgggccctgttcttcgtgctgggcatggccctgatggccgacggcgtggaggtgttcgtggtgggcttcgtgctgcccagcgccgagaccgacctgtgcatccccaacagcggcagcggctggctgggcagcatcgtgtacctgggcatgatggtgggcgccttcttctggggcggcctggccgacaaggtgggcagaaagcagagcctgctgatctgcatgagcgtgaacggcttcttcgccttcctgagcagcttcgtgcagggctacggcttcttcctgttctgcagactgctgagcggcttcggcatcggcggcgccatccccaccgtgttcagctacttcgccgaggtgctggccagagagaagagaggcgagcacctgagctggctgtgcatgttctggatgatcggcggcatctacgccagcgccatggcctgggccatcatcccccactacggctggagcttcagcatgggcagcgcctaccagttccacagctggagagtgttcgtgatcgtgtgcgccctgccctgcgtgagcagcgtggtggccctgaccttcatgcccgagagccccagattcctgctggaggtgggcaagcacgacgaggcctggatgatcctgaagctgatccacgacaccaacatgagagccagaggccagcccgagaaggtgttcaccgtgaacaagatcaagacccccaagcagatcgacgagctgatcgagatcgagagcgacaccggcacctggtacagaagatgcttcgtgagaatcagaaccgagctgtacggcatctggctgaccttcatgagatgcttcaactaccccgtgagagacaacaccatcaagctgaccatcgtgtggttcaccctgagcttcggctactacggcctgagcgtgtggttccccgacgtgatcaagcccctgcagagcgacgagtacgccctgctgaccagaaacgtggagagagacaagtacgccaacttcaccatcaacttcaccatggagaaccagatccacaccggcatggagtacgacaacggcagattcatcggcgtgaagttcaagagcgtgaccttcaaggacagcgtgttcaagagctgcaccttcgaggacgtgaccagcgtgaacacctacttcaagaactgcaccttcatcgacaccgtgttcgacaacaccgacttcgagccctacaagttcatcgacagcgagttcaagaactgcagcttcttccacaacaagaccggctgccagatcaccttcgacgacgactacagcgcctactggatctacttcgtgaacttcctgggcaccctggccgtgctgcccggcaacatcgtgagcgccctgctgatggacagaatcggcagactgaccatgctgggcggcagcatggtgctgagcggcatcagctgcttcttcctgtggttcggcaccagcgagagcatgatgatcggcatgctgtgcctgtacaacggcctgaccatcagcgcctggaacagcctggacgtggtgaccgtggagctgtaccccaccgacagaagaagaagagtgctgccctgctgccccggctag

SEQ ID NO: 112238 - DNA, 2031 bp, Artificial Sequence
  derived and/or modified sequence
atggaggattcttataaagacagaacttctctcatgaagggagcaaaggatatcgctcgcgaggttaaaaagcaaaccgtgaagaaggtcaatcaagccgtagatcgcgcccaggacgagtacacacagcggagctacagccggtttcaggacgaggaggatgatgatgattattatccagctggagagacctacaatggtgaggccaacgatgacgagggctcatcggaagccacggagggccacgatgaagacgatgaaatctatgaaggcgaataccagggaatcccctctatgaaccaggctaaggatagtatcgtatcagtagggcagcctaaaggggacgagtacaaagatcgtcgggagctggagagtgagcgtagggctgacgaggaagaattggcccagcagtatgagctgatcattcaggaatgcggccatggcagatttcagtgggccctgttcttcgtactagggatggcactgatggccgacggggtcgaagtctttgtagtcggctttgtgttgccgagcgcagagactgatctttgcattcccaacagcggcagcggctggcttgggtctatcgtctacctgggaatgatggtcggagcctttttttgggggggattagcagacaaagtggggcggaaacagagcctcctgatttgtatgtccgtgaatggatttttcgcattcctgagctcctttgtccaggggtatggcttttttttgttttgtaggctgctgtctgggtttgggatcggaggcgccattcccaccgtgttttcgtatttcgctgaggttctcgcacgcgagaaacgtggcgagcacttaagttggttgtgtatgttctggatgatcggaggaatctatgcgtctgctatggcctgggccattatcccacactatggttggagcttcagcatgggctcggcctaccagttccactcctggagggtgttcgttatcgtttgcgctcttccatgcgtttcttcagtggtcgccttaacctttatgcccgaaagcccaaggtttttactcgaagtcgggaagcacgatgaggcatggatgatactgaagcttattcacgataccaatatgcgcgcccgcggacagccggagaaggtgttcaccgttaacaaaattaagacgccgaagcagatcgatgagttaatcgagatcgagtctgataccggtacctggtaccgccgctgctttgtcagaatccgaactgagctatacggcatctggttgacctttatgcgatgctttaactacccagtgcgggacaatacaatcaaactcaccattgtctggttcactctttcctttggatactacgggttgtcagtgtggtttccagacgttattaagccactccagagcgacgagtatgctttgctcacaaggaatgttgaacgcgacaagtacgccaactttacaataaatttcacgatggagaaccagatacatacgggaatggaatatgacaacgggagattcataggagtaaagttcaagtctgttacctttaaagattcagtcttcaagtcttgcacctttgaagacgtgacttccgtaaatacatactttaagaattgcacttttatcgacactgtttttgacaatacagacttcgagccatacaaatttatcgattcggaattcaaaaactgcagtttctttcacaataaaaccggatgtcagataacgttcgacgatgattactctgcttactggatttactttgtcaacttcttgggcaccctcgccgtgttgcccgggaacattgtcagcgcactgttgatggaccgtatcggtcgtctcaccatgttgggcggcagtatggtgctcagcgggatcagctgcttcttcctctggttcgggacgtcagaatctatgatgatcggaatgctgtgtctatacaatggcctgacaatctccgcctggaacagcctcgacgttgttacagtggagctgtatccgactgatcggcgtcgccgggtgctcccttgctgtcccggatag

SEQ ID NO: 112239 - DNA, 2031 bp, Artificial Sequence
  derived and/or modified sequence
atggaggacagctacaaggacaggaccagcctgatgaagggggccaaggacatcgcccgggaggtgaagaagcagacagtgaagaaggtgaaccaggccgtggaccgggcccaggatgagtacacccagaggagctacagccgcttccaggatgaagaagatgatgatgactactacccagctggggagacctacaacggggaggccaatgatgatgagggcagcagcgaggccacagagggccatgatgaagatgatgagatctatgaaggagagtaccagggcatccccagcatgaaccaggccaaggacagcatcgtgtctgtgggccagcccaagggagatgagtacaaggaccggcgggagctggagagcgagaggagagcagatgaggaggagctggcccagcagtatgagctgatcatccaggagtgtggccacggccgcttccagtgggccctcttctttgtgctgggcatggccctgatggctgatggagtggaggtgtttgtggtgggctttgtgctgcccagcgctgagacagacctgtgcatccccaacagcggcagcggctggctgggcagcatcgtgtacctgggcatgatggtgggcgccttcttctggggcggcctggccgacaaggtgggcaggaagcagagcctgctgatctgcatgtctgtgaatggcttctttgccttcctgagcagctttgtgcagggctacggcttcttcctgttctgccgcctgctgagcggctttggaattggaggagccatccccaccgtcttctcctactttgctgaggtgctggcccgggagaagagaggagagcacctgtcctggctgtgcatgttctggatgattggaggcatctatgccagcgccatggcctgggccatcatcccccactacggctggagcttctccatgggcagcgcctaccagttccacagctggagggtgtttgtgattgtgtgtgccctgccctgtgtgtcctctgtggtggccctgaccttcatgcctgagagcccccgcttcctgctggaggtgggcaagcatgatgaggcctggatgatcctgaagctgattcatgacaccaacatgagggcccggggccagcctgagaaggtgttcaccgtgaacaagatcaagacccccaagcagattgatgagctgattgaaattgaaagtgacaccggcacctggtaccgccgctgctttgtgcgcatcagaacagagctgtatggcatctggctgaccttcatgcgctgcttcaactaccctgtgcgggacaacaccatcaagctgaccatcgtgtggttcaccctgagctttggctactacggcctgtctgtgtggttcccagatgtgatcaagcccctgcagagtgatgaatatgccctgctgaccagaaatgtggagcgggacaagtatgccaacttcaccatcaacttcaccatggagaaccagatccacacaggcatggagtatgacaatggccgcttcatcggcgtgaagttcaagtctgtgaccttcaaggacagcgtcttcaagagctgcacctttgaagatgtgacctctgtgaacacctacttcaagaactgcaccttcatcgacacagtgtttgacaacacagactttgagccctacaagttcattgattctgagttcaagaactgcagcttcttccacaacaagacaggctgccagatcacctttgatgatgactacagcgcctactggatctactttgtgaacttcctgggcaccctggccgtgctgcccggcaacatcgtgtctgccctgctgatggacagaattggccgcctgaccatgctgggcggctccatggtgctgagcggcatcagctgcttcttcctgtggtttggcaccagcgagagcatgatgattggcatgctgtgcctgtacaacggcctgaccatcagcgcctggaacagcctggatgtggtgacagtggagctgtaccccacagacagaagaagaagagtgctgccctgctgccctggatag

SEQ ID NO: 112240 - DNA, 2031 bp, Artificial Sequence
  derived and/or modified sequence
atggaggacagctacaaggaccggaccagcctgatgaagggcgccaaagatattgcacgggaagtgaagaagcaaaccgttaagaaagtgaaccaagctgtcgaccgggcacaggatgagtacacacagcgcagctacagcaggtttcaagacgaggaggacgatgacgactattatcccgcgggggaaacatacaacggcgaagctaatgacgatgaggggagtagcgaggctaccgagggccatgatgaggatgacgagatctacgagggggagtaccagggaataccatctatgaatcaggcgaaagactcaatcgtgtccgtaggacagcccaaaggtgatgagtacaaagataggcgcgagttggaatccgaaaggcgggctgatgaggaagaactggctcagcaatacgagctcattattcaagagtgtgggcacggcagatttcagtgggccttattcttcgtgttgggaatggctcttatggcggatggggtggaggtctttgtggtgggatttgtgctgcctagtgcagagacagatctgtgcatcccgaactccggatccgggtggctggggtctattgtgtacctcggaatgatggtgggcgcgtttttttggggtgggctggcagataaggtgggcagaaaacagagcctcctgatctgtatgtcagtaaatggcttctttgccttcctgtcttccttcgtacagggttatggctttttcctcttttgtcgactgctgtctggcttcggaattggcggggctatccctactgtgttttcctacttcgcagaggtgctagcaagagaaaagcggggcgagcatttgagctggctgtgtatgttctggatgatcggaggtatttacgcttcagctatggcctgggcgatcatcccacattacgggtggagtttcagcatgggcagcgcctatcaattccactcttggagagtcttcgtcattgtgtgcgcgttgccatgcgtgagttccgtcgtggccttaacttttatgcctgagtcgccacggttcctgttagaggtgggcaaacatgatgaggcctggatgatcttaaaactgatccatgacacaaacatgcgtgcacggggccaacccgagaaagtattcacagtgaacaagataaaaaccccaaagcaaattgacgagctgattgagattgaatcagataccggcacgtggtatagaagatgctttgtgcgaattcgtaccgaactgtacggtatctggctgacatttatgagatgtttcaattaccctgttcgggacaacactatcaagttgacgattgtgtggttcaccctatcatttggatattacggattgagcgtctggtttcctgacgtaataaaacccctgcagtcggatgaatacgctttgctgactcgcaacgtggagagagataaatacgctaactttacgatcaatttcacaatggagaaccaaattcataccgggatggaatatgataatgggcgttttattggggtgaagttcaagagcgtgacgtttaaagattccgtcttcaaaagctgcaccttcgaagacgtgacaagcgtcaatacgtattttaagaattgtacatttattgacaccgtgtttgataacacggacttcgagccttacaagtttatagactccgagtttaaaaactgttcgttttttcacaacaaaaccgggtgccaaatcacctttgacgacgattatagtgcttattggatctactttgtgaacttcctcggaaccttagctgtgctgcctggcaatatcgtttccgccctgctgatggatcgtatcgggaggctgaccatgttaggtggaagcatggtgctttccggaatttcctgtttcttcctgtggtttggtacatccgagagcatgatgataggaatgctgtgcctttacaacgggctaaccatctccgcctggaactcgctcgacgtcgtcactgtggagttgtaccccacagacaggagacggcgggtcttaccctgttgtcctggatag

SEQ ID NO: 112241 - DNA, 2031 bp, Artificial Sequence
  derived and/or modified sequence
atggaggacagctataaggatcggacaagcctcatgaaaggagcgaaagacatcgcccgagaagtgaagaagcaaacagtcaagaaggtgaaccaggcggtggacagagcccaagatgagtatactcaacggtcatacagtaggttccaggacgaagaagacgacgatgactattatcctgccggtgagacttataatggggaggcaaacgacgacgagggctcgtctgaggctacagagggccatgacgaggacgacgaaatatatgagggggaatatcagggtattcccagcatgaatcaggctaaggacagcattgttagcgttggacagcctaaaggcgatgagtacaaagatcggagagagcttgagtccgagagaagggctgatgaggaagaactggcgcagcaatacgagctgatcatccaggaatgtggacacggcagattccaatgggccctgttcttcgtattgggcatggccctcatggccgatggcgtggaggtgtttgtcgtgggcttcgtactgccatctgcagagaccgatctctgcatccccaactccggttcaggctggttgggcagtatagtatatcttggcatgatggtgggcgctttcttttggggcggactggccgataaagtgggcagaaagcagagtctgctcatctgcatgtctgtgaacggattctttgcctttctctcctccttcgtgcagggctacggattttttttgttctgtcgccttttatcaggattcggaattggcggagcaataccaacagtattctcatactttgctgaggtcctggctcgcgaaaagaggggagaacacttgtcgtggctctgcatgttttggatgatcggagggatttatgctagtgctatggcatgggcaatcatccctcactatgggtggtccttctcaatggggagcgcataccaatttcacagttggagggtgtttgtcatcgtttgcgccctgccatgcgtgtctagcgtagtggccctgactttcatgcccgagtcaccacggttcctgctggaagtagggaaacatgacgaggcatggatgatcctcaagttgattcacgatacgaacatgcgggcacgcggacagccagaaaaggtcttcacagtgaataagatcaagacccctaaacagattgatgaactcattgaaattgagtctgatacaggcacttggtataggcgctgtttcgtaagaatccgcacagagttgtatgggatttggctgacctttatgcgttgtttcaattaccccgtacgggataacactatcaagttaacaatcgtctggttcactcttagtttcggatactacggactcagcgtgtggtttccagacgtgataaagccccttcagtccgacgagtacgcattgctaacacgaaacgtggagcgggacaaatacgccaatttcacgatcaatttcacaatggagaaccagatccacacgggcatggaatacgataatggtcgattcatcggagttaagttcaaaagcgtcacatttaaagacagtgttttcaagagctgcaccttcgaggatgtgacttcagtcaacacctatttcaagaattgtactttcattgataccgtctttgacaacacggattttgaaccatataagtttatcgattccgagttcaaaaactgcagcttttttcataataaaaccggatgccagattaccttcgacgacgactactccgcctactggatttattttgtcaactttttagggaccttagcagtgttgccaggcaacatcgttagcgcattattgatggaccgcattgggcgactgaccatgctaggaggaagcatggtgttatcaggtatctcctgcttctttctttggttcggaacttccgagtctatgatgattggtatgctttgcctctataatggtcttaccataagcgcctggaacagtctggatgtggttactgtcgaactgtatccaactgatcgccgaaggcgtgtccttccatgttgtcctggatag

SEQ ID NO: 112242 - DNA, 3010 bp, Artificial Sequence
  derived and/or modified sequence
gacggaggcagcccggggaagcgagccggagcggcgcccgcactgaggcggctgcagtgctgacaccactcagggcaagggtgtccgacggctggagcgttctgttttgaacccaaagtggatgatgctgtcagagctgaaccactgaaaggaggctgtgaaaatttcccatcttctcattggccatcagttgagataagatggaagactcttacaaggataggacttcactgatgaagggtgccaaggacattgccagagaggtgaagaaacaaacagtaaagaaggtgaatcaagctgtggaccgagcccaggatgaatacacccagaggtcctacagtcggttccaagatgaagaagatgatgatgactactacccggctggagaaacctataatggtgaggccaacgatgacgaaggctcaagtgaagccactgaggggcatgatgaagatgatgagatctatgagggggagtatcagggcatccccagtatgaaccaagcgaaggacagcatcgtgtcagtggggcagcccaagggcgatgagtacaaggaccggcgggagctggaatcagaaaggagagctgacgaggaagagttagcccagcagtatgagctgataatccaagaatgcggtcatggtcgttttcagtgggcccttttcttcgtcctgggcatggctcttatggcagacggtgtagaggtgtttgtcgttggcttcgtgttacccagtgctgagacagacctctgcatcccaaattcaggatctggatggctaggcagcatagtgtacctcgggatgatggtgggggcgttcttctggggaggactggcagacaaagtgggaaggaaacagtctcttctgatttgcatgtctgtcaacggattctttgccttcctttcttcatttgtccaaggttatggcttctttctcttctgtcgcttactttctggattcgggattggaggagccatacccactgtgttctcgtactttgctgaagtcctggcccgggaaaagcggggcgaacacttgagctggctctgcatgttctggatgatcggtggcatctacgcctctgccatggcctgggccatcatcccgcactacgggtggagcttcagcatgggatcggcctaccagtttcacagttggcgtgtgtttgtcatcgtctgtgcactcccctgtgtctcctccgtggtggccctcacattcatgcctgaaagcccacgattcttgttggaggttggaaaacatgatgaagcttggatgattctgaagttaattcatgacaccaacatgagagcccggggtcagcctgagaaggtcttcacggtaaacaaaataaaaactcctaaacaaatagatgagctgattgaaattgagagtgacacaggaacatggtataggaggtgttttgttcggatccgcaccgagctgtacggaatttggttgacttttatgagatgtttcaactacccagtcagggataatacaataaagcttacaattgtttggttcaccctgtcctttgggtactatggattatccgtttggttccctgatgtcattaaacctctgcagtccgatgaatatgcattgctaaccagaaatgtggagagagataaatatgcaaatttcactattaactttacaatggaaaatcagattcatactggaatggaatacgacaatggcagattcataggggtcaagttcaaatctgtaactttcaaagactctgtttttaagtcctgcacctttgaggatgtaacttcagtgaacacctacttcaagaactgcacatttattgacactgtttttgacaacacagattttgagccatataaattcattgacagtgaatttaaaaactgctcgttttttcacaacaagacgggatgtcagattacctttgatgatgactatagtgcctactggatttattttgtcaactttctggggacattggcagtattgccagggaacattgtgtctgctctgctgatggacagaattgggcgcttaacaatgctaggtggctctatggtgctttcggggatcagctgtttcttcctttggttcggcaccagtgaatccatgatgataggcatgctgtgtctgtacaatggattgaccatctcagcctggaactctcttgacgtggtcactgtggaactgtaccccacagaccggagacgcagagtcttgccatgttgccccggctgatcttgaactcctggcctcaagcaatcctcctgcctcagcctcccaaagttctgggattacagtctcgagccactgcacctggctttctttccatttttgaggattaaaattacttgaaattttccaaatatattatacaaggtcttgctaagaacttagtagatttctttattgttgtcttttttctctctcttttgccttgtagaaatatcccacaaagtgaagtaaccaagtcaacaagtgtgaacaattttatagctctccttaaatttactatacagctctcagaaacaacggagccagtttatagcaggagccattagtgggtgtggacctcttttctaagatctgcttctaaacttggctttatcacataaagagagaaaagcattacaaacaatttgaaggaattctttgtcttataaaaaaaattctgaaaacctccttgtattcccactaggaggtatagttaaccttgcaactccacaaacagaccactttacacacttgcccaggggcctttgtttttgcttgcccctcctctgaaatgctctctacaggtgattaagtggcttttccctttacttaggtgtctactcaggtaaaatcttaaccaagacgcctttacttaaaatgtccctctgccccaccctgaggcttttaacttgcatagccctcatcatcacctgacataatatgtacttctttgcttttatagatattatctgtgtccctccactaggatgtccatttcatgggaataaagactttgtctcttt

SEQ ID NO: 112243 - protein, 508 aa, Artificial Sequence
  derived and/or modified sequence
MADQRMDISSTISDFMSPGPTDLLSSSLGTSGVDCNRKRKGSSTDYQESMDTDKDDPHGRLEYTEHQGRIKNAREAHSQIEKRRRDKMNSFIDELASLVPTCNAMSRKLDKLTVLRMAVQHMKTLRGATNPYTEANYKPTFLSDDELKHLILRAADGFLFVVGCDRGKILFVSESVFKILNYSQNDLIGQSLFDYLHPKDIAKVKEQLSSSDTAPRERLIDAKTGLPVKTDITPGPSRLCSGARRSFFCRMKCNRPSVKVEDKDFPSTCSKKKVLQTREKITTNCYKFKIKDGSFITLRSRWFSFMNPWTKEVEYIVSTNTVVLANVLEGGDPTFPQLTASPHSMDSMLPSGEGGPKRTHPTVPGIPGGTRAGAGKIGRMIAEEIMEIHRIRGSSPSSCGSSPLNITSTPPPDASSPGGKKILNGGTPDIPSSGLLSGQAQENPGYPYSDSSSILGENPHIGIDMIDNDQGSSSPSNDEAAMAVIMSLLEADAGLGGPVDFSDLPWPL

SEQ ID NO: 112244 - protein, 526 aa, Artificial Sequence
  derived and/or modified sequence
MADQRMDISSTISDFMSPGPTDLLSSSLGTSGVDCNRKRKGSSTDYQESMDTDKDDPHGRLEYTEHQGRIKNAREAHSQIEKRRRDKMNSFIDELASLVPTCNAMSRKLDKLTVLRMAVQHMKTLRGATNPYTEANYKPTFLSDDELKHLILRAADGFLFVVGCDRGKILFVSESVFKILNYSQNDLIGQSLFDYLHPKDIAKVKEQLSSSDTAPRERLIDAKTGLPVKTDITPGPSRLCSGARRSFFCRMKCNRPSVKVEDKDFPSTCSKKKADRKSFCTIHSTGYLKSWPPTKMGLDEDNEPDNEGCNLSCLVAIGRLHSHVVPQPVNGEIRVKSMEYVSRHAIDGKFVFVDQRATAILAYLPQELLGTSCYEYFHQDDIGHLAECHRQVLQTREKITTNCYKFKIKDGSFITLRSRWFSFMNPWTKEVEYIVSTNTVVLSRVDTGHLGQVEWCTVLSRPDSRFLIAGMFTEPTSWKAGTQPSHSSQHPPTAWTACCPLEKVAQRGPTPLFQGFQGEPGLGQEK

SEQ ID NO: 112245 - protein, 626 aa, Artificial Sequence
  derived and/or modified sequence
MADQRMDISSTISDFMSPGPTDLLSSSLGTSGVDCNRKRKGSSTDYQESMDTDKDDPHGRLEYTEHQGRIKNAREAHSQIEKRRRDKMNSFIDELASLVPTCNAMSRKLDKLTVLRMAVQHMKTLRGATNPYTEANYKPTFLSDDELKHLILRAADGFLFVVGCDRGKILFVSESVFKILNYSQNDLIGQSLFDYLHPKDIAKVKEQLSSSDTAPRERLIDAKTGLPVKTDITPGPSRLCSGARRSFFCRMKCNRPSVKVEDKDFPSTCSKKKADRKSFCTIHSTGYLKSWPPTKMGLDEDNEPDNEGCNLSCLVAIGRLHSHVVPQPVNGEIRVKSMEYVSRHAIDGKFVFVDQRATAILAYLPQELLGTSCYEYFHQDDIGHLAECHRQVLQTREKITTNCYKFKIKDGSFITLRSRWFSFMNPWTKEVEYIVSTNTVVLANVLEGGDPTFPQLTASPHSMDSMLPSGEGGPKRTHPTVPGIPGGTRAGAGKIGRMIAEEIMEIHRIRGSSPSSCGSSPLNITSTPPPDASSPGGKKILNGGTPDIPSSGLLSGQAQENPGYPYSDSSSILGENPHIGIDMIDNDQGSSSPSNDEAAMAVIMSLLEADAGLGGPVDFSDLPWPL

SEQ ID NO: 112246 - protein, 76 aa, Artificial Sequence
  derived and/or modified sequence
MADQRMDISSTISDFMSPGPTDLLSSSLGTSGVDCNRKRKGSSTDYQESMDTDKDDPHGRLEYTEHQGRIKNAREA

SEQ ID NO: 112247 - protein, 135 aa, Artificial Sequence
  derived and/or modified sequence
MADQRMDISSTISDFMSPGPTDLLSSSLGTSGVDCNRKRKGSSTDYQESMDTDKDDPHGRLEYTEHQGRIKNAREAHSQIEKRRRDKMNSFIDELASLVPTCNAMSRKLDKLTVLRMAVQHMKTLRGATNPYTEA

SEQ ID NO: 112248 - DNA, 1581 bp, Artificial Sequence
  derived and/or modified sequence
atggccgaccagaggatggacatctcctccacgattagtgacttcatgtcccctggccccaccgacctgctgtctagctcactgggaacctctggcgtggactgtaatagaaagcggaaggggagcagtaccgactaccaggaatctatggataccgacaaggacgacccccacggcagacttgagtatactgagcaccaggggcggatcaaaaacgccagggaagcccactcacaaatcgagaagaggaggcgggataagatgaacagctttatcgacgagctggcctccctggtgccaacgtgcaatgccatgtccagaaaactggacaaattgacagtcttgagaatggcggtgcagcacatgaagaccctgcggggagctactaacccctacactgaggccaactacaagcctacgttcttaagcgatgacgaactgaagcacctgatactgcgcgctgcagacggcttcctgtttgtcgttggatgcgacaggggtaagattctcttcgtctctgagagcgtcttcaagattctcaattactctcagaacgatttgatcggccagtcactgtttgactacctgcacccaaaggatatcgccaaggtcaaggaacagctgagctcaagcgataccgccccccgggagcggctgattgatgcaaagactggccttccagtgaaaaccgacattacaccaggccctagtaggttatgcagcggagctcgacggtcatttttttgccgaatgaagtgtaaccggccctccgttaaagtggaggataaagacttcccatctacctgcagcaagaaaaaggccgaccgcaagtcgttttgtaccattcattcaacaggttatctaaaatcatggcctcccacaaaaatgggactcgacgaagacaacgaaccagacaacgagggatgtaacctctcctgccttgtcgcgattggtcgcctacattcccatgtagtcccccaacctgttaatggggagatcagggtgaaatcaatggaatatgtctcccggcacgccattgatggtaagttcgtgttcgtggatcaacgtgcaaccgccatactggcctacttgccccaagagctgctgggaacatcatgttacgaatactttcaccaagatgatatcgggcacttggccgaatgtcacaggcaggtcctccagacgcgcgagaaaatcactactaattgttacaaattcaagattaaggacggctcatttattactttgcgctccaggtggttttcattcatgaacccatggaccaaagaagtggagtacatcgttagcacaaataccgtcgtgttgtcgagagtggacacggggcatttaggacaggtcgagtggtgtactgtgctctcacgcccagatagtcgttttttgatcgccggcatgtttactgaacccacctcatggaaggccggtacccaaccgtcacactctagtcagcaccctccgacagcatggacggcatgctgtcctttggagaaggtggctcagagaggacccaccccgctgttccagggctttcaaggtgaaccaggactagggcaggagaagtag

SEQ ID NO: 112249 - DNA, 1881 bp, Artificial Sequence
  derived and/or modified sequence
atggccgatcagcgcatggacatcagtagcactatatcagattttatgtctccaggacccacagacctgctctcctccagccttggcacttcgggtgtagactgcaataggaagcgcaaaggtagcagcacggattatcaggaatcaatggacacagacaaagatgatccgcacgggaggctggagtataccgagcatcagggtagaataaagaacgctagggaagcccacagccagatagagaagcgacggcgcgataagatgaacagctttattgatgagctagccagtctggtcccaacatgtaatgctatgtccagaaaactcgacaaattgaccgtactccggatggcagtgcagcatatgaaaacactgcggggggcaacaaatccatacaccgaggccaattacaagcctacgtttttgtcagacgatgaactaaaacaccttatcctgagagctgccgacggcttcctgtttgtagtgggatgtgatcggggcaagattttgtttgtaagcgaaagcgtattcaaaattttaaattactctcagaatgacctcatcgggcagtcactcttcgactacttgcacccaaaggatatcgccaaagtgaaggagcagctgagttctagcgacactgcccctcgcgagcgcctcattgatgccaaaactggcttgcctgttaagaccgatatcacacctgggccctcccgcctttgttccggtgcgagacgcagctttttttgcaggatgaaatgtaaccggcccagcgttaaggttgaggataaggattttccaagtacctgctcgaagaagaaggcggaccggaagagcttctgtacaatacatagcacgggatatctgaaaagttggccccctacaaaaatggggttagacgaggacaacgagccagataatgaaggatgtaatctctcctgtctcgtcgccatcggcaggctacattcacacgtagtgccccaaccagttaacggagaaatcagggtcaaaagcatggaatatgtgtctagacacgcaattgacggaaagtttgtattcgtggatcagcgtgctaccgccatcttggcttatttacctcaagagctgctcggcacatcttgttatgagtacttccaccaggacgacattgggcatctggctgaatgtcacaggcaggtgctccagacgagagagaaaataacaaccaactgttacaagttcaagattaaggacggtagtttcattactctgaggagccggtggttttctttcatgaacccgtggactaaggaggtggagtatattgtgtcaaccaatactgttgtccttgccaatgttctagagggcggggatcctacgttcccacaattgaccgcatctccgcattccatggatagtatgctgcctagcggcgaggggggccctaagcggacccacccgaccgttcctgggatcccaggtggcacccgcgctggggctggaaaaattgggcgaatgatcgcagaggaaataatggagattcacagaatcaggggatcgtcccccagcagttgcggatcaagcccccttaacatcaccagcacaccaccccctgacgccagcagtcctggcggcaaaaagatcctaaatggtggaaccccagacattccttcgtccggcctgctgagcggacaggcccaggagaatccagggtatccctattctgacagctccagcatcctgggagagaacccacacatcggtatagacatgatcgacaacgatcagggctcatccagcccttctaacgatgaggccgcaatggccgtgatcatgtcgctgctcgaagctgacgcaggtctgggagggccggtggacttcagtgatctgccgtggcccctttag

SEQ ID NO: 112250 - DNA, 1581 bp, Artificial Sequence
  derived and/or modified sequence
atggctgaccagaggatggacatcagcagcaccatcagtgacttcatgagccctggccccacagacctgctgagcagcagcctgggcaccagcggcgtggactgcaacaggaagaggaagggcagcagcacagactaccaggagagcatggacacagacaaggatgacccccacggccgcctggagtacacagagcaccagggccgcatcaagaatgcccgggaggcccacagccagatcgagaagagaagaagagacaagatgaacagcttcattgatgagctggccagcctggtgcccacctgcaatgccatgagcaggaagctggacaagctgactgtgctgaggatggctgtgcagcacatgaagaccctgcggggggccaccaacccctacacagaggccaactacaagcccaccttcctgagtgatgatgagctgaagcacctgatcctgcgggctgctgatggcttcctgtttgtggtgggctgtgaccggggcaagatcctgtttgtgtctgagagcgtcttcaagatcctgaactacagccagaatgacctgattggccagagcctgtttgactacctgcaccccaaggacatcgccaaggtgaaggagcagctgagcagcagtgacacagccccccgggagcggctgattgatgccaagacaggcctgcctgtgaagacagacatcaccccaggccccagccggctgtgcagcggggcccggcgctccttcttctgcaggatgaagtgcaaccggcccagcgtgaaggtggaggacaaggacttccccagcacctgcagcaagaagaaggctgacaggaagagcttctgcaccatccacagcacaggctacctgaagtcctggccacccaccaagatgggcctggatgaggacaatgaaccagacaatgaaggctgcaacctgagctgcctggtggccatcggccgcctgcacagccacgtggtgccccagcctgtgaatggagagatccgggtgaagtccatggagtatgtgtccagacatgccattgatggcaagtttgtgtttgtggaccagagggccacagccatcctggcctacctgccccaggagctgctgggcaccagctgctatgagtacttccaccaggatgacatcggccacctggccgagtgccaccggcaggtgctgcagacccgggagaagatcaccaccaactgctacaagttcaagatcaaggatggcagcttcatcaccctgcggagccgctggttctccttcatgaacccctggaccaaggaggtggagtacatcgtgtccaccaacacagtggtgctgagccgggtggacaccggccacctgggccaggtggagtggtgcaccgtgctgagcaggccagacagccgcttcctgattgctggcatgttcacagagcccacctcctggaaggccggcacccagcccagccacagcagccagcaccccccaacagcctggacagcctgctgccccctggagaaggtggcccagaggggccccacccccctcttccagggcttccagggcgagcccggcctgggccaggagaagtag

SEQ ID NO: 112251 - DNA, 1881 bp, Artificial Sequence
  derived and/or modified sequence
atggctgaccagaggatggacatcagcagcaccatcagtgacttcatgagccctggccccacagacctgctgagcagcagcctgggcaccagcggcgtggactgcaacaggaagaggaagggcagcagcacagactaccaggagagcatggacacagacaaggatgacccccacggccgcctggagtacacagagcaccagggccgcatcaagaatgcccgggaggcccacagccagatcgagaagagaagaagagacaagatgaacagcttcattgatgagctggccagcctggtgcccacctgcaatgccatgagcaggaagctggacaagctgactgtgctgaggatggctgtgcagcacatgaagaccctgcggggggccaccaacccctacacagaggccaactacaagcccaccttcctgagtgatgatgagctgaagcacctgatcctgcgggctgctgatggcttcctgtttgtggtgggctgtgaccggggcaagatcctgtttgtgtctgagagcgtcttcaagatcctgaactacagccagaatgacctgattggccagagcctgtttgactacctgcaccccaaggacatcgccaaggtgaaggagcagctgagcagcagtgacacagccccccgggagcggctgattgatgccaagacaggcctgcctgtgaagacagacatcaccccaggccccagccggctgtgcagcggggcccggcgctccttcttctgcaggatgaagtgcaaccggcccagcgtgaaggtggaggacaaggacttccccagcacctgcagcaagaagaaggctgacaggaagagcttctgcaccatccacagcacaggctacctgaagtcctggccacccaccaagatgggcctggatgaggacaatgaaccagacaatgaaggctgcaacctgagctgcctggtggccatcggccgcctgcacagccacgtggtgccccagcctgtgaatggagagatccgggtgaagtccatggagtatgtgtccagacatgccattgatggcaagtttgtgtttgtggaccagagggccacagccatcctggcctacctgccccaggagctgctgggcaccagctgctatgagtacttccaccaggatgacatcggccacctggccgagtgccaccggcaggtgctgcagacccgggagaagatcaccaccaactgctacaagttcaagatcaaggatggcagcttcatcaccctgcggagccgctggttctccttcatgaacccctggaccaaggaggtggagtacatcgtgtccaccaacacagtggtgctggccaacgtgctggagggcggggaccccaccttcccccagctgacagccagcccccacagcatggacagcatgctgcccagcggggagggcggccccaagaggacccaccccaccgtgcccggcatccctgggggcacccgggccggggccggcaagattggaaggatgattgctgaggagatcatggagatccaccgcatccggggcagcagccccagcagctgtggcagcagccccctgaacatcaccagcaccccacctccagatgccagcagccctgggggcaagaagatcctgaatggaggcaccccagacatccccagcagcggcctgctgagcggccaggcccaggagaaccctggctacccctacagcgacagcagcagcatcctgggggagaacccccacatcggcatcgacatgattgacaatgaccagggcagcagcagccccagcaatgatgaggccgccatggctgtgatcatgagcctgctggaggctgatgctggcctgggcggccctgtggacttcagtgacctgccctggcccctgtag

SEQ ID NO: 112252 - DNA, 1581 bp, Artificial Sequence
  derived and/or modified sequence
atggccgaccagcggatggacatcagcagcaccatcagcgacttcatgtctcctggtccaactgatcttttgtcttcaagtctggggacctccggcgtggactgtaatcgtaagcgcaaagggtccagtaccgactatcaagaaagcatggatacagacaaggatgaccctcacgggagactcgaatataccgagcaccagggcaggataaagaacgctcgtgaggctcatagtcagatcgaaaagcggagacgggacaagatgaactcattcattgatgagctggccagcttggtgcctacatgcaacgcaatgtccagaaaacttgacaagctgactgttctaaggatggcggttcagcacatgaaaactttgcggggggcaaccaatccgtacactgaagctaattacaagccaacctttctctccgacgatgagctaaagcacctaatactccgcgcagctgatggattcctgttcgtagtcggctgcgacagaggaaaaatcctatttgttagtgagtctgtatttaagatcttgaactactcacaaaatgacctcatcggtcaatccctctttgattatctgcaccctaaggatatagccaaggtcaaagaacagctgtccagcagtgacactgcccctagggagaggcttattgacgcaaagacaggacttcccgttaaaaccgacatcacacctggcccaagcaggctgtgttcaggtgctcgcagatctttcttctgtcggatgaagtgcaataggccctcagtgaaggtggaggacaaggacttcccttcaacatgctctaaaaagaaggccgataggaagtctttttgcacaattcactctacaggttatctgaagagctggccccctaccaagatgggcctcgatgaggacaatgaacccgataacgaagggtgcaacctcagctgcctcgtggctattgggaggctacatagccatgtggtcccccagcccgtgaatggcgaaatcagagtcaaatcaatggagtacgtgtcgcggcatgcgatcgacgggaagtttgtgttcgtggaccagagggctaccgcgattctcgcgtacctgcctcaggaacttctgggtacctcttgttatgagtacttccatcaggatgacattggccatctcgccgagtgccacaggcaggtgctgcagactcgggagaagataaccactaattgttataagtttaagatcaaggacggctcattcattacacttcgttcaaggtggttcagtttcatgaatccttggacaaaagaggttgaatacatagtttccacaaacaccgttgttttgtccagagttgatacagggcatttgggccaggtggaatggtgtaccgtactctcaaggccagactccaggtttctcatcgcagggatgtttacagaacccacctcctggaaagccgggacacagcccagtcatagctctcaacaccctcctaccgcctggaccgcctgctgtcccctggaaaaagtggcccaacgcggacctaccccgctgtttcaggggttccagggcgagcccggcttaggtcaggagaaatag

SEQ ID NO: 112253 - DNA, 1881 bp, Artificial Sequence
  derived and/or modified sequence
atggccgaccagcggatggacatcagcagcaccatcagcgacttcatgagtccaggacctaccgatctcctgagtagtagcctcggaacttccggggtggactgcaaccgcaagagaaaagggtccagcaccgattaccaggagagcatggatactgacaaggatgacccccatggccgtctggagtacacagagcatcaaggtagaatcaagaatgctagggaagcgcattcccagattgagaagcgcaggcgtgacaagatgaatagcttcatagacgagctggcctcactcgtccccacctgtaatgcaatgagtcgaaaactggataaattgaccgtcctccgcatggccgtccagcatatgaagaccctgcggggcgcaacaaacccctacacggaggctaattataaaccgaccttcctaagcgacgacgagctgaagcatttgattctgcgcgccgccgatggcttcctgtttgtcgtgggatgtgaccgcgggaaaatcttgttcgtgtccgagtctgtgttcaaaattcttaattactcccaaaatgacttaatcggccaaagtttatttgactacctccaccctaaggacattgccaaggtgaaagagcaactgtcgagcagtgacacagcccccagggaacggctcattgacgctaaaacaggactgccagttaaaactgatatcaccccgggaccttctagactatgttctggagcccgtagaagtttcttctgtaggatgaaatgtaataggcccagtgtgaaggttgaagacaaggactttccgtccacttgcagtaaaaagaaggctgaccgaaagagtttttgtacaatccatagcaccgggtatctaaagagctggccacccaccaagatgggcctcgacgaggataatgagcccgacaacgaagggtgtaacctatcctgcctggtcgccatcggcaggctacattctcatgttgtgccacagcctgtaaatggggaaatccgggttaaatccatggagtacgtcagtagacacgctatcgacgggaaattcgttttcgtcgatcaaagggctactgctattctggcttacctcccccaggaactcttagggaccagctgctatgagtacttccaccaagatgatatcggacatctagcagagtgccacagacaagtcctccagacccgtgagaagattaccactaattgctataagtttaaaatcaaagacggatctttcatcaccctgcgttctaggtggtttagctttatgaacccctggaccaaggaagttgagtatattgtttccacaaatactgtagtattggcgaacgtgctggagggtggcgatccgactttccctcagctcacagcgtcaccacacagcatggacagcatgcttcccagcggcgagggaggcccgaaaaggacacaccccacggttcctggaatacccgggggaacacgcgctggggctggaaagatcggccgaatgatagcagaggaaatcatggagatacaccgaatcaggggtagctccccaagttcgtgtgggagctcccccctgaacattacttctacaccacctcccgacgccagttcgcctggaggcaaaaagatactcaatgggggcacacctgatattccctcttctggcttactctctggtcaggcacaggaaaaccctggatatccttacagcgattccagctcgatcctgggcgagaatccacacattggcatcgatatgattgataacgatcagggatcttctagcccctccaacgatgaggccgccatggccgtgatcatgtccctgctggaggccgatgccggtctcgggggccccgttgacttttccgacctgccctggcccctttag

SEQ ID NO: 112254 - DNA, 1581 bp, Artificial Sequence
  derived and/or modified sequence
atggcggaccagcggatggatatctcttctacaatttcagacttcatgagccctggtcctacagatctacttagctcctcactgggtacgagtggcgtggactgtaaccgcaagagaaaagggtccagcactgattatcaagaaagcatggataccgacaaggatgaccctcacggacgcctggaatacaccgaacaccaggggcgaatcaagaatgctcgcgaggcacactctcagatcgagaaacgccgacgtgacaagatgaactcgttcattgatgagctggcttctctcgtgccgacctgtaatgccatgtccaggaagcttgacaagcttacagtgctgcgtatggccgtacagcatatgaagacgctgaggggcgctacgaatccttatacagaggcgaactataaacctacatttttgagtgatgatgagctcaagcatctgatcctgagagctgccgacggcttcttattcgtggtggggtgcgacagagggaaaattcttttcgtgtccgagagtgtttttaagatcctgaactacagccaaaatgatctgatcggtcaatcgctctttgattatctgcatcctaaagatatcgccaaagtcaaggagcagttaagcagcagtgatacagccccaagagaacgcctcattgacgcaaaaaccggtctcccagttaagacagatatcacccctggcccatctagactgtgcagcggcgcacgcaggtccttcttctgccgcatgaaatgcaatcgaccttctgtaaaggtcgaggataaagactttccatccacctgcagcaagaaaaaggctgacagaaaaagcttttgtacaatccactcgaccggctacttgaagagctggccacccaccaaaatgggactggacgaggataatgaaccggataatgagggatgtaatctctcatgcctcgtagctattggcaggcttcactctcatgttgtgccacagcctgtgaacggggaaatcagagtaaaatccatggagtatgtctcgcgccatgctatcgatggcaagtttgtgtttgtcgaccagagagcgaccgcgatcctggcctacctacctcaggagctcctaggcacgagttgctacgaatactttcatcaagacgacatcggccacttagccgaatgccacagacaagtccttcagaccagagagaaaatcaccactaactgttacaagttcaaaattaaagacggctctttcattacgttgcgatcgaggtggttctcattcatgaatccctggactaaggaagttgaatacatcgtgagtaccaataccgtggtcctcagccgggtcgacaccggtcacctggggcaggtggaatggtgtacagtactgtcgcgaccagacagtagattcttgattgcaggcatgttcacggaaccgaccagttggaaggctggaacccagccatcccattcctcccagcatccccctaccgcctggactgcctgctgccctctggagaaggtagctcagagaggaccaactcctctgttccaggggttccagggtgagccaggtcttgggcaagagaaatag

SEQ ID NO: 112255 - DNA, 1881 bp, Artificial Sequence
  derived and/or modified sequence
atggcggatcaaaggatggacattagtagcacaattagcgatttcatgtctcccggaccaactgacctgctgagcagctcgcttgggacatcgggtgtggattgtaaccgcaagcgcaagggcagcagcacagattaccaggaatccatggatactgataaggacgaccctcacggacgattggaatacactgagcaccagggacggatcaagaacgccagggaggcccatagccagattgagaagagacggagagacaaaatgaactccttcattgatgagctggccagccttgtccccacatgtaacgccatgagtagaaagctggataagttgaccgtgcttcgtatggctgttcagcacatgaaaacactcagaggggctaccaatccctataccgaagctaattataagcctacgtttctctctgacgatgaattgaagcacctgatcctccgggctgccgacggtttcctgttcgtggttgggtgcgatcggggaaagattctcttcgtgtccgaatctgttttcaaaatattgaactactctcagaacgatttgatcggacagtctctttttgattacttgcaccctaaagacatcgctaaagttaaggaacagttgtcgtcttccgataccgctccacgggaaagattaatagacgccaagacaggactcccagtcaagaccgacataacgccaggacccagcagactttgttccggcgcaaggcgtagcttcttctgtaggatgaagtgtaatagacctagcgtgaaggtggaggacaaagatttcccctcaacctgtagcaagaagaaagccgataggaaaagtttttgtacaatccactcaactggctatctgaaatcctggccgcctactaagatgggactggacgaggataatgaacctgacaatgagggatgcaatctatcctgcttggtagcaatcgggcgactccattctcacgtggtgccccagcccgtcaacggagaaatcagagttaaatccatggaatacgtctcacgacatgccatcgatggaaagtttgtttttgtggatcagcgggctaccgcgatcctcgcttacctccctcaggaactattgggcacatcatgctatgaatactttcaccaagacgatataggtcacctggctgagtgccataggcaggtgctgcagactagggagaagattacaaccaactgctataagtttaaaatcaaagacggatctttcatcactcttcgcagtcgctggttttccttcatgaacccatggacgaaggaagtcgaatatatcgtgagcacaaacacagtggtcctggctaatgtcttagagggtggagatcctaccttcccccagctcactgccagcccccattccatggatagtatgctaccgtccggagagggcggaccgaaacggacacaccctactgtcccaggtatcccaggtggaacacgggcaggtgctgggaagattggcaggatgattgccgaagagatcatggaaattcatagaatccggggaagcagcccttctagttgcggctcctctcctctcaatattacctctacaccacctccggacgcaagctcacctggaggcaagaagatactgaatgggggaactcctgacatccccagctctggactactgtcaggtcaggcccaggagaatcccggatacccctactctgattcctcaagcattctcggggaaaatccccacattggcatcgacatgatcgacaatgatcagggctcaagctctccctctaacgatgaggctgccatggcagtcataatgtctttattggaggcggatgccggtttaggaggccctgtggacttctcagacctaccatggcctctgtag

SEQ ID NO: 112256 - DNA, 2836 bp, Artificial Sequence
  derived and/or modified sequence
cggaggtgcctgtttacccgcgccggactcaccgccgccgccgccgcgggatccgagtgcgggcgcgggcgcgggcgctcccggcgagccacggtggtgctggctagagtgtatacgtttggacccaagcttaacttttccaatgtggaatcctgggccttcattggttccgatgtcataggaatctacgctagagggcttcctgtgtgccgggcactgtggtttttggaagaagctgaccgcctgaaaagaaattataaaacatgaaaatcgctttgaggtgaccaagtccagaggcccctaactcctcccaagctggatctggggtgtaagaactgtgacttcagatcatccaatggcagaccagagaatggacatttcttcaaccatcagtgatttcatgtccccgggccccaccgacctgctttccagctctcttggtaccagtggtgtggattgcaaccgcaaacggaaaggcagctccactgactaccaagaaagcatggacacagacaaagatgaccctcatggaaggttagaatatacagaacaccaaggaaggataaaaaatgcaagggaagctcacagtcagattgaaaagcggcgtcgggataaaatgaacagttttatagatgaattggcttctttggtaccaacatgcaacgcaatgtccaggaaattagataaacttactgtgctaaggatggctgttcagcacatgaaaacattaagaggtgccaccaatccatacacagaagcaaactacaaaccaacttttctatcagacgatgaattgaaacacctcattctcagggcagcagatggatttttgtttgtcgtaggatgtgaccgagggaagatactctttgtctcagagtctgtcttcaagatcctcaactacagccagaatgatctgattggtcagagtttgtttgactacctgcatcctaaagatattgccaaagtcaaggagcagctctcctcctctgacaccgcaccccgggagcggctcatagatgcaaaaactggacttccagttaaaacagatataacccctgggccatctcgattatgttctggagcacgacgttctttcttctgtaggatgaagtgtaacaggccttcagtaaaggttgaagacaaggacttcccctctacctgctcaaagaaaaaagcagatcgaaaaagcttctgcacaatccacagcacaggctatttgaaaagctggccacccacaaagatggggctggatgaagacaacgaaccagacaatgaggggtgtaacctcagctgcctcgtcgcaattggacgactgcattctcatgtagttccacaaccagtgaacggggaaatcagggtgaaatctatggaatatgtttctcggcacgcgatagatggaaagtttgtttttgtagaccagagggcaacagctattttggcatatttaccacaagaacttctaggcacatcgtgttatgaatattttcaccaagatgacataggacatcttgcagaatgtcataggcaagttttacagacgagagaaaaaattacaactaattgctataaatttaaaatcaaagatggttcttttatcacactacggagtcgatggttcagtttcatgaacccttggaccaaggaagtagaatatattgtctcaactaacactgttgttttgtccagagtggacaccggacaccttggccaagttgaatggtgcacagttctgagcaggcctgactcacgtttccttattgctgggatgttcacagagccaacgtcctggaaggcggggacccaaccttcccacagctcacagcatccccccacagcatggacagcatgctgccctctggagaaggtggcccaaagaggacccaccccactgttccagggattccagggggaacccgggctggggcaggaaaaataggccgaatgattgctgaggaaatcatggaaatccacaggataagagggtcatcgccttctagctgtggctccagcccattgaacatcacgagtacgcctccccctgatgcctcttctccaggaggcaagaagattttaaatggagggactccagacattccttccagtggcctactatcaggccaggctcaggagaacccaggttatccatattctgatagttcttctattcttggtgagaacccccacataggtatagacatgattgacaacgaccaaggatcaagtagtcccagtaatgatgaggcagcaatggctgtcatcatgagcctcttggaagcagatgctggactgggtggccctgttgactttagtgacttgccatggccgctgtaaacactacatgttgctttggcaacagctatagtatcaaagtgcattactggtggagttttacagtctgtgaagcttactggataaggagagaatagcttttatgtactgacttcataaaagccatctcagagccattgatacaagtcaatcttactatatgtaacttcagacaaagtggaactaagcctgctccagtgtttcctcatcattgattattgggctagctgtggatagcttgcattaattgtatattttggattctgtttgtgttgaattttttaatcattgtgcacagaagcatcattggtagcttttatatgcaaatggtcatttcagatgtatggtgtttttacactacaaagaagtcccccatgtggatatttcttatactaattgtatcataaagccgtttattcttccttgtaagaatcctttactataaatatgggttaaagtataatgtactagacagttaaatatttttaataaatgtttcccttgttct

SEQ ID NO: 112257 - DNA, 2746 bp, Artificial Sequence
  derived and/or modified sequence
cggaggtgcctgtttacccgcgccggactcaccgccgccgccgccgcgggatccgagtgcgggcgcgggcgcgggcgctcccggcgagccacggtggtgctggctagagtgtatacgtttggacccaagcttaacttttccaatgtggaatcctgggccttcattggttccgatgtcataggaatctacgctagagggcttcctgtgtgccgggcactgtggtttttggaagaagctgaccgcctgaaaagaaattataaaacatgaaaatcgctttgaggtgaccaagtccagaggcccctaactcctcccaagctggatctggggtgtaagaactgtgacttcagatcatccaatggcagaccagagaatggacatttcttcaaccatcagtgatttcatgtccccgggccccaccgacctgctttccagctctcttggtaccagtggtgtggattgcaaccgcaaacggaaaggcagctccactgactaccaagaaagcatggacacagacaaagatgaccctcatggaaggttagaatatacagaacaccaaggaaggataaaaaatgcaagggaagctcacagtcagattgaaaagcggcgtcgggataaaatgaacagttttatagatgaattggcttctttggtaccaacatgcaacgcaatgtccaggaaattagataaacttactgtgctaaggatggctgttcagcacatgaaaacattaagaggtgccaccaatccatacacagaagcaaactacaaaccaacttttctatcagacgatgaattgaaacacctcattctcagggcagcagatggatttttgtttgtcgtaggatgtgaccgagggaagatactctttgtctcagagtctgtcttcaagatcctcaactacagccagaatgatctgattggtcagagtttgtttgactacctgcatcctaaagatattgccaaagtcaaggagcagctctcctcctctgacaccgcaccccgggagcggctcatagatgcaaaaactggacttccagttaaaacagatataacccctgggccatctcgattatgttctggagcacgacgttctttcttctgtaggatgaagtgtaacaggccttcagtaaaggttgaagacaaggacttcccctctacctgctcaaagaaaaaagcagatcgaaaaagcttctgcacaatccacagcacaggctatttgaaaagctggccacccacaaagatggggctggatgaagacaacgaaccagacaatgaggggtgtaacctcagctgcctcgtcgcaattggacgactgcattctcatgtagttccacaaccagtgaacggggaaatcagggtgaaatctatggaatatgtttctcggcacgcgatagatggaaagtttgtttttgtagaccagagggcaacagctattttggcatatttaccacaagaacttctaggcacatcgtgttatgaatattttcaccaagatgacataggacatcttgcagaatgtcataggcaagttttacagacgagagaaaaaattacaactaattgctataaatttaaaatcaaagatggttcttttatcacactacggagtcgatggttcagtttcatgaacccttggaccaaggaagtagaatatattgtctcaactaacactgttgttttagccaacgtcctggaaggcggggacccaaccttcccacagctcacagcatccccccacagcatggacagcatgctgccctctggagaaggtggcccaaagaggacccaccccactgttccagggattccagggggaacccgggctggggcaggaaaaataggccgaatgattgctgaggaaatcatggaaatccacaggataagagggtcatcgccttctagctgtggctccagcccattgaacatcacgagtacgcctccccctgatgcctcttctccaggaggcaagaagattttaaatggagggactccagacattccttccagtggcctactatcaggccaggctcaggagaacccaggttatccatattctgatagttcttctattcttggtgagaacccccacataggtatagacatgattgacaacgaccaaggatcaagtagtcccagtaatgatgaggcagcaatggctgtcatcatgagcctcttggaagcagatgctggactgggtggccctgttgactttagtgacttgccatggccgctgtaaacactacatgttgctttggcaacagctatagtatcaaagtgcattactggtggagttttacagtctgtgaagcttactggataaggagagaatagcttttatgtactgacttcataaaagccatctcagagccattgatacaagtcaatcttactatatgtaacttcagacaaagtggaactaagcctgctccagtgtttcctcatcattgattattgggctagctgtggatagcttgcattaattgtatattttggattctgtttgtgttgaattttttaatcattgtgcacagaagcatcattggtagcttttatatgcaaatggtcatttcagatgtatggtgtttttacactacaaagaagtcccccatgtggatatttcttatactaattgtatcataaagccgtttattcttccttgtaagaatcctttactataaatatgggttaaagtataatgtactagacagttaaatatttttaataaatgtttcccttgttctataaa

SEQ ID NO: 112258 - DNA, 1581 bp, Artificial Sequence
  derived and/or modified sequence
atggccgaccagagaatggacatcagcagcaccatcagcgacttcatgagccccggccccaccgacctgctgagcagcagcctgggcaccagcggcgtggactgcaacagaaagagaaagggcagcagcaccgactaccaggagagcatggacaccgacaaggacgacccccacggcagactggagtacaccgagcaccagggcagaatcaagaacgccagagaggcccacagccagatcgagaagagaagaagagacaagatgaacagcttcatcgacgagctggccagcctggtgcccacctgcaacgccatgagcagaaagctggacaagctgaccgtgctgagaatggccgtgcagcacatgaagaccctgagaggcgccaccaacccctacaccgaggccaactacaagcccaccttcctgagcgacgacgagctgaagcacctgatcctgagagccgccgacggcttcctgttcgtggtgggctgcgacagaggcaagatcctgttcgtgagcgagagcgtgttcaagatcctgaactacagccagaacgacctgatcggccagagcctgttcgactacctgcaccccaaggacatcgccaaggtgaaggagcagctgagcagcagcgacaccgcccccagagagagactgatcgacgccaagaccggcctgcccgtgaagaccgacatcacccccggccccagcagactgtgcagcggcgccagaagaagcttcttctgcagaatgaagtgcaacagacccagcgtgaaggtggaggacaaggacttccccagcacctgcagcaagaagaaggccgacagaaagagcttctgcaccatccacagcaccggctacctgaagagctggccccccaccaagatgggcctggacgaggacaacgagcccgacaacgagggctgcaacctgagctgcctggtggccatcggcagactgcacagccacgtggtgccccagcccgtgaacggcgagatcagagtgaagagcatggagtacgtgagcagacacgccatcgacggcaagttcgtgttcgtggaccagagagccaccgccatcctggcctacctgccccaggagctgctgggcaccagctgctacgagtacttccaccaggacgacatcggccacctggccgagtgccacagacaggtgctgcagaccagagagaagatcaccaccaactgctacaagttcaagatcaaggacggcagcttcatcaccctgagaagcagatggttcagcttcatgaacccctggaccaaggaggtggagtacatcgtgagcaccaacaccgtggtgctgagcagagtggacaccggccacctgggccaggtggagtggtgcaccgtgctgagcagacccgacagcagattcctgatcgccggcatgttcaccgagcccaccagctggaaggccggcacccagcccagccacagcagccagcacccccccaccgcctggaccgcctgctgccccctggagaaggtggcccagagaggccccacccccctgttccagggcttccagggcgagcccggcctgggccaggagaagtag

SEQ ID NO: 112259 - DNA, 1881 bp, Artificial Sequence
  derived and/or modified sequence
atggccgaccagagaatggacatcagcagcaccatcagcgacttcatgagccccggccccaccgacctgctgagcagcagcctgggcaccagcggcgtggactgcaacagaaagagaaagggcagcagcaccgactaccaggagagcatggacaccgacaaggacgacccccacggcagactggagtacaccgagcaccagggcagaatcaagaacgccagagaggcccacagccagatcgagaagagaagaagagacaagatgaacagcttcatcgacgagctggccagcctggtgcccacctgcaacgccatgagcagaaagctggacaagctgaccgtgctgagaatggccgtgcagcacatgaagaccctgagaggcgccaccaacccctacaccgaggccaactacaagcccaccttcctgagcgacgacgagctgaagcacctgatcctgagagccgccgacggcttcctgttcgtggtgggctgcgacagaggcaagatcctgttcgtgagcgagagcgtgttcaagatcctgaactacagccagaacgacctgatcggccagagcctgttcgactacctgcaccccaaggacatcgccaaggtgaaggagcagctgagcagcagcgacaccgcccccagagagagactgatcgacgccaagaccggcctgcccgtgaagaccgacatcacccccggccccagcagactgtgcagcggcgccagaagaagcttcttctgcagaatgaagtgcaacagacccagcgtgaaggtggaggacaaggacttccccagcacctgcagcaagaagaaggccgacagaaagagcttctgcaccatccacagcaccggctacctgaagagctggccccccaccaagatgggcctggacgaggacaacgagcccgacaacgagggctgcaacctgagctgcctggtggccatcggcagactgcacagccacgtggtgccccagcccgtgaacggcgagatcagagtgaagagcatggagtacgtgagcagacacgccatcgacggcaagttcgtgttcgtggaccagagagccaccgccatcctggcctacctgccccaggagctgctgggcaccagctgctacgagtacttccaccaggacgacatcggccacctggccgagtgccacagacaggtgctgcagaccagagagaagatcaccaccaactgctacaagttcaagatcaaggacggcagcttcatcaccctgagaagcagatggttcagcttcatgaacccctggaccaaggaggtggagtacatcgtgagcaccaacaccgtggtgctggccaacgtgctggagggcggcgaccccaccttcccccagctgaccgccagcccccacagcatggacagcatgctgcccagcggcgagggcggccccaagagaacccaccccaccgtgcccggcatccccggcggcaccagagccggcgccggcaagatcggcagaatgatcgccgaggagatcatggagatccacagaatcagaggcagcagccccagcagctgcggcagcagccccctgaacatcaccagcacccccccccccgacgccagcagccccggcggcaagaagatcctgaacggcggcacccccgacatccccagcagcggcctgctgagcggccaggcccaggagaaccccggctacccctacagcgacagcagcagcatcctgggcgagaacccccacatcggcatcgacatgatcgacaacgaccagggcagcagcagccccagcaacgacgaggccgccatggccgtgatcatgagcctgctggaggccgacgccggcctgggcggccccgtggacttcagcgacctgccctggcccctgtag

SEQ ID NO: 112260 - protein, 582 aa, Artificial Sequence
  derived and/or modified sequence
IDIESMDTDKDDPHGRLEYTEHQGRIKNAREAHSQIEKRRRDKMNSFIDELASLVPTCNAMSRKLDKLTVLRMAVQHMKTLRGATNPYTEANYKPTFLSDDELKHLILRAADGFLFVVGCDRGKILFVSESVFKILNYSQNDLIGQSLFDYLHPKDIAKVKEQLSSSDTAPRERLIDAKTGLPVKTDITPGPSRLCSGARRSFFCRMKCNRPSVKVEDKDFPSTCSKKKADRKSFCTIHSTGYLKSWPPTKMGLDEDNEPDNEGCNLSCLVAIGRLHSHVVPQPVNGEIRVKSMEYVSRHAIDGKFVFVDQRATAILAYLPQELLGTSCYEYFHQDDIGHLAECHRQVLQTREKITTNCYKFKIKDGSFITLRSRWFSFMNPWTKEVEYIVSTNTVVLANVLEGGDPTFPQLTASPHSMDSMLPSGEGGPKRTHPTVPGIPGGTRAGAGKIGRMIAEEIMEIHRIRGSSPSSCGSSPLNITSTPPPDASSPGGKKILNGGTPDIPSSGLLSGQAQENPGYPYSDSSSILGENPHIGIDMIDNDQGSSSPSNDEAAMAVIMSLLEADAGLGGPVDFSDLPWPL

SEQ ID NO: 112261 - protein, 583 aa, Artificial Sequence
  derived and/or modified sequence
MINIESMDTDKDDPHGRLEYTEHQGRIKNAREAHSQIEKRRRDKMNSFIDELASLVPTCNAMSRKLDKLTVLRMAVQHMKTLRGATNPYTEANYKPTFLSDDELKHLILRAADGFLFVVGCDRGKILFVSESVFKILNYSQNDLIGQSLFDYLHPKDIAKVKEQLSSSDTAPRERLIDAKTGLPVKTDITPGPSRLCSGARRSFFCRMKCNRPSVKVEDKDFPSTCSKKKADRKSFCTIHSTGYLKSWPPTKMGLDEDNEPDNEGCNLSCLVAIGRLHSHVVPQPVNGEIRVKSMEYVSRHAIDGKFVFVDQRATAILAYLPQELLGTSCYEYFHQDDIGHLAECHRQVLQTREKITTNCYKFKIKDGSFITLRSRWFSFMNPWTKEVEYIVSTNTVVLANVLEGGDPTFPQLTASPHSMDSMLPSGEGGPKRTHPTVPGIPGGTRAGAGKIGRMIAEEIMEIHRIRGSSPSSCGSSPLNITSTPPPDASSPGGKKILNGGTPDIPSSGLLSGQAQENPGYPYSDSSSILGENPHIGIDMIDNDQGSSSPSNDEAAMAVIMSLLEADAGLGGPVDFSDLPWPL

SEQ ID NO: 112262 - DNA, 1749 bp, Artificial Sequence
  derived and/or modified sequence
attgatattgagtccatggataccgataaagacgaccctcacggacgattggaatacaccgaacaccaggggcggatcaagaatgcgcgcgaggcccactcccagatcgaaaaaagacgacgggacaagatgaactcctttatcgatgaactggcttcactggtccccacttgtaatgcaatgtcccgaaaattggataagcttacagttctcagaatggcggtgcagcacatgaaaacactcaggggtgcaacaaatccatataccgaagcaaactataaacctaccttcctctccgacgacgagctgaagcacctaattctccgcgccgccgatggattcctcttcgtcgtggggtgtgatcgtggcaaaattctgtttgtttccgagagtgtatttaagatcctgaactactcgcagaacgacttgattgggcagagtctattcgactatctgcaccccaaggatatagcgaaggtcaaggaacagttatcttcaagcgatacagcacccagggagcgcctgatcgatgccaaaacaggcttgcccgttaaaaccgatatcaccccaggtccttcccgcctgtgttccggagcacgacgcagttttttttgccggatgaagtgcaaccggcctagcgtgaaggtggaggataaagacttcccaagtacttgctccaaaaagaaggccgacagaaaaagtttctgcactattcactctacagggtacctcaagtcatggccacctaccaaaatgggcctggacgaagacaacgaacccgataacgaggggtgcaatctgtcctgcctcgtcgctatcggtagattacattcccatgtggttcctcagcctgttaatggcgagatcagggtcaaatcaatggagtacgtgagccgtcacgccatcgatggcaaattcgtctttgtggaccagagagccaccgctatcctggcctatctgcctcaggagctcctgggaacatcctgctacgaatactttcaccaagacgatattggccacctggctgaatgtcacagacaggttctccagacccgcgaaaagatcacgacgaactgttataagtttaagattaaggatggatcctttataaccctcaggtcccgatggttctccttcatgaatccatggaccaaggaggtggaatacattgtctctactaataccgtcgtcctggctaacgtgttagaggggggggaccctacatttccacagctgaccgcttccccccactctatggactcgatgctgccttctggtgaaggtgggccaaaacgcactcatccaactgtgcccggcatccctggaggcacaagagctggggccggcaaaatcggtcgcatgatcgccgaggaaattatggaaatacaccgcatccggggatcttctccaagcagctgcggcagctctcccctgaacataacaagtacacctccccctgatgcttcatcccccggcggtaaaaagattctgaacgggggtacaccagacattccgagctccggtcttctttccggccaagcccaagaaaatccaggttacccctattcagattcaagcagcatactgggggagaatcctcacatcggaatcgacatgatcgacaatgaccagggcagtagttctccaagcaatgacgaggccgcaatggccgtaatcatgtctctactggaggcagacgccgggcttggcggacctgttgacttttccgatctgccctggcctctgtag

SEQ ID NO: 112263 - DNA, 1752 bp, Artificial Sequence
  derived and/or modified sequence
atgattaacatcgagagtatggacaccgataaagatgatccccatggtagattggagtacaccgaacatcagggcagaattaagaatgcgagagaggcccacagtcagatcgaaaaacgacgtcgcgataagatgaattcgttcatagacgagcttgcttccctcgttcctacatgtaatgccatgagcagaaaactggataaactcacagtcctgcggatggccgtacagcacatgaagaccctcagaggagccacaaatccatacaccgaggccaattacaaacctacatttctttccgatgacgagttaaagcacctcattctaagggccgctgacggattcctgtttgtggtaggttgcgatcggggtaagatcttgtttgtgagcgagtctgttttcaagatactgaactattcacagaacgacttgattggccaaagcctcttcgactacctacatcccaaagacatcgccaaggtgaaagagcaactctcgtcttcggacactgctccccgggaacggttgatagacgctaaaactggcctccctgtaaagactgacattactcccggcccttcacgactttgttccggtgctcgccgatcctttttttgtaggatgaagtgcaaccggccctctgtcaaggtggaagacaaggactttcccagtacctgtagcaaaaaaaaggccgacaggaagtctttttgtactattcactcaactggatatctaaaaagttggccacctactaaaatgggcctcgatgaagacaacgagcctgacaacgagggctgtaatctgagttgcttggtagccatcggaagactccacagccatgtggtgccccagcccgtcaacggagaaatacgggttaaaagtatggaatacgtgagccggcatgctattgatggtaaattcgtgttcgtggatcagagagccactgccattctggcttacctgccacaggagttgctgggtacctcttgctatgaatactttcaccaggatgacattgggcatttggccgaatgtcatagacaggtgctgcagacccgggagaagattactacaaactgctataaatttaagatcaaggacgggagtttcatcaccctgcgttctaggtggttttccttcatgaatccttggaccaaggaagtggagtacattgtatcaactaatacggtcgttctcgcgaacgtactggagggtggcgaccctactttcccccaattgacagcatcaccccacagcatggactctatgctgccatccggggagggcggccctaaaagaacccaccctaccgtccctggcatcccggggggcacacgggccggggctggcaagatagggaggatgattgcagaggaaatcatggaaattcatagaatccgtggatcttcaccatcaagctgtggatcaagtccattgaacattaccagtactccgccccctgacgcgtcctccccaggagggaagaagatcttaaatggaggaacaccagatatccctagcagtggccttctctcgggccaggcccaggagaaccccggctacccttacagtgattctagctcaattctaggtgagaacccccatattggcatcgacatgatcgataacgatcaaggtagctccagcccctctaatgatgaggctgcaatggccgtgatcatgagtttgcttgaagctgatgctgggctgggaggaccagtggacttctcagacctcccctggccactctag

SEQ ID NO: 112264 - DNA, 1749 bp, Artificial Sequence
  derived and/or modified sequence
attgatattgaatccatggacacagacaaggatgacccccacggccgcctggagtacacagagcaccagggccgcatcaagaatgcccgggaggcccacagccagatcgagaagagaagaagagacaagatgaacagcttcattgatgagctggccagcctggtgcccacctgcaatgccatgagcaggaagctggacaagctgactgtgctgaggatggctgtgcagcacatgaagaccctgcggggggccaccaacccctacacagaggccaactacaagcccaccttcctgagtgatgatgagctgaagcacctgatcctgcgggctgctgatggcttcctgtttgtggtgggctgtgaccggggcaagatcctgtttgtgtctgagagcgtcttcaagatcctgaactacagccagaatgacctgattggccagagcctgtttgactacctgcaccccaaggacatcgccaaggtgaaggagcagctgagcagcagtgacacagccccccgggagcggctgattgatgccaagacaggcctgcctgtgaagacagacatcaccccaggccccagccggctgtgcagcggggcccggcgctccttcttctgcaggatgaagtgcaaccggcccagcgtgaaggtggaggacaaggacttccccagcacctgcagcaagaagaaggctgacaggaagagcttctgcaccatccacagcacaggctacctgaagtcctggccacccaccaagatgggcctggatgaggacaatgaaccagacaatgaaggctgcaacctgagctgcctggtggccatcggccgcctgcacagccacgtggtgccccagcctgtgaatggagagatccgggtgaagtccatggagtatgtgtccagacatgccattgatggcaagtttgtgtttgtggaccagagggccacagccatcctggcctacctgccccaggagctgctgggcaccagctgctatgagtacttccaccaggatgacatcggccacctggccgagtgccaccggcaggtgctgcagacccgggagaagatcaccaccaactgctacaagttcaagatcaaggatggcagcttcatcaccctgcggagccgctggttctccttcatgaacccctggaccaaggaggtggagtacatcgtgtccaccaacacagtggtgctggccaacgtgctggagggcggggaccccaccttcccccagctgacagccagcccccacagcatggacagcatgctgcccagcggggagggcggccccaagaggacccaccccaccgtgcccggcatccctgggggcacccgggccggggccggcaagattggaaggatgattgctgaggagatcatggagatccaccgcatccggggcagcagccccagcagctgtggcagcagccccctgaacatcaccagcaccccacctccagatgccagcagccctgggggcaagaagatcctgaatggaggcaccccagacatccccagcagcggcctgctgagcggccaggcccaggagaaccctggctacccctacagcgacagcagcagcatcctgggggagaacccccacatcggcatcgacatgattgacaatgaccagggcagcagcagccccagcaatgatgaggccgccatggctgtgatcatgagcctgctggaggctgatgctggcctgggcggccctgtggacttcagtgacctgccctggcccctgtag

SEQ ID NO: 112265 - DNA, 1752 bp, Artificial Sequence
  derived and/or modified sequence
atgatcaacatcgagagcatggacacagacaaggatgacccccacggccgcctggagtacacagagcaccagggccgcatcaagaatgcccgggaggcccacagccagatcgagaagagaagaagagacaagatgaacagcttcattgatgagctggccagcctggtgcccacctgcaatgccatgagcaggaagctggacaagctgactgtgctgaggatggctgtgcagcacatgaagaccctgcggggggccaccaacccctacacagaggccaactacaagcccaccttcctgagtgatgatgagctgaagcacctgatcctgcgggcagcagatggcttcctgtttgtggtgggctgtgaccggggcaagatcctgtttgtgtctgagagcgtcttcaagatcctgaactacagccagaatgacctgattggccagagcctgtttgactacctgcaccccaaggacatcgccaaggtgaaggagcagctgagcagcagtgacacagccccccgggagcggctgattgatgccaagacaggcctgcctgtgaagacagacatcaccccaggccccagccggctgtgcagcggggcccggcgctccttcttctgcaggatgaagtgcaaccggcccagcgtgaaggtggaggacaaggacttccccagcacctgcagcaagaagaaggctgacaggaagagcttctgcaccatccacagcacaggctacctgaagtcctggccacccaccaagatgggcctggatgaagataatgaaccagacaatgaaggctgcaacctgagctgcctggtggccatcggccgcctgcacagccacgtggtgccccagcctgtgaatggagagatccgggtgaagtccatggagtatgtgtccagacatgccattgatggcaagtttgtgtttgtggaccagagggccacagccatcctggcctacctgccccaggagctgctgggcaccagctgctatgagtacttccaccaggatgacatcggccacctggccgagtgccaccggcaggtgctgcagacccgggagaagatcaccaccaactgctacaagttcaagatcaaggatggcagcttcatcaccctgcggagccgctggttctccttcatgaacccctggaccaaggaggtggagtacatcgtgtccaccaacacagtggtgctggccaacgtgctggagggcggggaccccaccttcccccagctgacagccagcccccacagcatggacagcatgctgcccagcggggagggcggccccaagaggacccaccccaccgtgcccggcatccctgggggcaccagggctggagctgggaagattggccgcatgattgctgaggagatcatggagatccaccgcatccggggcagcagccccagcagctgtggcagcagccccctgaacatcaccagcaccccacctccagatgccagcagccctgggggcaagaagatcctgaatggaggcaccccagacatccccagcagcggcctgctgagcggccaggcccaggagaaccctggctacccctacagcgacagcagcagcatcctgggggagaacccccacatcggcatcgacatgattgacaatgaccagggcagcagcagccccagcaatgatgaagctgccatggccgtcatcatgagcctgctggaggctgatgctggcctgggcggccctgtggacttcagtgacctgccctggcccctgtag

SEQ ID NO: 112266 - DNA, 1749 bp, Artificial Sequence
  derived and/or modified sequence
atcgacatcgagagcatggacaccgacaaggacgacccccacggccgactggaatacacagagcaccaaggcagaatcaagaacgctagagaagcacactctcagattgaaaagaggcggagggacaagatgaatagttttattgacgagttagcatccctggtacccacgtgtaacgcgatgagccgcaagctcgataagttaacagtgttgaggatggccgtgcagcatatgaagactctgcggggcgccaccaatccgtataccgaggcaaattataagcccactttcctgtccgacgacgagctgaagcatcttattctccgtgccgccgatggcttcctgtttgtggttgggtgcgacagaggcaagatcttattcgtcagtgagagcgtgttcaagattctgaactacagccagaacgatttaatcgggcagtctctatttgactacctgcaccccaaagatatcgctaaggtcaaagagcagctatctagcagcgatacagctcctcgcgagaggctgatagatgccaaaactggactccccgtcaagactgatataacacccggaccctctaggttgtgctcaggagcccgccgtagctttttctgtagaatgaaatgtaataggccatccgtgaaggtggaggataaggacttcccctcaacatgcagcaaaaagaaggctgaccgtaaatcattttgcactatacatagtaccgggtacctcaaatcatggcctccaaccaagatggggctggatgaggacaatgaaccggacaatgaaggttgtaatctgagttgcctggtggcaattggacgcttacactcacacgtggtaccccagccggtgaacggggagatacgagtgaagagcatggagtacgtctctcgacatgcaatagatgggaagtttgtctttgttgatcagcgcgcaaccgctattctggcgtatttaccccaggagctcctgggtactagctgctatgagtatttccatcaagacgatattggccaccttgccgagtgccatcgacaagtactgcagactagagagaagatcaccacaaattgctataagttcaagattaaagatgggtcttttataactctcagatcaaggtggttcagcttcatgaacccatggactaaggaggtggaatacatagtgagtacgaatacggtcgttcttgccaatgtgctagaaggaggagaccccaccttccctcaactcacagccagcccacattccatggattcaatgctgccctccggggagggcgggcccaaaaggactcacccaaccgtgccgggaatccccgggggcacccgcgctggagccggcaaaattggtcgcatgattgcagaggagatcatggagatccaccgcattagaggctccagccctagctcatgcgggtcctcacctttgaatataaccagcacccccccgcccgatgcttcaagtcctggaggtaagaagattttaaatggcgggacaccagacattccctccagcggattgctctccggccaggcccaggaaaatcctggctatccctactctgactcgtctagcatcctaggagaaaaccctcatatcgggatcgatatgattgacaacgaccagggttcgagtagcccttctaacgacgaggcggcaatggccgttataatgtcattgctcgaagctgacgccggcctgggcggacctgttgacttctcggatctgccatggccgctttag

SEQ ID NO: 112267 - DNA, 1752 bp, Artificial Sequence
  derived and/or modified sequence
atgatcaacatcgagagcatggacaccgacaaggacgacccccacgggcggttagaatatactgagcatcaaggacggattaaaaacgcgcgcgaagcccactctcagatcgaaaagaggcggagagacaagatgaatagcttcatcgatgaactggcttctctggtgcccacctgcaatgccatgtcccgcaagctggacaaactcaccgtgcttcgcatggctgttcaacacatgaagaccttgcgaggtgcaacgaacccctacacagaggcgaattacaagcctacctttcttagcgatgatgagctcaagcatctgatcctgagggccgccgacggattcctgttcgtagtaggctgcgataggggaaagatcctgttcgtgagcgaatctgtgtttaagatcttgaactacagccagaatgatttaatagggcagagcctgtttgactacctccacccgaaggatatcgctaaggtcaaggagcaactttcttcttcagacaccgcgccgcgagaaagactgatcgacgccaaaacaggtctgccggtgaaaacggatattaccccaggcccttcgcgtctttgtagcggggcccgaaggtctttcttctgtcgaatgaagtgtaaccggccttccgtgaaagtggaagacaaggactttccatcaacatgcagcaagaaaaaggctgatcgtaaaagtttttgtactattcactccacaggatatctgaagtcatggcccccaactaaaatgggcctagatgaagataacgagcctgataatgagggttgtaacctgagttgtctcgttgcaatcgggcgcctccacagccacgtggtacctcagcccgtcaatggggagatccgcgttaaatccatggaatacgttagtcgccatgctatcgatggtaagttcgtttttgtggaccagcgcgctacagccattctagcttatctaccacaggagctgcttggcaccagttgttacgagtatttccaccaggacgatattgggcatctcgctgaatgtcacaggcaggtattgcagacacgggaaaagatcaccacaaattgctataagtttaaaatcaaggatgggtccttcataacactgaggtctcgctggttcagcttcatgaatccatggacaaaagaggtcgaatatattgtttctacgaatacagtggtactggcgaacgttctggaaggaggtgaccccaccttcccacaattgaccgcctcccctcactccatggactcgatgctgcctagcggcgagggggggccaaaacggactcatccaactgtgccaggcatcccaggcggcaccagagccggagcgggtaaaattggccgaatgattgcagaggagattatggagattcatagaataagaggatctagtccgtctagctgtggctcttctcccttgaatataacctccacaccacccccagatgcctcatcccctggaggcaaaaagattctcaatggtggaacacctgacataccgtccagtgggttattatccggacaggcccaggagaatccagggtatccatactctgacagttccagtatattgggcgagaacccccatatcggcattgatatgattgacaacgatcagggctctagctcaccctcgaacgatgaagccgccatggccgtgatcatgtcgcttctggaggccgatgccgggctggggggacctgtggattttagcgacctgccgtggcccctgtag

SEQ ID NO: 112268 - DNA, 1749 bp, Artificial Sequence
  derived and/or modified sequence
atcgatatagaatcaatggatacagataaagacgatccccacggcaggctcgagtataccgagcaccagggacgcatcaaaaacgccagagaagcgcattctcagattgagaagcggaggcgggataagatgaactccttcattgatgaactcgcatctctggttccgacatgcaacgcaatgtctcgcaagcttgacaaactgaccgttttacgtatggcagtccagcatatgaagaccctgcgcggagctaccaatccgtacaccgaggctaactacaaaccaacatttctttccgatgatgagctcaagcacttgatattgcgcgctgcggatggcttcctgtttgtagttgggtgtgatcggggtaagattctctttgtgtccgagtccgtcttcaagatcttaaactacagccagaacgatctgattggacagtccctgtttgactaccttcaccctaaggatatcgccaaggtgaaggagcagctgagttcttctgatactgcccctcgggaacggcttattgatgcaaaaaccggcctgcctgtgaagaccgacattactccagggccatctaggctctgttccggcgcacgcagaagctttttttgccggatgaaatgcaacaggcctagtgttaaggtggaagataaagattttccgtcgacttgctccaagaagaaggctgatcgaaaatctttttgtactatccattcgacaggctacctaaagtcctggccccctactaagatggggttggacgaggacaatgagccagacaatgaggggtgcaatctgtcatgcctggtagccatcggccgacttcactctcacgtggtgccccaaccggtcaatggtgagattcgggtgaagagtatggaatacgtaagcaggcacgcaattgatgggaagttcgtcttcgttgatcagagggccaccgcgatcctggcctatctgccgcaggagctcctgggcacatcttgttatgaatactttcaccaggatgatatcgggcatctagccgagtgtcaccgacaggtgctccaaacaagggagaagatcaccacgaactgctacaaattcaaaatcaaagacggttcattcataacgctgagatcccgctggttttctttcatgaatccctggactaaggaggtggagtacatcgtaagcaccaacacagtggttctggccaatgttttagaagggggtgacccaactttccctcagttaactgcttctcctcacagcatggactctatgctgccttcaggcgaggggggacctaaacgaactcacccgacagtcccaggcatcccaggtggcaccagagcaggagcaggaaagataggaaggatgatcgccgaagaaatcatggagatccataggattaggggtagttccccctcttcctgtggaagttccccactaaatataacctctacacctccaccagacgcatcctcacccggtgggaaaaagatcctgaatggtggcacgcccgacatcccgagcagtggactgctgagcggacaggcccaggaaaaccccggatacccttactcagactcatcctcgattcttggggagaaccctcacattggaattgacatgatcgataatgaccagggctcctcctcaccaagcaacgacgaagctgctatggctgtcatcatgtctctcttggaagcggatgctgggctgggagggccagttgactttagcgatctgccatggcccctatag

SEQ ID NO: 112269 - DNA, 1752 bp, Artificial Sequence
  derived and/or modified sequence
atgatcaacattgaaagcatggatactgacaaggatgatccacatggcagactcgaatacacagagcaccaggggaggatcaagaatgcaagagaggcgcacagccagattgagaagcgccgacgggataaaatgaactcattcatagacgagttggcttctctcgtccccacttgtaacgctatgtcccgtaaacttgacaagttgacagtccttcgtatggctgtgcagcacatgaagaccttaagaggggctacaaacccttatacagaggcgaattataagccaacgtttctatccgacgacgagctgaagcacctaattctgagagccgctgacggtttcctctttgtggtaggttgcgataggggaaaaattctgttcgtatcggaatctgtatttaagattctgaactatagccagaatgatctgattgggcagagtctgttcgattacctgcatcctaaggacatcgctaaggtgaaagagcaactgtcatcatcggacacggcccctagagaaaggttaatcgacgccaaaacagggctgcccgttaagaccgatatcactccaggacctagtcgactgtgcagcggcgcaaggaggagcttcttttgtagaatgaaatgcaacagaccctctgtgaaagtcgaggacaaagactttccatctacctgttcaaagaagaaggctgatcggaagtcgttttgcacaattcactcaaccggttaccttaagagttggcctcccacgaagatggggttggatgaggacaacgaacccgacaatgagggctgcaatctctcatgcctggtcgccatcgggcgtctccatagccacgttgtcccccaaccagtcaatggcgaaatccgtgttaagtctatggagtacgtttcgcggcatgcgatagacggcaaatttgtgttcgtggatcagcgggcaactgccattctggcgtacctgccgcaggagctcctcggaacgagttgctatgagtacttccatcaggatgatatcggtcatctggccgaatgtcaccgtcaggtattgcagaccagagagaagatcacgacgaactgctacaagtttaaaatcaaagatggctcttttataactctgagatcccgctggttcagttttatgaatccttggactaaggaagtggaatacatcgtgtcaacaaacacagtcgtcctggctaatgtcctggaaggaggagaccctaccttccctcagctcacagcatctcctcactcaatggactccatgttacccagcggtgaagggggacccaagcggacccacccgactgttccaggtatcccagggggtactagggccggagcgggtaaaatcggacgcatgattgccgaggagattatggagatacaccgaatccggggatcgtctccttcctcctgcggtagcagccctctgaatattacatccactccccctccggacgcaagctctccaggcggaaagaaaatactgaacgggggaacgcctgacattccatcctccggactgctatcagggcaagctcaggaaaatccgggttatccgtacagcgactcctcatccatcctcggcgaaaacccccacattggcattgacatgatagacaacgaccagggtagcagcagcccaagcaatgacgaagccgcaatggccgttatcatgagtctgctcgaggccgacgccggactgggaggccctgttgacttttccgacttgccatggcctctctag

SEQ ID NO: 112270 - DNA, 2254 bp, Artificial Sequence
  derived and/or modified sequence
atagatatagaaagcatggacacagacaaagatgaccctcatggaaggttagaatatacagaacaccaaggaaggataaaaaatgcaagggaagctcacagtcagattgaaaagcggcgtcgggataaaatgaacagttttatagatgaattggcttctttggtaccaacatgcaacgcaatgtccaggaaattagataaacttactgtgctaaggatggctgttcagcacatgaaaacattaagaggtgccaccaatccatacacagaagcaaactacaaaccaacttttctatcagacgatgaattgaaacacctcattctcagggcagcagatggatttttgtttgtcgtaggatgtgaccgagggaagatactctttgtctcagagtctgtcttcaagatcctcaactacagccagaatgatctgattggtcagagtttgtttgactacctgcatcctaaagatattgccaaagtcaaggagcagctctcctcctctgacaccgcaccccgggagcggctcatagatgcaaaaactggacttccagttaaaacagatataacccctgggccatctcgattatgttctggagcacgacgttctttcttctgtaggatgaagtgtaacaggccttcagtaaaggttgaagacaaggacttcccctctacctgctcaaagaaaaaagcagatcgaaaaagcttctgcacaatccacagcacaggctatttgaaaagctggccacccacaaagatggggctggatgaagacaacgaaccagacaatgaggggtgtaacctcagctgcctcgtcgcaattggacgactgcattctcatgtagttccacaaccagtgaacggggaaatcagggtgaaatctatggaatatgtttctcggcacgcgatagatggaaagtttgtttttgtagaccagagggcaacagctattttggcatatttaccacaagaacttctaggcacatcgtgttatgaatattttcaccaagatgacataggacatcttgcagaatgtcataggcaagttttacagacgagagaaaaaattacaactaattgctataaatttaaaatcaaagatggttcttttatcacactacggagtcgatggttcagtttcatgaacccttggaccaaggaagtagaatatattgtctcaactaacactgttgttttagccaacgtcctggaaggcggggacccaaccttcccacagctcacagcatccccccacagcatggacagcatgctgccctctggagaaggtggcccaaagaggacccaccccactgttccagggattccagggggaacccgggctggggcaggaaaaataggccgaatgattgctgaggaaatcatggaaatccacaggataagagggtcatcgccttctagctgtggctccagcccattgaacatcacgagtacgcctccccctgatgcctcttctccaggaggcaagaagattttaaatggagggactccagacattccttccagtggcctactatcaggccaggctcaggagaacccaggttatccatattctgatagttcttctattcttggtgagaacccccacataggtatagacatgattgacaacgaccaaggatcaagtagtcccagtaatgatgaggcagcaatggctgtcatcatgagcctcttggaagcagatgctggactgggtggccctgttgactttagtgacttgccatggccgctgtaaacactacatgttgctttggcaacagctatagtatcaaagtgcattactggtggagttttacagtctgtgaagcttactggataaggagagaatagcttttatgtactgacttcataaaagccatctcagagccattgatacaagtcaatcttactatatgtaacttcagacaaagtggaactaagcctgctccagtgtttcctcatcattgattattgggctagctgtggatagcttgcattaattgtatattttggattctgtttgtgttgaattttttaatcattgtgcacagaagcatcattggtagcttttatatgcaaatggtcatttcagatgtatggtgtttttacactacaaagaagtcccccatgtggatatttcttatactaattgtatcataaagccgtttattcttccttgtaagaatcctttactataaatatgggttaaagtataatgtactagacagttaaatatttttaataaatgtttcccttgttct

SEQ ID NO: 112271 - DNA, 2788 bp, Artificial Sequence
  derived and/or modified sequence
gacatttagggaaggcagaaagtaggtcagggacggaggtgcctgtttacccgcgccggactcaccgccgccgccgccgcgggatccgagtgcgggcgcgggcgcgggcgctcccggcgagccacggtggtgctggctagagtgtatacgtttggacccaagcttaacttttccaatgtggaatcctgggccttcattggtttttggaagaagctgaccgcctgaaaagaaattataaaacatgaaaatcgctttgaggtgaccaagtccagaggcccctaactcctcccaagctggatctggggtgtaagaactgtgacttcagatcatccaatggcagaccagagaatggacatttcttcaaccatcagtgatttcatgtccccgggccccaccgacctgctttccagctctcttggtaccagtggtgtggattgcaaccgcaaacggaaaggcagctccactgactaccagtcgaatttggggagcacaatggctggaggtcagatgcccactaggagatgctatgattaatatagaaagcatggacacagacaaagatgaccctcatggaaggttagaatatacagaacaccaaggaaggataaaaaatgcaagggaagctcacagtcagattgaaaagcggcgtcgggataaaatgaacagttttatagatgaattggcttctttggtaccaacatgcaacgcaatgtccaggaaattagataaacttactgtgctaaggatggctgttcagcacatgaaaacattaagaggtgccaccaatccatacacagaagcaaactacaaaccaacttttctatcagacgatgaattgaaacacctcattctcagggcagcagatggatttttgtttgtcgtaggatgtgaccgagggaagatactctttgtctcagagtctgtcttcaagatcctcaactacagccagaatgatctgattggtcagagtttgtttgactacctgcatcctaaagatattgccaaagtcaaggagcagctctcctcctctgacaccgcaccccgggagcggctcatagatgcaaaaactggacttccagttaaaacagatataacccctgggccatctcgattatgttctggagcacgacgttctttcttctgtaggatgaagtgtaacaggccttcagtaaaggttgaagacaaggacttcccctctacctgctcaaagaaaaaagcagatcgaaaaagcttctgcacaatccacagcacaggctatttgaaaagctggccacccacaaagatggggctggatgaagacaacgaaccagacaatgaggggtgtaacctcagctgcctcgtcgcaattggacgactgcattctcatgtagttccacaaccagtgaacggggaaatcagggtgaaatctatggaatatgtttctcggcacgcgatagatggaaagtttgtttttgtagaccagagggcaacagctattttggcatatttaccacaagaacttctaggcacatcgtgttatgaatattttcaccaagatgacataggacatcttgcagaatgtcataggcaagttttacagacgagagaaaaaattacaactaattgctataaatttaaaatcaaagatggttcttttatcacactacggagtcgatggttcagtttcatgaacccttggaccaaggaagtagaatatattgtctcaactaacactgttgttttagccaacgtcctggaaggcggggacccaaccttcccacagctcacagcatccccccacagcatggacagcatgctgccctctggagaaggtggcccaaagaggacccaccccactgttccagggattccagggggaacccgggctggggcaggaaaaataggccgaatgattgctgaggaaatcatggaaatccacaggataagagggtcatcgccttctagctgtggctccagcccattgaacatcacgagtacgcctccccctgatgcctcttctccaggaggcaagaagattttaaatggagggactccagacattccttccagtggcctactatcaggccaggctcaggagaacccaggttatccatattctgatagttcttctattcttggtgagaacccccacataggtatagacatgattgacaacgaccaaggatcaagtagtcccagtaatgatgaggcagcaatggctgtcatcatgagcctcttggaagcagatgctggactgggtggccctgttgactttagtgacttgccatggccgctgtaaacactacatgttgctttggcaacagctatagtatcaaagtgcattactggtggagttttacagtctgtgaagcttactggataaggagagaatagcttttatgtactgacttcataaaagccatctcagagccattgatacaagtcaatcttactatatgtaacttcagacaaagtggaactaagcctgctccagtgtttcctcatcattgattattgggctagctgtggatagcttgcattaattgtatattttggattctgtttgtgttgaattttttaatcattgtgcacagaagcatcattggtagcttttatatgcaaatggtcatttcagatgtatggtgtttttacactacaaagaagtcccccatgtggatatttcttatactaattgtatcataaagccgtttattcttccttgtaagaatcctttactataaatatgggttaaagtataatgtactagacagttaaatatttttaataaatgtttcccttgttctataaa

SEQ ID NO: 112272 - DNA, 1749 bp, Artificial Sequence
  derived and/or modified sequence
atcgacatcgagagcatggacaccgacaaggacgacccccacggcagactggagtacaccgagcaccagggcagaatcaagaacgccagagaggcccacagccagatcgagaagagaagaagagacaagatgaacagcttcatcgacgagctggccagcctggtgcccacctgcaacgccatgagcagaaagctggacaagctgaccgtgctgagaatggccgtgcagcacatgaagaccctgagaggcgccaccaacccctacaccgaggccaactacaagcccaccttcctgagcgacgacgagctgaagcacctgatcctgagagccgccgacggcttcctgttcgtggtgggctgcgacagaggcaagatcctgttcgtgagcgagagcgtgttcaagatcctgaactacagccagaacgacctgatcggccagagcctgttcgactacctgcaccccaaggacatcgccaaggtgaaggagcagctgagcagcagcgacaccgcccccagagagagactgatcgacgccaagaccggcctgcccgtgaagaccgacatcacccccggccccagcagactgtgcagcggcgccagaagaagcttcttctgcagaatgaagtgcaacagacccagcgtgaaggtggaggacaaggacttccccagcacctgcagcaagaagaaggccgacagaaagagcttctgcaccatccacagcaccggctacctgaagagctggccccccaccaagatgggcctggacgaggacaacgagcccgacaacgagggctgcaacctgagctgcctggtggccatcggcagactgcacagccacgtggtgccccagcccgtgaacggcgagatcagagtgaagagcatggagtacgtgagcagacacgccatcgacggcaagttcgtgttcgtggaccagagagccaccgccatcctggcctacctgccccaggagctgctgggcaccagctgctacgagtacttccaccaggacgacatcggccacctggccgagtgccacagacaggtgctgcagaccagagagaagatcaccaccaactgctacaagttcaagatcaaggacggcagcttcatcaccctgagaagcagatggttcagcttcatgaacccctggaccaaggaggtggagtacatcgtgagcaccaacaccgtggtgctggccaacgtgctggagggcggcgaccccaccttcccccagctgaccgccagcccccacagcatggacagcatgctgcccagcggcgagggcggccccaagagaacccaccccaccgtgcccggcatccccggcggcaccagagccggcgccggcaagatcggcagaatgatcgccgaggagatcatggagatccacagaatcagaggcagcagccccagcagctgcggcagcagccccctgaacatcaccagcacccccccccccgacgccagcagccccggcggcaagaagatcctgaacggcggcacccccgacatccccagcagcggcctgctgagcggccaggcccaggagaaccccggctacccctacagcgacagcagcagcatcctgggcgagaacccccacatcggcatcgacatgatcgacaacgaccagggcagcagcagccccagcaacgacgaggccgccatggccgtgatcatgagcctgctggaggccgacgccggcctgggcggccccgtggacttcagcgacctgccctggcccctgtag

SEQ ID NO: 112273 - DNA, 1752 bp, Artificial Sequence
  derived and/or modified sequence
atgatcaacatcgagagcatggacaccgacaaggacgacccccacggcagactggagtacaccgagcaccagggcagaatcaagaacgccagagaggcccacagccagatcgagaagagaagaagagacaagatgaacagcttcatcgacgagctggccagcctggtgcccacctgcaacgccatgagcagaaagctggacaagctgaccgtgctgagaatggccgtgcagcacatgaagaccctgagaggcgccaccaacccctacaccgaggccaactacaagcccaccttcctgagcgacgacgagctgaagcacctgatcctgagagccgccgacggcttcctgttcgtggtgggctgcgacagaggcaagatcctgttcgtgagcgagagcgtgttcaagatcctgaactacagccagaacgacctgatcggccagagcctgttcgactacctgcaccccaaggacatcgccaaggtgaaggagcagctgagcagcagcgacaccgcccccagagagagactgatcgacgccaagaccggcctgcccgtgaagaccgacatcacccccggccccagcagactgtgcagcggcgccagaagaagcttcttctgcagaatgaagtgcaacagacccagcgtgaaggtggaggacaaggacttccccagcacctgcagcaagaagaaggccgacagaaagagcttctgcaccatccacagcaccggctacctgaagagctggccccccaccaagatgggcctggacgaggacaacgagcccgacaacgagggctgcaacctgagctgcctggtggccatcggcagactgcacagccacgtggtgccccagcccgtgaacggcgagatcagagtgaagagcatggagtacgtgagcagacacgccatcgacggcaagttcgtgttcgtggaccagagagccaccgccatcctggcctacctgccccaggagctgctgggcaccagctgctacgagtacttccaccaggacgacatcggccacctggccgagtgccacagacaggtgctgcagaccagagagaagatcaccaccaactgctacaagttcaagatcaaggacggcagcttcatcaccctgagaagcagatggttcagcttcatgaacccctggaccaaggaggtggagtacatcgtgagcaccaacaccgtggtgctggccaacgtgctggagggcggcgaccccaccttcccccagctgaccgccagcccccacagcatggacagcatgctgcccagcggcgagggcggccccaagagaacccaccccaccgtgcccggcatccccggcggcaccagagccggcgccggcaagatcggcagaatgatcgccgaggagatcatggagatccacagaatcagaggcagcagccccagcagctgcggcagcagccccctgaacatcaccagcacccccccccccgacgccagcagccccggcggcaagaagatcctgaacggcggcacccccgacatccccagcagcggcctgctgagcggccaggcccaggagaaccccggctacccctacagcgacagcagcagcatcctgggcgagaacccccacatcggcatcgacatgatcgacaacgaccagggcagcagcagccccagcaacgacgaggccgccatggccgtgatcatgagcctgctggaggccgacgccggcctgggcggccccgtggacttcagcgacctgccctggcccctgtag

SEQ ID NO: 112274 - protein, 334 aa, Artificial Sequence
  derived and/or modified sequence
MLCRLGGRWLRPLPALQLWARDLPLAPVPTSGAKRPTLPVWAVAPVSAVHANGWYEALAASSPVRVAEEVLLGVHAATGLPWWGSILLSTVALRGAVTLPLAAYQHYILAKVENLQPEIKTIARHLNQEVAVRANQLGWSKRDARLTYLKNMRRLISELYVRDNCHPFKATVLVWIQLPMWIFMSFALRNLSTGAAHSEAGFSVQEQLATGGILWFPDLTAPDSTWILPISVGVINLLIVEICALQKIGMSRFQTYITYFVRAMSVLMIPIAATVPSSIVLYWLCSSFVGLSQNLLLRSPGFRQLCRIPSTKSDSETPYKDIFAAFNTKFISRK

SEQ ID NO: 112275 - DNA, 1086 bp, Artificial Sequence
  derived and/or modified sequence
tggattgtgaggcccgggatctgggctccgccgtggtgcagaaatgctgtgccggctcggcggtcggtggctgcggccgctccctgccctgcagctttgggctagggacctgccgcttgcgccggttcctacgagcggcgccaagcgccccactctcccagtgtgggcagtggcaccagtctctgcagtacatgcgaacggctggtacgaggccctggccgcgtcttcgccggtgcgggttgcggaggaagtactgctcggcgtgcacgccgccacgggcctgccctggtggggcagcattctgctctccaccgtggccttacggggtgctgtcacgctgcctttggcagcctaccagcactacatcctggccaaggtggaaaatttgcagccagaaataaaaactattgccaggcatcttaaccaagaagttgcagttcgtgcaaatcagttggggtggtccaaaagagatgccaggctcacttatctaaagaatatgaggaggctaatttcagagctatatgtgcgagataactgccaccctttcaaagccactgtgttggtttggattcagcttccaatgtggatcttcatgtcttttgctctccggaatttaagcacgggggcagcacattcagaagcaggtttttctgttcaggaacagttagctactggtggaattctgtggtttcctgacctcactgcacccgactccacttggattctgcctatctctgttggcgtcatcaatttgttaatagtggagatttgtgctctacaaaaaattggaatgtctcgttttcagacgtatattacgtactttgtccgtgcaatgtcggtgttgatgataccaattgctgcaacggtaccctcatcaattgttctctactggttatgctccagcttcgtgggcctttcacagaatttgctgctgcgttctcctggatttcgccaactttgccgaataccatcgaccaagtcagattcagaaactccttataaagacatatttgctgcctttaataccaagttcatttcaagaaaatgacatattttccaataattttgaaacagttgcaggagtca

SEQ ID NO: 112276 - DNA, 1005 bp, Artificial Sequence
  derived and/or modified sequence
atgctgtgcagactgggcggcagatggctgagacccctgcccgccctgcagctgtgggccagagacctgcccctggcccccgtgcccaccagcggcgccaagagacccaccctgcccgtgtgggccgtggcccccgtgagcgccgtgcacgccaacggctggtacgaggccctggccgccagcagccccgtgagagtggccgaggaggtgctgctgggcgtgcacgccgccaccggcctgccctggtggggcagcatcctgctgagcaccgtggccctgagaggcgccgtgaccctgcccctggccgcctaccagcactacatcctggccaaggtggagaacctgcagcccgagatcaagaccatcgccagacacctgaaccaggaggtggccgtgagagccaaccagctgggctggagcaagagagacgccagactgacctacctgaagaacatgagaagactgatcagcgagctgtacgtgagagacaactgccaccccttcaaggccaccgtgctggtgtggatccagctgcccatgtggatcttcatgagcttcgccctgagaaacctgagcaccggcgccgcccacagcgaggccggcttcagcgtgcaggagcagctggccaccggcggcatcctgtggttccccgacctgaccgcccccgacagcacctggatcctgcccatcagcgtgggcgtgatcaacctgctgatcgtggagatctgcgccctgcagaagatcggcatgagcagattccagacctacatcacctacttcgtgagagccatgagcgtgctgatgatccccatcgccgccaccgtgcccagcagcatcgtgctgtactggctgtgcagcagcttcgtgggcctgagccagaacctgctgctgagaagccccggcttcagacagctgtgcagaatccccagcaccaagagcgacagcgagaccccctacaaggacatcttcgccgccttcaacaccaagttcatcagcagaaagtag

SEQ ID NO: 112277 - DNA, 1005 bp, Artificial Sequence
  derived and/or modified sequence
atgctgtgtcggctgggaggccgctggctgcgcccacttccggcactccagctgtgggcccgagacctaccactggccccagtccccacgtcgggcgctaagagacctacactgccagtgtgggcagtggcaccggtgtcggcagtccacgccaacggatggtatgaagccctcgccgcctcctctcccgtgagggtggccgaggaggtccttttaggcgtacacgctgcgacagggctcccctggtggggcagtatcctcctgtccactgttgcactgaggggagcagttaccctcccactcgccgcttaccagcactatatcctggcgaaggttgagaaccttcaacccgagatcaagacaatcgcgcgtcaccttaatcaggaggttgcagtccgcgccaaccagttaggatggtctaagcgagatgcgcgccttacctatttaaaaaacatgagacgactgatcagcgagctctacgtcagagataactgccatccttttaaagcaactgtactggtgtggatccagcttccgatgtggattttcatgagtttcgctttgcggaatctgagcaccggagcggcacactcagaggctggattttccgtccaggagcagctggctactggtgggatcctctggtttcccgaccttactgcacctgatagcacgtggattttaccaatttctgtgggggtgattaacctgctaattgtggagatttgcgctttgcaaaagatcggtatgagcaggtttcagacttatatcacttacttcgtgagggccatgtccgtgttgatgattccgatcgcagcgacagttcctagtagcatcgtgctgtactggctgtgctccagctttgtgggcctgagccaaaacctgttattacgctctcctgggttccggcagttatgcaggatccccagcaccaaaagcgacagcgaaactccgtataaagatatcttcgccgcgtttaacacaaagttcataagccgcaaatag

SEQ ID NO: 112278 - DNA, 1005 bp, Artificial Sequence
  derived and/or modified sequence
atgctgtgccgcctgggcggccgctggctgcggcccctgcctgccctgcagctgtgggcccgggacctgcccctggcccctgtgcccaccagcggggccaagaggcccaccctgcctgtgtgggccgtggcccctgtgtctgctgtgcacgccaacggctggtatgaggccctggccgccagcagccctgtgcgggtggccgaggaggtgctgctgggcgtgcacgccgccaccggcctgccctggtggggcagcatcctgctgagcacagtggccctgcggggagctgtgaccctgcccctggccgcctaccagcactacatcctggccaaggtggagaacctgcagcctgagatcaagaccatcgcccggcacctgaaccaggaggtggccgtgcgggccaaccagctgggctggagcaagagagatgcccggctgacctacctgaagaacatgagaagactcatcagcgagctgtatgtgcgggacaactgccaccccttcaaggccaccgtgctggtgtggatccagctgcccatgtggatcttcatgagctttgccctgaggaacctgagcactggagctgcccacagcgaggccggcttctctgtgcaggagcagctggccaccggcggcatcctgtggttcccagacctgacagccccagacagcacctggatcctgcccatctctgtgggcgtcatcaacctgctgattgtggagatctgtgccctgcagaagattggcatgagccgcttccagacctacatcacctactttgtgcgggccatgtctgtgctgatgatccccatcgccgccaccgtgcccagcagcatcgtgctgtactggctgtgcagcagctttgtgggcctgagccagaacctgctgctgcggagccctggcttccggcagctgtgccgcatccccagcaccaagagtgacagcgagaccccctacaaggacatctttgctgccttcaacaccaagttcatcagcaggaagtag

SEQ ID NO: 112279 - DNA, 1005 bp, Artificial Sequence
  derived and/or modified sequence
atgctgtgccggctgggcggccggtggctgcggcccctgcccgccctccaactctgggcacgcgatctgccactcgcaccagttcctacgtcaggagccaagaggccaacccttcctgtctgggccgtggccccggtttccgccgtccacgcaaatggctggtacgaagcactcgccgcgtcgtcacctgtgcgagtggccgaggaggttctgctgggcgtgcacgccgcaacaggattgccctggtgggggtcaatactgcttagcacagtggcccttaggggcgccgttacactgcctctggcagcttaccagcattatatcctcgcgaaagtggagaaccttcagcccgagatcaagaccatagctaggcacctcaatcaggaggtggccgttcgcgcgaatcagctagggtggagtaagcgagatgcccgactgacatatctgaagaatatgagaagactgataagtgagctgtatgtgagagataactgtcatccctttaaggccacagttctggtctggatccagctgcctatgtggatctttatgagctttgctctacggaacctctccactggggcggcccactccgaggccggattttcagtacaggagcagctggcaaccggtggtatcctctggtttcctgatctgacggcacctgactcaacatggatactccccatcagtgtgggagtcattaacctactgatcgtcgagatttgtgccttacagaagataggaatgtcacggtttcaaacctacattacatactttgtccgtgcaatgtctgtcttgatgatcccgatcgcagcgacagttccctcctcgattgtcctctactggttatgttctagctttgtgggactttcacaaaatctgcttcttagaagtccaggctttcgtcaactctgcaggataccatccactaagtctgacagtgaaaccccttacaaggacatttttgccgcgttcaacactaagtttatttcgagaaagtag

SEQ ID NO: 112280 - DNA, 1005 bp, Artificial Sequence
  derived and/or modified sequence
atgttatgtcgcctgggaggccgatggttacggcctctgccagctcttcagctgtgggcaagagacctgccactggcccctgtccctacaagcggcgctaagcgacccacgttgcctgtttgggcggtggctcctgtgtccgcagtgcatgccaatggttggtacgaggctctcgcggcatcttcccctgtacgagtcgccgaggaggtgctgcttggagttcacgcggctaccgggttaccatggtgggggtccatactgttgtcaacagtggctttgaggggcgctgtgacgctgccccttgctgcttaccagcactacatcctggccaaagtcgaaaaccttcaacctgagataaagaccatagccagacacctgaatcaagaggttgcagtgcgagctaaccaattggggtggagcaagagggacgcccgtttgacgtacttgaagaatatgcgtcggctgatctctgaactatatgtgagagataactgtcacccctttaaagcaacagtgctggtgtggattcaactgccgatgtggatctttatgtcttttgcgttaagaaaccttagcaccggcgcagcccactctgaggccggtttttctgttcaggagcagctggcgaccgggggaattttgtggttcccagatctaacggctccagactccacatggatcctgccgatttcagtgggtgtgataaatctgttaatcgtagagatttgtgccctccagaagatcggaatgtccaggtttcagacatatatcacttactttgtccgagccatgtccgtgctcatgatccccatcgctgccaccgttccttctagcattgtgctttactggctctgttcaagcttcgtgggcttatcccagaatttactgctgcgcagtccaggattccgacagttgtgcagaatcccaagtaccaaaagcgacagcgagacaccctataaagatatcttcgcagcgtttaatactaaatttataagccggaagtag

SEQ ID NO: 112281 - protein, 291 aa, Artificial Sequence
  derived and/or modified sequence
MALSLPLGPRLGSEPLNHPPGAPREADIVGCTVCPASGEESTSPEQAQTLGQDSLGPPEHFQGGPRGNEPAAHPPRWSTPSSYEDPAGGKHCEVFEEANTLDQDLEVEGDSDWPGPGGVWGPWAPSSLPTSTELEWDPAGDIGGLGPLGQKTARTLGVPCELCGQRGPQGRGQGLEEADTSHSRQDMLESGLGHQKRLARHQRHSLLRKPQDKKRQASPHLQDVRLEGNPGAPDPASRQPLTFLLILFLLFLLLVGAMFLLPASGGPCCSHARIPRTPYLVLSYVNGLPPV

SEQ ID NO: 112282 - DNA, 1004 bp, Artificial Sequence
  derived and/or modified sequence
ggcccgggtgactccagcggaggagctctgggacacccttgtctagggaagaggtcttactggctgccctcacctgactttgtgtccccaggcccccagccatggccctgtccctgcctctgggccctagacttggctcagagcccctcaaccacccaccgggagcacctagagaggcggacattgttggatgcaccgtctgccccgcgtccggagaggagagcacgagcccagagcaggcccagaccctgggacaggactccttgggccctcctgagcacttccagggtgggccaaggggcaatgagcctgccgctcaccccccgagatggtcaacaccctcttcctacgaggacccagctgggggcaaacactgtgaggtgttcgaggaggccaacacgctggaccaggacttggaggtcgagggagactcggactggccaggacctggtggggtctgggggccctgggcacccagtagcctccccacttccacagagttggagtgggatccggcgggggacattgggggccttgggcccttgggacaaaagacagcccggacactaggagtgccctgtgagctgtgtggccagagggggccccagggcaggggacaaggccttgaggaagcagacacctctcactcccgacaggacatgctggagtctggcctcggccaccagaaacgcttagcacgtcaccaaagacactccctgctccggaagcctcaggacaagaagaggcaagcatctcctcatctccaggatgtgaggctggaggggaatccaggggcccccgatcctgcatccaggcagcctctgaccttcctccttatcctcttcctcctcttcctcctcctggtgggtgccatgtttctcctgcccgcgtcaggaggcccctgctgctctcatgcccgaatacccaggacaccctacctggtgctcagctatgtcaatggtcttcccccagtctgatgtgtgtaataaatggtcactgtcaaa

SEQ ID NO: 112283 - DNA, 876 bp, Artificial Sequence
  derived and/or modified sequence
atggccctgagcctgcccctgggccccagactgggcagcgagcccctgaaccacccccccggcgcccccagagaggccgacatcgtgggctgcaccgtgtgccccgccagcggcgaggagagcaccagccccgagcaggcccagaccctgggccaggacagcctgggcccccccgagcacttccagggcggccccagaggcaacgagcccgccgcccacccccccagatggagcacccccagcagctacgaggaccccgccggcggcaagcactgcgaggtgttcgaggaggccaacaccctggaccaggacctggaggtggagggcgacagcgactggcccggccccggcggcgtgtggggcccctgggcccccagcagcctgcccaccagcaccgagctggagtgggaccccgccggcgacatcggcggcctgggccccctgggccagaagaccgccagaaccctgggcgtgccctgcgagctgtgcggccagagaggcccccagggcagaggccagggcctggaggaggccgacaccagccacagcagacaggacatgctggagagcggcctgggccaccagaagagactggccagacaccagagacacagcctgctgagaaagccccaggacaagaagagacaggccagcccccacctgcaggacgtgagactggagggcaaccccggcgcccccgaccccgccagcagacagcccctgaccttcctgctgatcctgttcctgctgttcctgctgctggtgggcgccatgttcctgctgcccgccagcggcggcccctgctgcagccacgccagaatccccagaaccccctacctggtgctgagctacgtgaacggcctgccccccgtgtag

SEQ ID NO: 112284 - DNA, 876 bp, Artificial Sequence
  derived and/or modified sequence
atggccttgagccttccactggggcctcgattgggatcagagcctctaaaccaccccccaggcgctcccagggaggcagatatagtaggatgcactgtgtgccctgcctcgggggaagaatccacaagcccagagcaggcccagacccttgggcaagatagtctgggtcccccagagcatttccaaggaggccctagaggaaatgaaccagctgctcatccgcctcggtggagcacccccagttcttacgaggaccccgccgggggcaagcactgtgaagtgtttgaggaggctaatacattggatcaagaccttgaggtcgaaggggacagcgactggcctggcccaggcggcgtctgggggccatgggctcctagcagtctgccaacatcgactgaactggagtgggacccagctggcgatatcggggggctggggcccttgggccagaagaccgctcgaaccctgggagtgccatgcgaattgtgtggacaaaggggtccacagggcaggggacaaggcctggaagaggcggacacatctcactcccgccaagacatgctggaatctgggctgggccaccagaagaggctcgcccggcaccaaagacactccctgctgcgtaaaccacaggataaaaagagacaggcatccccccacttgcaagatgtcaggctagagggcaatcctggcgcacccgaccccgcaagtcggcagcctctcaccttcctcctaatccttttcctgctctttttgttgctcgtcggagccatgttcctgctcccagcgagtggcgggccgtgctgttctcatgccagaatccctcgcacgccatacctggtactcagctatgttaatgggctgcctcccgtctag

SEQ ID NO: 112285 - DNA, 876 bp, Artificial Sequence
  derived and/or modified sequence
atggccctgagcctgcccctgggcccccggctgggcagcgagcccctgaaccaccccccaggggccccccgggaggccgacatcgtgggctgcaccgtgtgcccagccagcggggaggagagcaccagccctgagcaggcccagaccctgggccaggacagcctgggccccccagagcacttccagggcggccccagaggaaatgaacctgctgcccaccccccacgctggagcacccccagcagctatgaggaccctgctgggggcaagcactgtgaggtgtttgaggaggccaacaccctggaccaggacctggaggtggagggggacagcgactggccaggccctgggggcgtgtggggcccctgggcccccagcagcctgcccaccagcacagagctggagtgggaccctgctggggacatcggcggcctgggccccctgggccagaagacagcccggaccctgggcgtgccctgtgagctgtgtggccagaggggcccccagggccggggccagggcctggaggaggccgacaccagccacagccggcaggacatgctggagagcggcctgggccaccagaagaggctggcccggcaccagaggcacagcctgctgaggaagccccaggacaagaagaggcaggccagcccccacctgcaggatgtgcggctggagggcaaccctggggccccagaccctgccagccggcagcccctgaccttcctgctgatcctcttcctgctcttcctgctgctggtgggcgccatgttcctgctgcctgccagcggcggcccctgctgcagccacgcccgcatccccaggaccccctacctggtgctgtcctatgtgaatggcctgccccctgtgtag

SEQ ID NO: 112286 - DNA, 876 bp, Artificial Sequence
  derived and/or modified sequence
atggccctgagcctgcccctgggcccccggctgggcagcgagcccctcaatcacccacccggagctccgcgagaagcagacattgtgggatgtacagtctgtccagcatctggcgaagagtctacatctccagaacaggcccagacactggggcaggacagtctgggtcctcctgaacacttccagggcgggccgcgaggcaacgaaccagcggcccacccacctcgctggagcaccccaagtagttacgaagatccggctggagggaaacactgtgaagtgttcgaagaggccaatactttagaccaagacctcgaagttgagggcgacagtgattggccagggccagggggagtctggggaccatgggcgccaagctctcttccgactagtacagaactggagtgggatcctgctggcgatatcggcggtttgggacctcttggacagaagacggcaagaacactgggagtaccatgcgaattgtgtggacaacggggacctcaaggtcggggccagggcctggaagaggccgatacctctcactcaaggcaagatatgctggaatctggcctagggcatcagaagcgcctcgcccgccaccagcggcactcactactgagaaaaccccaggataagaagcggcaggccagcccgcaccttcaagatgtgcgcctcgaagggaaccccggagcaccagatccagcttcaagacagccgctgacatttctgctgatcctgttccttctattccttctcctggtgggggccatgttcctcctccctgcatccgggggtccctgctgttcccacgctcggatacctcgtacaccctatttggtgctctcgtacgttaatggactccctcctgtgtag

SEQ ID NO: 112287 - DNA, 876 bp, Artificial Sequence
  derived and/or modified sequence
atggctctgagtctgcccctgggacccaggttaggttccgaacctctgaaccaccctcctggcgctccacgggaggccgatattgtcggctgcactgtatgcccggcaagcggagaggaaagtactagccccgagcaggcccagaccttaggccaggactctctgggtcctcctgagcacttccaggggggaccacgcggaaatgaacctgccgcacatccacccaggtggtcaactccctcttcgtatgaggaccctgccggtggaaagcactgcgaggtgtttgaggaggcaaatacacttgatcaagatcttgaagtggagggagatagcgactggcccggacctggaggtgtctggggaccgtgggcaccctcttctctgcctacctccaccgagctggaatgggaccctgccggtgacattggaggcctggggcctctgggacagaagacagccaggacactcggtgtgccttgcgaactgtgcggccagagagggccacaggggagagggcaaggcctggaggaggctgacactagtcactcaagacaggatatgctagagtcgggactagggcatcagaagcgtttggccaggcaccagaggcattcgctgctgcgcaaaccacaagataaaaaacgccaagcttcgccccatctgcaggacgttaggctggaaggtaatcctggcgctcccgatcccgcatctcgtcaacctctgacattcctgttgatcctttttttattattccttttgttggttggggctatgtttttgctgcccgcaagcggaggcccatgttgcagtcacgcacgaatacctaggaccccttatctcgtgctgagttatgttaacggactgcctcctgtgtag

SEQ ID NO: 112288 - protein, 129 aa, Artificial Sequence
  derived and/or modified sequence
MADPRVRQIKIKTGVVKRLVKEKVMYEKEAKQQEEKIEKMRAEDGENYDIKKQAEILQESRMMIPDCQRRLEAAYLDLQRILVSKDFCVMFKFFFSIQYMESQKFKYLTLRTSWQYFLFTCPLYRYILK

SEQ ID NO: 112289 - DNA, 390 bp, Artificial Sequence
  derived and/or modified sequence
atggccgatccaagggtgaggcagatcaagatcaaaacaggagtcgtgaagcgtttggtaaaggaaaaagtgatgtacgagaaggaagctaaacagcaagaagaaaaaatcgagaagatgagggcagaggacggagagaactacgatattaaaaaacaggccgagatccttcaggagtctaggatgatgatccccgattgtcagagacgactcgaagcggcctatctggatctccagcgcatcctcgtctcaaaggacttctgcgtgatgtttaagttcttcttttctatccagtatatggagtcgcagaaattcaaatacctgactcttaggacttcatggcagtactttctgtttacatgccctttatacagatacattctgaaatag

SEQ ID NO: 112290 - DNA, 390 bp, Artificial Sequence
  derived and/or modified sequence
atggctgacccccgggtgcggcagatcaagatcaagacaggagtggtgaagaggctggtgaaggagaaggtgatgtatgagaaggaggccaagcagcaggaggagaagattgagaagatgagagcagaagatggagagaactatgacatcaagaagcaggccgagatcctgcaggagagcaggatgatgatcccagactgccagaggcggctggaggccgcctacctggacctgcagaggatcctggtgtccaaggacttctgtgtgatgttcaagttcttcttcagcatccagtacatggagagccagaagttcaagtacctgaccctgcggacctcctggcagtacttcctgttcacctgccccctgtaccgctacatcctgaagtag

SEQ ID NO: 112291 - DNA, 390 bp, Artificial Sequence
  derived and/or modified sequence
atggccgacccccgggtgcggcagatcaagatcaagaccggcgtggtgaagcggctcgtcaaagaaaaagtcatgtacgagaaagaggctaaacaacaagaagagaagattgaaaagatgcgggcagaggatggggaaaactacgacattaagaagcaggcggagattctgcaggagagccgcatgatgataccagactgccagaggcggctggaagccgcttatctggatcttcaaagaatactggttagcaaagatttttgcgtgatgtttaaattttttttttcaatacagtacatggagagtcaaaagtttaaatatttaaccctgcgtacctcatggcagtattttctctttacatgcccactgtataggtacattttgaaatag

SEQ ID NO: 112292 - DNA, 390 bp, Artificial Sequence
  derived and/or modified sequence
atggctgacccaagagtgcgacagattaagatcaaaactggcgtcgtcaaacggttggtgaaagagaaagtgatgtacgaaaaggaagccaagcagcaggaagaaaagattgaaaaaatgagagccgaggacggggagaactacgacatcaaaaaacaggccgagatcttgcaggaaagtcggatgatgatacctgactgccagcggcgactcgaggccgcttacttggacctgcagaggatcttggtgagtaaggacttttgtgtgatgttcaagttttttttcagcattcaatacatggagtcacaaaagttcaagtaccttacccttaggacctcatggcagtactttctgttcacgtgtcccttgtacaggtatatcctcaagtag

SEQ ID NO: 112293 - DNA, 2301 bp, Artificial Sequence
  derived and/or modified sequence
gcccctccttctcgcggcgctcgagggaccatggccgatcctcgcgtgagacagatcaagatcaagaccggcgtggtgaagcggttggtcaaagaaaaagtgatgtatgaaaaagaggcaaaacaacaagaagaaaagattgaaaaaatgagagctgaagacggtgaaaattatgacattaaaaagcaggcagagatcctacaagaatccaggatgatgatcccagattgccagcgcaggttggaagccgcatatttggatcttcaacggatactagtaagcaaagacttctgtgtcatgtttaaattttttttttcaatccaatacatggaaagccaaaagtttaaatatttaacactgagaactagttggcagtatttcttattcacttgccctttataccgctatattttaaaataattaatggagtttaaattgtgttttgaattatgcctccagtaaaagtactgttttctagcatgtttgttcagtttattaaaatttagctagttaaatttatttaagttatgatagtaccagtattgtccagcaatgtcttgattatttggttttcatacataaagatcttttgagacattgaggatgagttgactgattaaaattttaaaagatctaatgtttcaaaagaatttgggatcttattaaaaggatcttgaattctttcacattcaaacctagatcagtttgagagggggaaaaaacctggtaatctatgtagtcccctcatactaacttggagctgaataacacttatacttgctggtataaatgccttgtgatacagaaggtagataaagcaggaaataataactgttaaaatactatctaagacaggaagcatcatttgtatttcttgacagtttaaatgcttttttctctcatgaatctagtagctgagaaagtaatagaaattgcttggaaaaaaataatgttggccgccaggtgcagtggctcatgcctgtaatcccagcactttgggaggctgaggtgggtggatcacgagtcaggagttcaagaccagcctgaccaacatggtgaaatcctgtctctactaaaaataccaaaataataataataataataatgtatttggatgatatatttgtatgtgaagatgtattcaacaatatctctgcccttgaagagcttgtatttactaacagagaacaaagatgtgtttaaggtataacatggaggtttaagaaattcttacgtatagtttgagctaagcaaattctcagtcgttttgctttcagttttcatattaaatacacacatactttatttcctctactgtttgtatatctccatcttttattgacctgacataaattgctaaccatagcttcatttaaaaatcaaacaaaatttcctgtgtactttagataatattatttcatttgtctgttatcattacaatatattagtaaaagttgcctgtatatcagtattatggaaaaactcaatctttaaatatcagaaaatgaaagatgtattttgtttcctttagtgtagggtatgtaatacccattagcaagcaggcaattcatttgtttaattcaaagattatatttaactctgttgtgacatcagaagccttctttgtcattgtgaatagtcagtggattattttggcctgaatgctgtcatatatgtaacatgttagtaaatcttcctttttacttttctcttttgtatgatgatgatgggtcaacaaaatgagaataaactttttctgaggtttttatttaattaatgctggtagctttagaagactgttattcacttattttatgagaatatatacagtgaaacaaaaccaccagttatttcttcctttccttgtaaagaaggaacagaatgtgggaaacctgtggaattacaatatatttagatgaggcttgggattttttacttttaattttttagttattaacattaatggtttgtaatatttgagtaaataacaaagtactgaaacttgaaaaggataaacttaatttttattgtatttcattttaggaaaatgaaaaagacttggaagaagctgaggaatataaagaagcacgtttagtactggattcagtgaagttagaagcctgaaacttttctcgtatggggtggtttttgcattaaatcctggggtccattttacaatccattatttttgaccactgctatgtgttcaagtagtatgagaatgtgattgtttttatctggttacatatatatttctttgtctaatttaatatgtcaaataaatgagttcatctaataaaa

SEQ ID NO: 112294 - DNA, 390 bp, Artificial Sequence
  derived and/or modified sequence
atggccgaccccagagtgagacagatcaagatcaagaccggcgtggtgaagagactggtgaaggagaaggtgatgtacgagaaggaggccaagcagcaggaggagaagatcgagaagatgagagccgaggacggcgagaactacgacatcaagaagcaggccgagatcctgcaggagagcagaatgatgatccccgactgccagagaagactggaggccgcctacctggacctgcagagaatcctggtgagcaaggacttctgcgtgatgttcaagttcttcttcagcatccagtacatggagagccagaagttcaagtacctgaccctgagaaccagctggcagtacttcctgttcacctgccccctgtacagatacatcctgaagtag

SEQ ID NO: 112295 - protein, 161 aa, Artificial Sequence
  derived and/or modified sequence
MGANQLVVLNVYDMYWMNEYTSSIGIGVFHSGIEVYGRAVVLGSTDFLEDDIEKIVEELGKEYKGNAYHLMHKNCNHFSSALSEILCGKEIPRWINRLAYFSSCIPFLQSCLPKEWLTPAALQSSVSQELQDELEEAEDAAASASVASTAAGSRPGRHTKL

SEQ ID NO: 112296 - DNA, 486 bp, Artificial Sequence
  derived and/or modified sequence
atgggcgccaaccagctggtggtgctgaacgtgtacgacatgtactggatgaacgagtacaccagcagcatcggcatcggcgtgttccacagcggcatcgaggtgtacggcagagccgtggtgctgggcagcaccgacttcctggaggacgacatcgagaagatcgtggaggagctgggcaaggagtacaagggcaacgcctaccacctgatgcacaagaactgcaaccacttcagcagcgccctgagcgagatcctgtgcggcaaggagatccccagatggatcaacagactggcctacttcagcagctgcatccccttcctgcagagctgcctgcccaaggagtggctgacccccgccgccctgcagagcagcgtgagccaggagctgcaggacgagctggaggaggccgaggacgccgccgccagcgccagcgtggccagcaccgccgccggcagcagacccggcagacacaccaagctgtag

SEQ ID NO: 112297 - DNA, 486 bp, Artificial Sequence
  derived and/or modified sequence
atgggggccaatcagctggtggtccttaacgtttacgatatgtattggatgaatgagtatacgtcttccatcggcattggcgtctttcatagcggaatagaggtatacggtagggccgtcgtgttgggtagcaccgacttcctggaggatgatatcgagaagatcgtcgaggagttaggtaaggaatacaagggcaacgcttaccatttgatgcacaagaattgcaatcatttttccagcgccctctcagaaatcctgtgcgggaaggagattccccggtggatcaaccgcttggcttacttcagcagctgcatcccatttctgcagagctgcctccctaaagaatggctgaccccagcggcgttgcagtcctccgtatctcaggagctgcaagatgagctggaggaggcagaggatgccgccgcctcggcttcagtagcctcgactgcagccgggtccagaccgggtcggcacactaaactgtag

SEQ ID NO: 112298 - DNA, 486 bp, Artificial Sequence
  derived and/or modified sequence
atgggcgccaaccagctggtggtgctgaatgtgtatgacatgtactggatgaatgagtacaccagcagcatcggcatcggggtcttccacagcggcatcgaggtgtatggccgggctgtggtgctgggcagcacagacttcctggaggatgacatcgagaagatcgtggaggagctgggcaaggagtacaagggaaatgcctaccacctgatgcacaagaactgcaaccacttcagcagcgccctgtctgagatcctgtgtgggaaggagatcccccgctggatcaaccggctggcctacttcagcagctgcatccccttcctgcagagctgcctgcccaaggagtggctgaccccagctgccctgcagagctctgtgtcccaggagctgcaggatgagctggaggaggccgaggatgctgctgccagcgcctctgtggccagcacagctgctggcagcaggcctggccgccacaccaagctgtag

SEQ ID NO: 112299 - DNA, 486 bp, Artificial Sequence
  derived and/or modified sequence
atgggcgccaaccagctggtggtgctgaacgtgtacgacatgtactggatgaatgaatacacgtcctcaataggaattggagtatttcactcggggatcgaggtgtacggcagggccgtggtactcggatccacagactttctcgaggatgatatcgaaaaaattgtagaggagctaggtaaagaatacaagggaaatgcatatcacttgatgcacaaaaattgtaatcatttctcatccgctctttcagagatcctttgtggcaaagagatcccccgctggatcaaccggttagcttacttctccagctgcatcccattcttgcagagctgtctgcccaaggaatggctgactccagcagcactgcagtctagcgtcagccaggaattacaagatgagctggaggaagcggaagatgccgctgcctctgctagtgtggccagtacagcggcgggctcaaggccaggtcgccatacaaagctgtag

SEQ ID NO: 112300 - DNA, 486 bp, Artificial Sequence
  derived and/or modified sequence
atgggagccaatcagctggtggttctgaacgtatatgacatgtactggatgaacgagtacaccagctcgattggaataggagtgtttcatagcggcatcgaagtgtatggacgcgcagtggtgctgggatccacggactttttggaggacgacatcgaaaagattgttgaagagctcggtaaggagtataaaggcaatgcgtatcatctaatgcataagaactgcaatcacttttctagtgccctgtctgaaatcttgtgcggcaaagagatcccaaggtggatcaacagacttgcctacttctccagctgcattcctttcctccagtcttgtttgcctaaggaatggctcacacccgcagcattgcagtcttcagtgagtcaagagctgcaggatgagctagaggaggctgaggatgcagctgccagcgcatccgtggcttcaaccgccgctggttcccgacctggacgccacacgaaactgtag

SEQ ID NO: 112301 - DNA, 859 bp, Artificial Sequence
  derived and/or modified sequence
caacggtccggccccgtccgcacagacgctcctgtcggcggcgcccgggagcggctcggctgcccgatgcttccgccccggctgccgcgggccgggctgtacgcttagtgcccggctcaggccccctgaagcgcccgcgggggtgagagcggcctccggccccgcggagacggagcggcttgaggacgaggcggcggccgcggggaggaggatgggggctaaccagttagtggtgctcaacgtgtacgacatgtattggatgaacgaatatacctcatccattggaattggagtttttcattcaggaattgaagtctatggcagagctgttgttttagggagcacggacttcctagaagatgatatagaaaaaattgtagaagaactgggaaaagaatacaaaggcaatgcttatcatttaatgcataaaaactgcaatcatttttcttcagctttatcagagattctttgtgggaaagagattcctcgctggatcaatcgacttgcctacttcagctcctgtataccctttctacagagttgcctcccgaaggagtggctcacgcccgcagccctgcagtctagtgtcagccaagaactccaggatgaactggaggaagcagaggatgctgccgcatccgcttccgtggcaagcactgcagcaggctccagacccgggcgccacactaaactataaatgtctccaaagtcacacattcagaactgtctctggcagtcgaatatcactagagaaaagtaaacagagaagcatcctttagatattttgtatgcaaagatggctctcccccaaatcccagtttttcagctcaggattatatttgtaatcaaaaaaaaaaaa

SEQ ID NO: 112302 - protein, 376 aa, Artificial Sequence
  derived and/or modified sequence
MFGAAGRQPIGAPAAGNSWHFSRTMEELVHDLVSALEESSEQARGGFAETGDHSRSISCPLKRQARKRRGRKRRSYNVHHPWETGHCLSEGSDSSLEEPSKDYRENHNNNKKDHSDSDDQMLVAKRRPSSNLNNNVRGKRPLWHESDFAVDNVGNRTLRRRRKVKRMAVDLPQDISNKRTMTQPPEGCRDQDMDSDRAYQYQEFTKNKVKKRKLKIIRQGPKIQDEGVVLESEETNQTNKDKMECEEQKVSDELMSESDSSSLSSTDAGLFTNDEGRQGDDEQSDWFYEKESGGACGITGVVPWWEKEDPTELDKNVPDPVFESILTGSFPLMSHPSRRGFQARLSRLHGMSSKNIKKSGGTPTSMATNWTSEIPL

SEQ ID NO: 112303 - DNA, 1131 bp, Artificial Sequence
  derived and/or modified sequence
atgttcggcgccgccggcagacagcccatcggcgcccccgccgccggcaacagctggcacttcagcagaaccatggaggagctggtgcacgacctggtgagcgccctggaggagagcagcgagcaggccagaggcggcttcgccgagaccggcgaccacagcagaagcatcagctgccccctgaagagacaggccagaaagagaagaggcagaaagagaagaagctacaacgtgcaccacccctgggagaccggccactgcctgagcgagggcagcgacagcagcctggaggagcccagcaaggactacagagagaaccacaacaacaacaagaaggaccacagcgacagcgacgaccagatgctggtggccaagagaagacccagcagcaacctgaacaacaacgtgagaggcaagagacccctgtggcacgagagcgacttcgccgtggacaacgtgggcaacagaaccctgagaagaagaagaaaggtgaagagaatggccgtggacctgccccaggacatcagcaacaagagaaccatgacccagccccccgagggctgcagagaccaggacatggacagcgacagagcctaccagtaccaggagttcaccaagaacaaggtgaagaagagaaagctgaagatcatcagacagggccccaagatccaggacgagggcgtggtgctggagagcgaggagaccaaccagaccaacaaggacaagatggagtgcgaggagcagaaggtgagcgacgagctgatgagcgagagcgacagcagcagcctgagcagcaccgacgccggcctgttcaccaacgacgagggcagacagggcgacgacgagcagagcgactggttctacgagaaggagagcggcggcgcctgcggcatcaccggcgtggtgccctggtgggagaaggaggaccccaccgagctggacaagaacgtgcccgaccccgtgttcgagagcatcctgaccggcagcttccccctgatgagccaccccagcagaagaggcttccaggccagactgagcagactgcacggcatgagcagcaagaacatcaagaagagcggcggcacccccaccagcatggccaccaactggaccagcgagatccccctgtag

SEQ ID NO: 112304 - DNA, 1131 bp, Artificial Sequence
  derived and/or modified sequence
atgttcggcgcggccggccgccagcctatcggagctcctgccgcaggaaattcttggcacttctcgagaactatggaagaactcgtccacgatctcgtgtccgccttagaggaaagctcagagcaggcccgtggtgggtttgccgagacgggcgaccacagtcgatcaatttcttgtcctctaaagcgtcaggctcggaaacgccgtgggcgtaagagacggagttacaacgtgcaccatccgtgggagaccgggcattgcttgtcagaagggagcgattcttctctcgaggagccaagtaaggattaccgggagaatcataataacaacaaaaaggatcactcagatagtgatgaccagatgctcgtcgccaagcgccgtccaagcagcaatcttaacaacaacgttcgaggcaaacgaccactgtggcacgaaagtgacttcgctgtggataatgtcgggaatcgcaccctgcgaagacgccggaaggtcaagcgaatggctgtggacctgcctcaagacatctccaacaagagaaccatgacccagccaccagagggctgtcgcgaccaggacatggattccgatcgcgcgtaccaatatcaggagttcacgaagaataaggtcaaaaagagaaagctgaaaattatcagacagggtccaaaaattcaggatgagggtgtcgtgttagagagtgaggaaaccaaccagacaaacaaggataagatggagtgcgaagaacaaaaggtctcagacgaacttatgtcagaaagcgacagtagttctctatcgagtactgatgcggggctgttcactaatgacgaggggagacagggggatgacgagcaatccgactggttctacgaaaaagagtcgggaggcgcatgtggcatcactggagtcgtgccgtggtgggaaaaggaagaccctactgagctcgacaagaatgtccccgaccctgttttcgagagcattctgaccggatcttttccgctgatgtcgcatccatctcggagaggctttcaggcgaggctcagcaggctgcatggtatgtcaagcaagaacattaaaaagagtggcggcactcctacttccatggccaccaattggacaagtgaaattccactgtag

SEQ ID NO: 112305 - DNA, 1131 bp, Artificial Sequence
  derived and/or modified sequence
atgtttggagctgctggccggcagcccatcggggccccagctgctggcaacagctggcacttcagcaggaccatggaggagctggtgcatgacctggtgtctgccctggaggagagcagcgagcaggcccggggcggctttgctgagaccggggaccacagccgcagcatcagctgccccctgaagaggcaggccaggaagaggcggggcaggaagagaagaagctacaacgtgcaccacccctgggagaccggccactgcctgtctgagggcagtgacagcagcctggaggagcccagcaaggactaccgggagaaccacaacaacaacaagaaggaccacagcgacagtgatgaccagatgctggtggccaagaggcggcccagcagcaacctgaacaacaacgtgcggggcaagaggcccctgtggcatgaaagtgactttgctgtggacaacgtgggcaacagaaccctgcggcggcggaggaaggtgaagaggatggctgtggacctgccccaggacatcagcaacaagaggaccatgacccagcccccagagggctgccgggaccaggacatggacagcgaccgggcctaccagtaccaggagttcaccaagaacaaggtgaagaagaggaagctgaagatcatccggcagggccccaagatccaggatgaaggagtggtgctggagagcgaggagaccaaccagaccaacaaggacaagatggagtgtgaggagcagaaggtgtctgatgagctgatgtctgagagtgacagcagcagcctgagcagcacagatgctggcctcttcaccaatgatgagggccggcagggagatgatgagcagagcgactggttctatgagaaggagagcggcggggcctgtggcatcactggagtggtgccctggtgggagaaggaggaccccacagagctggacaagaatgtgcctgaccctgtgtttgagagcatcctgaccggcagcttccccctgatgagccaccccagccggcggggcttccaggcccggctgagccggctgcacggcatgagcagcaagaacatcaagaagagcggcggcacccccacctccatggccaccaactggaccagcgagatccccctgtag

SEQ ID NO: 112306 - DNA, 3218 bp, Artificial Sequence
  derived and/or modified sequence
ccggaagctcatctcaaaatgctgaactgctctttggaagtcgccggtgctgttgtagttggagtctgttcacgggcctgagcttcgaggccaggctcccgggtgtcgttaatgttcggggccgccgggcgccaaccgatcggagctccagcagccgggaacagctggcatttcagtagaaccatggaggagctggttcatgaccttgtctcagcattggaagagagctcagagcaagctcgaggtggatttgctgaaacaggagaccattctcgaagtatatcttgccctctgaaacgccaggcaaggaaaaggagagggagaaaacggaggtcgtataatgtgcatcacccgtgggagactggtcactgcttaagtgaaggctctgattctagtttagaagaaccaagcaaggactatagagagaatcacaataataataaaaaagatcacagtgactctgatgaccaaatgttagtagcaaagcgcaggccgtcatcaaacttaaataataatgttcgagggaaaagacctctatggcatgagtctgattttgctgtggacaatgttgggaatagaactctgcgcaggaggagaaaggtaaaacgcatggcagtagatctcccacaggacatctctaacaaacggacaatgacccagccacctgagggttgtagagatcaggacatggacagtgatagagcctaccagtatcaagaatttaccaagaacaaagtcaaaaaaagaaagttgaaaataatcagacaaggaccaaaaatccaagatgaaggagtagttttagaaagtgaggaaacgaaccagaccaataaggacaaaatggaatgtgaagagcaaaaagtctcagatgagctcatgagtgaaagtgattccagcagtctcagcagcactgatgctggattgtttaccaatgatgagggaagacaaggtgatgatgaacagagtgactggttctacgaaaaggaatcaggtggagcatgtggtatcactggagttgtgccctggtgggaaaaggaagatcctactgagctagacaaaaatgtaccagatcctgtctttgaaagtatcttaactggttcttttccccttatgtcacacccaagcagaagaggtttccaagctagactcagtcgccttcatggaatgtcttcaaagaatattaaaaaatctggagggactccaacttcaatggctacaaactggaccagtgagattcccctataaaccaaatcttctaatgctaataaattagttacgttttgaacatctggggaatgacattcgagggaacctggctcctgtcctcttccctggaggaatatcattgaagtgagagcctctttgatgaaaagatggggctgtttttgctggaggactggtattcttccttttagtcagaagtgaacctgactggggaggctttctagggatttaggttggcccagggtggatagaaactactgtaaattatatatttttctcttttatggttttttttttacattgaatccatttatgtatacttgctttgccaaaatgctaacaaagctagaaaattttaaacttccagatcgacaagtattccttaatgtttatattgtgactgattaagaattaatttttacatatctgactgttgtaaataaaaatcatgatgcattgacatttatggttcatttttagagaagtcttatataaccagcattatttaaaatatttgcattttactcagggtattttaacaagggctaagatgagtagtaggtaaggttgataatctttgctggagtttgtattttgttcagcttcctttctacttgggtaatctgcttgtattgcaaactcattgtattttatagtatagctttcattgtactgcaaaaatcatcctcgttttaaattagccacagtgataactagtctgcactagtagaatcatttaccttttaaattatctgctttgtctgatacctgaaacacatcaaaattattattttggtttagagcttaatgaaacatgtgaaagctggtatttttaacaaatgctgtgtgattctgaatcatattgtcatgtttaaaagtgagagctgcttgtacatctttagaatggcagaccatatgtgtcactgtgagtgtcagaaatacttgcatgagctcattttcaccaactggggggaaaatgtaatgtttctattgatggtataatttagacactataataagttcagccatttgagttcttcaaaatggttatattaaaatgatatttttattaagcttcaataatgaaaaacaatgtgatttaatatgtgtatttttatattattgtatggattaattgttaattcagcatttaatggctaacttaaatatgattggaaaagaaacttcaagttgccattgcttttacctaaagtttttaaagtctgaaagatttcagcaaatgcattaaacaggaatgtgtgacatcttcttttagattgcttgtctaatttggagagattaaaaatggtaaaatgcaactttgagtctctttacctttgcatatttaaaggtacaatagtgtggtgttggtaattgtaagtaagcttttctgtgctatgtctttggagtgaaaattcatgttttttttctgaattacataaatgcttttgttttattttgtataatgactgtcttttagatctgaataagtcactttaaaaccttggcctatgaactttgccttatcaatcatgaatctagatgaatgctatctagttcttggttcagttttacctatttttatttttggttcactgcttgcttgagcatagctgggatttgtagcccattttctaggcttattgcaatctcactgtggtattttatagaagctattacaactgataggctagcttcatggtattgatgatacatggcttaaccatactaaaagctgctttccctctctaaattgtaaaaaggtgatgaagtttcacttgatggagacatactatatatgtgtgtttatcatggaactagtgcattaggccataagctgtttttctggtctatgttttttgtatttaaaactttactgaagacaatggactccttcgggttttctttctttcaaccctgaattgtccttgtttgaatttttaagtactgtaatttttttttttcaataaaatctctgacttgggcaagaaaggtaa

SEQ ID NO: 112307 - DNA, 1131 bp, Artificial Sequence
  derived and/or modified sequence
atgttcggcgccgccggccggcagcccatcggcgcccccgccgccggcaattcctggcacttctcgcggaccatggaggaacttgttcacgatctggtgtccgcacttgaagaaagttcagagcaggcaaggggcggattcgctgagaccggagatcacagtcgctccatcagctgccctttgaagcgccaggcgcggaagcgcagaggtaggaagagacgctcatataatgtgcatcatccatgggaaacaggtcactgcctaagtgagggctcagattcctcgcttgaggagccttccaaagactaccgagagaaccacaataataacaagaaagatcacagcgatagtgacgaccagatgctggtggctaagcgaaggccatcttccaatctgaataataacgtgcgtggaaagagacccctgtggcacgaatcagactttgccgtggacaacgttgggaaccgaacacttagacgtcggcgcaaggtgaaacgcatggcagtagacttacctcaggacatttctaacaaacgaacgatgacccagccacctgaggggtgcagggatcaggacatggattccgatagggcctatcagtatcaggagtttacgaaaaacaaagtcaaaaagaggaagctgaagatcatcagacaagggcctaagatccaggatgaaggggtggtactggagtccgaggagaccaatcaaaccaataaagataagatggaatgtgaggaacagaaggtttcagatgaacttatgtcagaaagtgattcgagtagcctatcttctaccgacgcaggcctatttacaaacgatgaaggcagacaaggcgatgatgagcaaagcgattggttctacgagaaagaatcgggtggcgcatgcggcatcaccggggttgtgccatggtgggagaaagaggatccaaccgaattggacaaaaacgttccagatccggtgtttgagagcatcctgaccggatccttccccctgatgagtcatccatctaggaggggcttccaagctagactgagcaggctgcacggcatgtcaagtaagaacatcaaaaaatcaggagggacacctaccagtatggcgaccaattggacatccgaaattcccctttag

SEQ ID NO: 112308 - DNA, 1131 bp, Artificial Sequence
  derived and/or modified sequence
atgtttggcgcagctgggcgtcagcctattggtgcccctgccgcaggcaattcctggcacttctccagaactatggaagagctggtccacgatcttgtgagcgcacttgaggagtctagtgaacaggcccgaggcggattcgctgagaccggcgatcattcccgtagcatttcatgtcccctgaagcggcaggcaagaaaaagaaggggacgcaaaagacgaagttataacgtgcaccatccttgggagaccgggcattgtctgagtgaaggtagcgactccagcttggaggaaccttctaaagactaccgggagaatcataacaacaataagaaagatcattcagattccgatgaccaaatgctggttgcaaagcggagacctagctcaaacctgaacaataatgttcgaggaaagcgccctctgtggcacgagagcgatttcgcagttgataacgtaggaaaccggacactgcgtcggagacgtaaggttaaacggatggctgtcgacctgccccaggacatctccaataagcgcaccatgacacagccacctgagggttgcagagatcaggacatggattccgaccgggcatatcagtatcaggagttcacaaaaaataaggtgaagaaaagaaagctgaagatcattaggcagggtcctaaaattcaggatgaaggggtggtgctggagtctgaggagacaaaccagactaataaagacaaaatggaatgcgaagagcagaaagtctcggacgagctgatgagtgagtctgactcctcatccctgtccagcacagatgccggactctttaccaatgatgaaggcagacagggcgacgatgaacaaagtgattggttttacgaaaaggagtcgggcggtgcgtgcggtattaccggtgtggtgccctggtgggagaaagaagatcctaccgagctggacaagaacgttcccgatcctgtctttgagagtatcctgactggatcttttcccttaatgtcacacccgtctagacgtggattccaggccaggctgtcacgtctccatgggatgtccagcaaaaacattaaaaaaagtggtggtaccccaaccagtatggccaccaattggaccagtgaaattcccctgtag

SEQ ID NO: 112309 - protein, 394 aa, Artificial Sequence
  derived and/or modified sequence
MAVPPSAPQPRASFHLRRHTPCPQCSWGMEEKAAASASCREPPGPPRAAAVAYFGISVDPDDILPGALRLIQELRPHWKPEQVRTKRFTDGITNKLVACYVEEDMQDCVLVRVYGERTELLVDRENEVRNFQLLRAHSCAPKLYCTFQNGLCYEYMQGVALEPEHIREPRLFRLIALEMAKIHTIHANGSLPKPILWHKMHNYFTLVKNEINPSLSADVPKVEVLERELAWLKEHLSQLESPVVFCHNDLLCKNIIYDSIKGHVRFIDYEYAGYNYQAFDIGNHFNEFAGVNEVDYCLYPARETQLQWLHYYLQAQKGMAVTPREVQRLYVQVNKFALGPSCVSSTMTASLQCCRVGNRHGEIARLTLSGLFPGVSLLLGSLGPHPEPVLHHRL

SEQ ID NO: 112310 - DNA, 1185 bp, Artificial Sequence
  derived and/or modified sequence
atggcagtccctccttccgccccacagcccagagccagcttccacctgcgacgccatacgccctgcccacaatgtagttgggggatggaggaaaaggccgccgcatccgcttcctgcagagagcccccaggcccaccaagggcagcagccgtggcctactttggcatttctgtggaccccgacgacattctgcctggcgcgctgcgtctgatacaggagcttagaccacactggaagccagagcaagtgcggacaaagaggttcaccgatggaattacgaataaactagtggcttgctacgtggaagaagacatgcaggattgtgtgctggtgagggtgtatggtgagaggactgagctcttagttgaccgcgaaaatgaggtgcggaactttcagttgttacgggcccactcctgcgcccccaagctttactgtacctttcagaacggcttatgttatgaatacatgcagggcgtggccctggagcctgaacatatacgggagccaaggcttttccggctgatagccttggagatggcgaagatccatactatacatgccaatggctctttgcccaagccaattctgtggcacaagatgcacaattatttcaccctggtcaagaacgaaatcaatccctccctctccgcagacgtccccaaggtggaagtgctggaaagggaactcgcttggttaaaggagcatctttcccagctggagtcccccgttgtcttttgccataacgacctgctgtgcaagaacatcatttatgatagcataaaaggccacgtccgctttatagactacgaatacgccggatacaattatcaagcgttcgacataggaaatcacttcaatgagtttgctggggtcaatgaggtggactactgcctgtatcctgctagagaaacccagctccagtggctgcactactatctgcaagctcagaaaggcatggccgtgacaccgcgagaagtccagcgactgtatgtccaagtcaataagttcgcattaggaccaagttgtgtctcgagcactatgaccgcgtcactccaatgctgtcgggttggtaatagacacggggagatagcccgtctcactctgtcaggactctttccaggtgtctcgctgttactgggcagcctcggaccccatccagagccggtactgcatcaccggctgtag

SEQ ID NO: 112311 - DNA, 1185 bp, Artificial Sequence
  derived and/or modified sequence
atggctgtgccccccagcgccccccagccccgggccagcttccacctgcggcggcacaccccctgcccccagtgctcctggggcatggaggagaaggccgccgccagcgccagctgccgggagcccccaggcccccccagggctgctgctgtggcctacttcggcatctctgtggaccctgatgacatcctgcccggggccctgcggctcatccaggagctgcggccccactggaagccagagcaggtgaggaccaagcgcttcacagatggcatcaccaacaagctggtggcctgctacgtggaggaggacatgcaggactgtgtgctggtgcgggtgtatggagagaggacagagctgctggtggacagagaaaatgaggtgaggaacttccagctgctgcgggcccacagctgtgcccccaagctgtactgcaccttccagaatggcctgtgctatgagtacatgcagggcgtggccctggagcctgagcacatccgggagcccaggctcttccggctgattgccctggagatggccaagatccacaccatccacgccaacggcagcctgcccaagcccatcctgtggcacaagatgcacaactacttcaccctggtgaagaatgagatcaaccccagcctgtctgcagatgtgcccaaggtggaggtgctggagcgggagctggcctggctgaaggagcacctgagccagctggagagccctgtggtgttctgccacaatgacctgctgtgcaagaacatcatctatgacagcatcaagggccacgtgcgcttcattgattatgaatatgccggctacaactaccaggcctttgatattggcaaccacttcaatgaatttgctggggtgaatgaggtggactactgcctgtacccagcccgggagacccagctgcagtggctgcactactacctgcaggcccagaagggcatggctgtgaccccccgggaggtgcagaggctgtatgtgcaggtgaacaagtttgccctgggccccagctgtgtgagcagcaccatgacagccagcctgcagtgctgccgggtgggcaacagacatggagaaattgcccggctgaccctgagcggcctcttccctggggtgtccctgctgctgggcagcctgggcccccaccctgagcctgtgctgcaccaccggctgtag

SEQ ID NO: 112312 - DNA, 1185 bp, Artificial Sequence
  derived and/or modified sequence
atggccgtgccccccagcgccccccagccccgggccagcttccacctcagacgccacactccttgccctcaatgttcttggggaatggaagaaaaagctgccgctagtgccagctgcagggaacctcctggtcctcccagggcagctgcggttgcatatttcggtatttccgttgatcccgacgacattctgccaggcgccttacgtctaatccaagagttacgcccccattggaaacctgagcaggtccgtaccaaaagatttaccgatggcatcacaaacaaactggtggcctgctacgttgaagaggatatgcaagactgtgtgttagtcagggtttatggtgagagaaccgagctgttggtagaccgagaaaacgaggtgcgtaattttcagctcctgagggcccatagttgtgctcccaaattatactgtacatttcagaatggcctctgctacgaatatatgcagggcgttgcactggaacccgaacatattcgggagcccagactgtttcggctgatagctctggagatggctaaaatccacacaatacacgccaatggcagtcttcctaaaccaatactatggcacaaaatgcataattacttcactctagtgaagaacgagattaacccttccctgtctgcggacgttccgaaagtcgaagtgctcgagcgagaactggcctggctcaaggagcacctgtcacagctggaaagtcctgtcgtgttttgccataacgatctgttgtgcaagaatatcatctatgacagcataaagggccacgtgcggttcatcgattacgaatatgccggatacaactatcaggcattcgacattggtaaccattttaacgaatttgcaggagttaacgaggtagattactgcctgtacccggcacgtgaaacacagctgcagtggctccactactatttacaggcccagaaggggatggcagtcaccccaagggaagtgcaacgactgtatgtgcaggtcaataagtttgcattggggccgtcctgcgtttcttcgaccatgaccgcttccttacagtgttgtcgggtggggaacagacacggggagattgccaggctcaccttgtcagggttgttcccaggggtgtccttactgctgggaagcctcggcccgcaccccgagccagttctgcaccataggctgtag

SEQ ID NO: 112313 - DNA, 1185 bp, Artificial Sequence
  derived and/or modified sequence
atggctgtgcccccatcggctccacagcctcgtgcatcttttcatctgcgcagacatacgccatgcccccagtgctcctggggtatggaagagaaggccgctgcaagcgcaagttgtcgggaaccccctggccctcccagggccgctgccgtcgcttacttcggtatctctgtcgatcctgacgacatactaccgggtgccctgcggctgattcaggagttgaggccccattggaaaccagagcaggtcagaacaaagcgatttacagatggcattaccaataaacttgttgcctgctatgtggaagaggacatgcaggactgtgtgttagtccgggtatacggagagagaacggagcttcttgtggaccgtgagaacgaggtccggaattttcagctgctgcgtgcacatagctgcgcacccaagctgtattgcaccttccagaacggattgtgttacgaatacatgcagggtgtggctttggagccagagcacatcagagagcctagattgtttcggttaattgcacttgagatggccaagatccataccatccatgcgaatggctcccttcctaagccaattctgtggcacaaaatgcataactatttcaccctcgtgaaaaacgagatcaatccttccctgtccgctgatgtccctaaagtggaggttttagagagagaactcgcttggctgaaagagcacctctcacagctggaatcacccgttgtgttctgccataacgacctgctgtgtaaaaacattatatacgactcaattaaaggccacgttcgcttcattgattatgaatacgccggatacaattaccaggccttcgacattggcaaccacttcaacgagtttgctggcgtcaatgaggtcgactattgcctctatcctgccagggagactcagctgcagtggttgcattactatctgcaggcccaaaaggggatggctgtgactccaagggaggtccaacggctgtacgtccaagtgaataaatttgccctaggccctagctgtgtcagttcaaccatgacagcttctcttcagtgctgtcgggtggggaacaggcacggcgagatcgcccgactaactctctctggactgtttcccggagtttcattgctgctggggagcttgggacctcatcctgaaccagtcctgcatcacaggctttag

SEQ ID NO: 112314 - DNA, 1185 bp, Artificial Sequence
  derived and/or modified sequence
atggccgtgccccccagcgccccccagcccagagccagcttccacctgagaagacacaccccctgcccccagtgcagctggggcatggaggagaaggccgccgccagcgccagctgcagagagccccccggcccccccagagccgccgccgtggcctacttcggcatcagcgtggaccccgacgacatcctgcccggcgccctgagactgatccaggagctgagaccccactggaagcccgagcaggtgagaaccaagagattcaccgacggcatcaccaacaagctggtggcctgctacgtggaggaggacatgcaggactgcgtgctggtgagagtgtacggcgagagaaccgagctgctggtggacagagagaacgaggtgagaaacttccagctgctgagagcccacagctgcgcccccaagctgtactgcaccttccagaacggcctgtgctacgagtacatgcagggcgtggccctggagcccgagcacatcagagagcccagactgttcagactgatcgccctggagatggccaagatccacaccatccacgccaacggcagcctgcccaagcccatcctgtggcacaagatgcacaactacttcaccctggtgaagaacgagatcaaccccagcctgagcgccgacgtgcccaaggtggaggtgctggagagagagctggcctggctgaaggagcacctgagccagctggagagccccgtggtgttctgccacaacgacctgctgtgcaagaacatcatctacgacagcatcaagggccacgtgagattcatcgactacgagtacgccggctacaactaccaggccttcgacatcggcaaccacttcaacgagttcgccggcgtgaacgaggtggactactgcctgtaccccgccagagagacccagctgcagtggctgcactactacctgcaggcccagaagggcatggccgtgacccccagagaggtgcagagactgtacgtgcaggtgaacaagttcgccctgggccccagctgcgtgagcagcaccatgaccgccagcctgcagtgctgcagagtgggcaacagacacggcgagatcgccagactgaccctgagcggcctgttccccggcgtgagcctgctgctgggcagcctgggcccccaccccgagcccgtgctgcaccacagactgtag

SEQ ID NO: 112315 - DNA, 2431 bp, Artificial Sequence
  derived and/or modified sequence
gctagcgtctgccgcggctccgagggggtggggctgctgggaatggctgtgcccccttcggcccctcagccgcgcgcgtcctttcacctgaggaggcacacgccttgcccgcagtgctcatggggcatggaggagaaggcggcggccagcgccagctgccgggagccgccgggccccccgagggccgccgccgtcgcgtacttcggcatttccgtggacccggacgacatccttcccggggccctgcgcctcatccaggagctgcggccgcattggaaacccgagcaagttcggaccaagcgcttcacggatggcatcaccaacaagctggtggcctgctatgtggaggaggacatgcaggactgcgtgctggtccgggtgtatggggagcggacggagctgctggtggaccgggagaatgaggtcagaaacttccagctgctgcgagcacacagctgtgcccccaaactctactgcaccttccagaatgggctgtgctatgagtacatgcagggtgtggccctggagcctgagcacatccgtgagccccggcttttcaggttaatcgccttagaaatggcaaagattcatactatccacgccaacggcagcctgcccaagcccatcctctggcacaagatgcacaattatttcacgcttgtgaagaacgagatcaaccccagcctttctgcagatgtccctaaggtagaggtgttggaacgggagctggcctggctgaaggagcatctgtcccagctggagtcccctgtggtgttttgtcacaatgacctgctctgcaagaatatcatctatgacagcatcaaaggtcacgtgcggttcattgactatgaatatgctggctacaactaccaagcttttgacattggcaaccatttcaatgagtttgcaggcgtgaatgaggtggattactgcctgtacccggcgcgggagacccagctgcagtggctgcactactacctgcaggcacaaaaggggatggccgtgacccccagggaggtgcaaaggctctacgtgcaagtcaacaagtttgccctgggtcctagctgtgtgtcttccacaatgactgcatccctccagtgctgtagagtcggaaacaggcatggggagattgccaggctgaccctctctggtctgtttccaggcgtctcacttcttctgggctctctgggccctcatccagaaccagtactccaccatcgactttgatttcctcaggtacgcagtgatccgattcaaccagtacttcaaggtgaagcctcaagcgtcagccttggagatgccaaagtgaccagccaccccatccctcccctacccatctgtctggccagacctgttctccagagctcaattctgcactctgggatccacacccttggacagggtgggagaggggacacatgggtgtccagggagaaggctctgtccctgccgccagaccccagtggttgccactgaagacctcattctcctgtctggaggggctgataggacccccttccgggggtccccttcaccccaccaggcttgggaggaagtgcctgcagccaggtcctgaaccataaccacccctgggaaacacatcattcccagcctcaggccctgctggaattggggctgccttatatgtgtgtttaccccttcctggcctggggaaggaggcggggagggctcctttctacctccagtgccctgagcctccagtccgtctccccctgcatgccccatgtgggaggtgctgagctccaaaccagcatcacaccaactctgacacatggatgtacctatcttggtgatgggtgggggccaagaattgagcatgacatcttccccagcagccacctcctctgagatccctcaccttctccaaaccagatccaatcaaacctcagcccgaggaaacatgctccccaacgtgctctcctgtgcttctgttttgtccccctgctggggggacaggagagggagtggtgaggccctgggcctccagagcctggctctgctttgtgctgtggcttagccggaggggacgtggccaagggtgaggtggccaaaaccagaaccagcagtctcctgccttgttccctccctggccctcaggccctccttccagggatgtctctccagctctactttatgtcctgaagctgacccgaggtcttcctatctggaatgactagagggagccaagaggatggggtgggggccagggccccccagggcctatcgtgggagagcctgggcaggatcccatcagaaaggtgctgactaaactggttgcccggacactcaacagcctccacctccctttctaccctcacagctcctggggccttcctggctctggcccagaaagtgattcatttgtaaattatcatggttttctttctgcattaaaatgctcatttccgga

SEQ ID NO: 112316 - DNA, 627 bp, Artificial Sequence
  derived and/or modified sequence
atggcaaaaattcacacaatccacgctaacggatcactgcccaagcctatcctttggcataagatgcacaattactttactcttgtcaagaacgaaattaatccatcactctctgcagatgtccccaaagtcgaggttttggagagagagctggcctggctgaaagaacatcttagtcagctggaatctccggtggtgttctgccataacgatctgctttgcaagaacattatatatgatagcataaagggacacgttagattcatcgattatgaatatgccggctacaattaccaggcgttcgacatcggaaaccatttcaatgaatttgccggggtaaacgaagtggactactgcctctacccggccagagaaacacagttgcaatggctccattattatcttcaggcgcagaaggggatggccgtgacccccagagaggtgcagcggctttatgtgcaggttaataagttcgctctcgcatctcacttcttttgggcactttgggccctgatccaaaatcaatattccacaatcgattttgacttcctcaggtatgctgtgattaggtttaaccagtacttcaaggtgaagccccaggccagtgctctggagatgccaaagtag

SEQ ID NO: 112317 - DNA, 627 bp, Artificial Sequence
  derived and/or modified sequence
atggccaagatccacaccatccacgccaacggcagcctgcccaagcccatcctgtggcacaagatgcacaactacttcaccctggtgaagaatgagatcaaccccagcctgtctgcagatgtgcccaaggtggaggtgctggagcgggagctggcctggctgaaggagcacctgagccagctggagagccctgtggtgttctgccacaatgacctgctgtgcaagaacatcatctatgacagcatcaagggccacgtgcgcttcattgattatgaatatgccggctacaactaccaggcctttgatattggcaaccacttcaatgaatttgctggggtgaatgaggtggactactgcctgtacccagcccgggagacccagctgcagtggctgcactactacctgcaggcccagaagggcatggctgtgaccccccgggaggtgcagaggctgtatgtgcaggtgaacaagtttgccctggccagccacttcttctgggccctgtgggccctgatccagaaccagtacagcaccatcgactttgacttcctgcgctatgctgtgatccgcttcaaccagtacttcaaggtgaagccccaggccagcgccctggagatgcccaagtag

SEQ ID NO: 112318 - DNA, 627 bp, Artificial Sequence
  derived and/or modified sequence
atggccaagatccacaccatccacgccaacggcagcctgcccaagcctatcctgtggcataaaatgcataactattttactctggtgaaaaatgaaataaatccctcactgagtgcagacgttccgaaggtggaggtccttgaacgcgagctggcctggctaaaggagcacttaagccagttggagtcacctgtcgtcttttgccataatgacctcctgtgtaaaaacatcatatatgactcaatcaagggtcatgttcgtttcatagattatgaatacgccgggtacaattatcaggccttcgacattggaaatcacttcaacgaatttgccggcgttaatgaagtggattattgtctatacccagcacgggagactcagcttcaatggctccattactacttgcaggcccagaaagggatggccgttacgccgcgcgaagtgcaacgtctgtacgtgcaggtgaataagtttgccctggcatcccacttcttttgggctttgtgggccctgattcaaaaccagtattctaccatagacttcgattttctgagatacgcggtgatccgcttcaaccagtatttcaaagttaagcctcaggccagcgcattagagatgccaaaatag

SEQ ID NO: 112319 - DNA, 627 bp, Artificial Sequence
  derived and/or modified sequence
atggcgaaaatccatactatccacgccaatgggtcactcccaaagcccatcctgtggcataagatgcacaactattttacgctggtaaaaaatgaaatcaacccctctttaagtgccgacgttccaaaggttgaagtgctggagcgtgagctcgcatggcttaaggagcatttgtctcaactcgagtcccccgttgtcttctgccacaacgatctcctatgtaaaaacattatttatgactccattaaaggccacgtccgcttcatagactacgagtacgctggatacaactaccaggcttttgatatcggtaaccattttaatgagtttgcaggcgtcaacgaagtggactattgcctctatcccgctagggagacacagctgcagtggttacactattacctccaagctcagaagggcatggcagtgacaccgagggaggtgcagcggttgtatgtgcaggttaataagttcgctttggcctcccacttcttctgggcactatgggcattgattcaaaatcaatactccaccattgacttcgattttttgcgctacgccgtgattcgcttcaaccaatatttcaaggtgaaacctcaagccagcgctcttgaaatgcccaagtag

SEQ ID NO: 112320 - DNA, 627 bp, Artificial Sequence
  derived and/or modified sequence
atggccaagatccacaccatccacgccaacggcagcctgcccaagcccatcctgtggcacaagatgcacaactacttcaccctggtgaagaacgagatcaaccccagcctgagcgccgacgtgcccaaggtggaggtgctggagagagagctggcctggctgaaggagcacctgagccagctggagagccccgtggtgttctgccacaacgacctgctgtgcaagaacatcatctacgacagcatcaagggccacgtgagattcatcgactacgagtacgccggctacaactaccaggccttcgacatcggcaaccacttcaacgagttcgccggcgtgaacgaggtggactactgcctgtaccccgccagagagacccagctgcagtggctgcactactacctgcaggcccagaagggcatggccgtgacccccagagaggtgcagagactgtacgtgcaggtgaacaagttcgccctggccagccacttcttctgggccctgtgggccctgatccagaaccagtacagcaccatcgacttcgacttcctgagatacgccgtgatcagattcaaccagtacttcaaggtgaagccccaggccagcgccctggagatgcccaagtag

SEQ ID NO: 112321 - protein, 317 aa, Artificial Sequence
  derived and/or modified sequence
MEEKAAASASCREPPGPPRAAAVAYFGISVDPDDILPGALRLIQELRPHWKPEQVRTKRFTDGITNKLVACYVEEDMQDCVLVRVYGERTELLVDRENEVRNFQLLRAHSCAPKLYCTFQNGLCYEYMQGVALEPEHIREPRLFSLSADVPKVEVLERELAWLKEHLSQLESPVVFCHNDLLCKNIIYDSIKGHVRFIDYEYAGYNYQAFDIGNHFNEFAGVNEVDYCLYPARETQLQWLHYYLQAQKGMAVTPREVQRLYVQVNKFALASHFFWALWALIQNQYSTIDFDFLRYAVIRFNQYFKVKPQASALEMPK

SEQ ID NO: 112322 - DNA, 954 bp, Artificial Sequence
  derived and/or modified sequence
atggaagaaaaggcagccgccagcgcttcatgtagggagcccccaggaccgcctcgggcagccgcagtggcctacttcgggatctcagtagaccccgatgacattctcccgggcgcattaaggctgatacaggagttgcggccccattggaagcctgagcaagtgcgtacaaaaaggttcaccgacggcatcactaacaagcttgtggcctgctatgttgaagaagacatgcaggattgcgtccttgtgcgggtctacggcgaacgcactgagctcctcgtagatagggaaaatgaggtgcgaaattttcagctacttcgggctcattcctgcgcaccaaaactatattgtacgttccagaacgggctttgttacgaatacatgcagggggtcgcactggaacccgagcatatacgggagcctcggctatttagcttatccgctgatgtccccaaagtggaggtgctcgagcgcgaactcgcctggctgaaggagcacctgtcgcagctcgagagccctgtggtattctgtcataatgacctgctctgcaaaaatatcatctatgattccatcaagggtcatgtgcgttttatcgactacgagtatgctgggtacaactaccaggccttcgacatcggcaatcatttcaacgaatttgctggggtgaacgaggtagattactgcctgtaccctgctcgagagacacagctgcagtggctgcactactatcttcaggctcaaaaagggatggcagtgacccctagggaagtccagagactttacgtgcaggtgaacaagttcgcgttggcctcccactttttttgggctctttgggccctcattcagaaccagtacagtacaatcgatttcgatttcctgcgatatgctgtgattagattcaaccagtacttcaaagtcaaaccacaggcctctgccctcgagatgccgaaatag

SEQ ID NO: 112323 - DNA, 954 bp, Artificial Sequence
  derived and/or modified sequence
atggaggagaaggccgccgccagcgccagctgccgggagcccccaggcccccccagggctgctgctgtggcctacttcggcatctctgtggaccctgatgacatcctgcccggggccctgcggctcatccaggagctgcggccccactggaagccagagcaggtgaggaccaagcgcttcacagatggcatcaccaacaagctggtggcctgctacgtggaggaggacatgcaggactgtgtgctggtgcgggtgtatggagagaggacagagctgctggtggacagagaaaatgaggtgaggaacttccagctgctgcgggcccacagctgtgcccccaagctgtactgcaccttccagaatggcctgtgctatgagtacatgcagggcgtggccctggagcctgagcacatccgggagcccaggctcttcagcctgtctgcagatgtgcccaaggtggaggtgctggagcgggagctggcctggctgaaggagcacctgagccagctggagagccctgtggtgttctgccacaatgacctgctgtgcaagaacatcatctatgacagcatcaagggccacgtgcgcttcatcgactatgaatatgccggctacaactaccaggcctttgacatcggcaaccacttcaatgaatttgctggggtgaatgaggtggactactgcctgtacccagcccgggagacccagctgcagtggctgcactactacctgcaggcccagaagggcatggctgtgaccccccgggaggtgcagaggctgtatgtgcaggtgaacaagtttgccctggccagccacttcttctgggccctgtgggccctgatccagaaccagtacagcaccatcgactttgacttcctgcgctatgctgtgatccgcttcaaccagtacttcaaggtgaagccccaggccagcgccctggagatgcccaagtag

SEQ ID NO: 112324 - DNA, 954 bp, Artificial Sequence
  derived and/or modified sequence
atggaggagaaggccgccgccagcgccagctgccgggagccccccgggcctccccgggctgctgccgttgcgtactttggcatctcagtggacccagatgatatattgcctggagcactgcgactgatccaggaattgcgacctcactggaaaccagagcaggtgagaactaagcgcttcactgatggaattaccaataagcttgtggcctgctacgtcgaagaagacatgcaggattgtgttttggtgagggtgtacggtgaacggaccgagctactagtagatcgcgagaatgaggtcaggaacttccagctgctaagggctcattcatgcgctcccaaactgtactgtaccttccagaatgggctgtgttatgaatacatgcagggagtggcactggaacctgagcacattcgcgaaccgagactgttctcacttagtgctgatgtccccaaggttgaagtgctggagcgggagctggcatggctgaaggaacatttatcccaactggagagcccagtggtcttctgtcacaatgatctgctctgcaagaacataatctatgacagtattaagggccatgttagattcatagattacgaatacgccggctacaattaccaggcatttgatatcggtaatcactttaacgagttcgcaggtgtcaatgaggttgactattgtctgtacccagctcgcgagacacagttacagtggcttcattactacctccaggctcagaagggcatggccgttactccacgtgaagtccagcggctctacgttcaggtgaacaagttcgccctggcaagtcacttcttctgggctctgtgggctctcatccagaatcagtactccaccatcgatttcgattttctgcgctacgcagtgatccgctttaaccagtactttaaggtgaaacctcaggcctcagcactcgagatgcccaaatag

SEQ ID NO: 112325 - DNA, 954 bp, Artificial Sequence
  derived and/or modified sequence
atggaggagaaagccgcagcttctgccagctgtagggaaccccctggtcccccacgggctgccgcagtggcctatttcgggatctcagtcgatcccgacgatatcttacctggtgccctgcgactgattcaagaactgcggccacattggaagcctgagcaagtccgcactaagcgctttacggatggtattacaaacaagttagtcgcctgttacgttgaagaggacatgcaagactgcgtgctggtgagagtgtacggagagaggactgagttgctggtagacagagaaaacgaggtacggaattttcaactactccgagcccatagctgcgcacccaaactctactgcacctttcaaaacggcctctgttacgaatacatgcaaggcgtagctctcgaacctgagcatataagagaaccacggcttttctcgctgtccgccgacgtgccaaaggtggaagtactggaacgcgagctggcttggttgaaggagcacctgtcccaactcgagtcaccggtggtgttctgtcacaatgaccttttatgtaagaacatcatctatgacagtattaaaggacatgtgcgttttattgactacgagtatgctggttacaattatcaggcatttgacataggaaatcactttaacgaatttgccggtgtgaacgaggtggattattgcttatatccagccagagagacacagttgcagtggctgcactactacctacaggcccagaaaggcatggcggtgaccccacgcgaggtccaaagactctacgtccaggttaacaaatttgccctggcatcccattttttttgggctctttgggcacttattcagaatcagtattccactatcgattttgactttctccgatacgctgtcatcaggttcaatcagtacttcaaagtcaagccccaggcaagtgccctggaaatgcctaaatag

SEQ ID NO: 112326 - DNA, 954 bp, Artificial Sequence
  derived and/or modified sequence
atggaggagaaggccgccgccagcgccagctgcagagagccccccggcccccccagagccgccgccgtggcctacttcggcatcagcgtggaccccgacgacatcctgcccggcgccctgagactgatccaggagctgagaccccactggaagcccgagcaggtgagaaccaagagattcaccgacggcatcaccaacaagctggtggcctgctacgtggaggaggacatgcaggactgcgtgctggtgagagtgtacggcgagagaaccgagctgctggtggacagagagaacgaggtgagaaacttccagctgctgagagcccacagctgcgcccccaagctgtactgcaccttccagaacggcctgtgctacgagtacatgcagggcgtggccctggagcccgagcacatcagagagcccagactgttcagcctgagcgccgacgtgcccaaggtggaggtgctggagagagagctggcctggctgaaggagcacctgagccagctggagagccccgtggtgttctgccacaacgacctgctgtgcaagaacatcatctacgacagcatcaagggccacgtgagattcatcgactacgagtacgccggctacaactaccaggccttcgacatcggcaaccacttcaacgagttcgccggcgtgaacgaggtggactactgcctgtaccccgccagagagacccagctgcagtggctgcactactacctgcaggcccagaagggcatggccgtgacccccagagaggtgcagagactgtacgtgcaggtgaacaagttcgccctggccagccacttcttctgggccctgtgggccctgatccagaaccagtacagcaccatcgacttcgacttcctgagatacgccgtgatcagattcaaccagtacttcaaggtgaagccccaggccagcgccctggagatgcccaagtag

SEQ ID NO: 112327 - DNA, 2486 bp, Artificial Sequence
  derived and/or modified sequence
ggcgtcgcccccaccccgcgctccaggtagcggcggcctcagctgccggcggtggctggctgagctccccagcggcccgcgggccggggcgggggcgggccgggggcgttcccgcgggccaccgcccgtgatgtcacaatcgcggcgggccgcggcgctccggggtcggcggtgggcggcgggccgcgagccggcgatcgaagcgggcagctcgcgcctgagtcatggacttcccctggcccctcctctaccactcccactccctcgccggacccccccgccggggctagcgtctgccgcggctccgagggggtggggctgctgggaatggctgtgcccccttcggcccctcagccgcgcgcgtcctttcacctgaggaggcacacgccttgcccgcagtgctcatggggcatggaggagaaggcggcggccagcgccagctgccgggagccgccgggccccccgagggccgccgccgtcgcgtacttcggcatttccgtggacccggacgacatccttcccggggccctgcgcctcatccaggagctgcggccgcattggaaacccgagcaagttcggaccaagcgcttcacggatggcatcaccaacaagctggtggcctgctatgtggaggaggacatgcaggactgcgtgctggtccgggtgtatggggagcggacggagctgctggtggaccgggagaatgaggtcagaaacttccagctgctgcgagcacacagctgtgcccccaaactctactgcaccttccagaatgggctgtgctatgagtacatgcagggtgtggccctggagcctgagcacatccgtgagccccggcttttcagcctttctgcagatgtccctaaggtagaggtgttggaacgggagctggcctggctgaaggagcatctgtcccagctggagtcccctgtggtgttttgtcacaatgacctgctctgcaagaatatcatctatgacagcatcaaaggtcacgtgcggttcattgactatgaatatgctggctacaactaccaagcttttgacattggcaaccatttcaatgagtttgcaggcgtgaatgaggtggattactgcctgtacccggcgcgggagacccagctgcagtggctgcactactacctgcaggcacaaaaggggatggccgtgacccccagggaggtgcaaaggctctacgtgcaagtcaacaagtttgccctggcgtctcacttcttctgggctctctgggccctcatccagaaccagtactccaccatcgactttgatttcctcaggtacgcagtgatccgattcaaccagtacttcaaggtgaagcctcaagcgtcagccttggagatgccaaagtgaccagccaccccatccctcccctacccatctgtctggccagacctgttctccagagctcaattctgcactctgggatccacacccttggacagggtgggagaggggacacatgggtgtccagggagaaggctctgtccctgccgccagaccccagtggttgccactgaagacctcattctcctgtctggaggggctgataggacccccttccgggggtccccttcaccccaccaggcttgggaggaagtgcctgcagccaggtcctgaaccataaccacccctgggaaacacatcattcccagcctcaggccctgctggaattggggctgccttatatgtgtgtttaccccttcctggcctggggaaggaggcggggagggctcctttctacctccagtgccctgagcctccagtccgtctccccctgcatgccccatgtgggaggtgctgagctccaaaccagcatcacaccaactctgacacatggatgtacctatcttggtgatgggtgggggccaagaattgagcatgacatcttccccagcagccacctcctctgagatccctcaccttctccaaaccagatccaatcaaacctcagcccgaggaaacatgctccccaacgtgctctcctgtgcttctgttttgtccccctgctggggggacaggagagggagtggtgaggccctgggcctccagagcctggctctgctttgtgctgtggcttagccggaggggacgtggccaagggtgaggtggccaaaaccagaaccagcagtctcctgccttgttccctccctggccctcaggccctccttccagggatgtctctccagctctactttatgtcctgaagctgacccgaggtcttcctatctggaatgactagagggagccaagaggatggggtgggggccagggccccccagggcctatcgtgggagagcctgggcaggatcccatcagaaaggtgctgactaaactggttgcccggacactcaacagcctccacctccctttctaccctcacagctcctggggccttcctggctctggcccagaaagtgattcatttgtaaattatcatggttttctttctgcattaaaatgctcatttccgg

SEQ ID NO: 112328 - protein, 533 aa, Artificial Sequence
  derived and/or modified sequence
MDRKVAREFRHKVDFLIENDAEKDYLYDVLRMYHQTMDVAVLVGDLKLVINEPSRLPLFDAIRPLIPLKHQVEYDQLTPRRSRKLKEVRLDRLHPEGLGLSVRGGLEFGCGLFISHLIKGGQADSVGLQVGDEIVRINGYSISSCTHEEVINLIRTKKTVSIKVRHIGLIPVKSSPDEPLTWQYVDQFVSESGGVRGSLGSPGNRENKEKKVFISLVGSRGLGCSISSGPIQKPGIFISHVKPGSLSAEVGLEIGDQIVEVNGVDFSNLDHKEGRELFMTDRERLAEARQRELQRQELLMQKRLAMESNKILQEQQEMERQRRKEIAQKAAEENERYRKEMEQIVEEEEKFKKQWEEDWGSKEQLLLPKTITAEVHPVPLRKPKYDQGVEPELEPADDLDGGTEEQGEQDFRKYEEGFDPYSMFTPEQIMGKDVRLLRIKKEGSLDLALEGGVDSPIGKVVVSAVYERGAAERHGGIVKGDEIMAINGKIVTDYTLAEAEAALQKAWNQGGDWIDLVVAVCPPKEYDDELTFF

SEQ ID NO: 112329 - DNA, 1602 bp, Artificial Sequence
  derived and/or modified sequence
atggacagaaaggtggccagagagttcagacacaaggtggacttcctgatcgagaacgacgccgagaaggactacctgtacgacgtgctgagaatgtaccaccagaccatggacgtggccgtgctggtgggcgacctgaagctggtgatcaacgagcccagcagactgcccctgttcgacgccatcagacccctgatccccctgaagcaccaggtggagtacgaccagctgacccccagaagaagcagaaagctgaaggaggtgagactggacagactgcaccccgagggcctgggcctgagcgtgagaggcggcctggagttcggctgcggcctgttcatcagccacctgatcaagggcggccaggccgacagcgtgggcctgcaggtgggcgacgagatcgtgagaatcaacggctacagcatcagcagctgcacccacgaggaggtgatcaacctgatcagaaccaagaagaccgtgagcatcaaggtgagacacatcggcctgatccccgtgaagagcagccccgacgagcccctgacctggcagtacgtggaccagttcgtgagcgagagcggcggcgtgagaggcagcctgggcagccccggcaacagagagaacaaggagaagaaggtgttcatcagcctggtgggcagcagaggcctgggctgcagcatcagcagcggccccatccagaagcccggcatcttcatcagccacgtgaagcccggcagcctgagcgccgaggtgggcctggagatcggcgaccagatcgtggaggtgaacggcgtggacttcagcaacctggaccacaaggagggcagagagctgttcatgaccgacagagagagactggccgaggccagacagagagagctgcagagacaggagctgctgatgcagaagagactggccatggagagcaacaagatcctgcaggagcagcaggagatggagagacagagaagaaaggagatcgcccagaaggccgccgaggagaacgagagatacagaaaggagatggagcagatcgtggaggaggaggagaagttcaagaagcagtgggaggaggactggggcagcaaggagcagctgctgctgcccaagaccatcaccgccgaggtgcaccccgtgcccctgagaaagcccaagtacgaccagggcgtggagcccgagctggagcccgccgacgacctggacggcggcaccgaggagcagggcgagcaggacttcagaaagtacgaggagggcttcgacccctacagcatgttcacccccgagcagatcatgggcaaggacgtgagactgctgagaatcaagaaggagggcagcctggacctggccctggagggcggcgtggacagccccatcggcaaggtggtggtgagcgccgtgtacgagagaggcgccgccgagagacacggcggcatcgtgaagggcgacgagatcatggccatcaacggcaagatcgtgaccgactacaccctggccgaggccgaggccgccctgcagaaggcctggaaccagggcggcgactggatcgacctggtggtggccgtgtgcccccccaaggagtacgacgacgagctgaccttcttctag

SEQ ID NO: 112330 - DNA, 1602 bp, Artificial Sequence
  derived and/or modified sequence
atggaccggaaggtggcacgcgaattccgccacaaggtcgacttcctgatcgagaacgatgcagaaaaggattatctttatgacgtactgcggatgtatcaccaaaccatggatgttgccgttctcgtcggagatctgaagctcgtgatcaacgagcccagcagactgccattgtttgatgccattcggccactgattccactgaagcatcaagtggaatacgaccaactgacaccgcggaggagcaggaagctgaaagaggtccgactggatcgcttgcatcctgaggggcttggacttagcgtgagaggcggactggaattcgggtgcggcctgttcataagccatttgatcaaaggaggacaagccgatagcgtggggctccaagtcggtgacgagattgtacgcatcaacggatatagcatctcgagctgtacgcacgaggaagtcatcaacctgataaggacgaaaaaaactgtctcgattaaggtgagacacatcggacttatccccgttaaaagtagccccgatgaaccattaacatggcagtatgttgaccagtttgtttctgagtcagggggggtccgcggtagcctgggttctcctggaaaccgagaaaataaagagaaaaaggtgttcatttccctggtggggagcaggggccttggttgttctattagctccggcccgattcaaaagccaggcatcttcatcagtcacgtaaaacccgggtccctcagcgctgaggtggggcttgagataggggatcagatcgttgaggtcaatggagtggacttcagcaatctcgaccacaaggagggacgcgagctgtttatgacggaccgggagcgcctggccgaagccaggcagagggagctccaaagacaggagttgcttatgcagaagcggctggcaatggagagcaataagatattacaggaacagcaggaaatggaacgacagagacgtaaggagatcgcccagaaagcagccgaggagaacgagaggtataggaaggagatggagcagattgtggaggaagaagagaagttcaagaaacagtgggaggaggattggggttctaaggaacagttgcttttgcctaagactattaccgccgaggtccatccagtgccgttaagaaagcccaagtacgatcagggtgtcgagcctgaactggagccggctgatgatctagatggaggaaccgaagaacagggggaacaagattttcgcaagtatgaggaagggttcgatccctatagcatgttcacgcccgagcagatcatgggaaaggacgtgaggctgctgcggataaagaaggaggggtcactggatctggccttggagggcggagtggactcccctatcgggaaagtggtagtgtccgcggtctacgaaaggggtgcggccgaacggcacggcggcattgtgaagggagatgagataatggccattaacggcaaaattgtgaccgattacactttggccgaggcagaggccgccctgcagaaggcctggaatcaaggcggcgactggatcgacttagtggtggcagtgtgccccccaaaagagtacgacgatgaacttacctttttctag

SEQ ID NO: 112331 - DNA, 1602 bp, Artificial Sequence
  derived and/or modified sequence
atggacaggaaggtggcccgggagttccgccacaaggtggacttcctgattgaaaatgatgctgagaaggactacctgtatgatgtgctgaggatgtaccaccagaccatggatgtggccgtgctggtgggggacctgaagctggtgatcaatgagcccagccggctgcccctgtttgatgccatccggcccctcatccccctgaagcaccaggtggagtatgaccagctgaccccccggcgcagcaggaagctgaaggaggtgcggctggaccggctgcaccctgagggcctgggcctgtctgtgcggggcggcctggagtttggctgcggcctcttcatcagccacctgatcaagggcggccaggccgacagcgtgggcctgcaggtgggagatgagatcgtgcgcatcaatggctacagcatcagcagctgcacccatgaggaggtgatcaacctgatccgcaccaagaagacagtgtccatcaaggtgcgccacatcggcctcatccctgtgaagagcagcccagatgagcccctgacctggcagtatgtggaccagtttgtgtctgagagcggcggcgtgcggggcagcctgggcagccctggcaaccgggagaacaaggagaagaaggtgttcatcagcctggtgggcagccggggcctgggctgcagcatcagcagcggccccatccagaagccaggcatcttcatcagccacgtgaagccaggcagcctgtctgctgaggtgggcctggagatcggggaccagatcgtggaggtgaatggagtggacttcagcaacctggaccacaaggagggccgggagctgttcatgacagaccgggagcggctggccgaggcccggcagcgggagctgcagaggcaggagctgctgatgcagaagaggctggccatggagagcaacaagatcctgcaggagcagcaggagatggagcggcagaggaggaaggagatcgcccagaaggctgctgaagaaaatgaaagatacaggaaggagatggagcagatcgtggaggaggaggagaagttcaagaagcagtgggaggaggactggggcagcaaggagcagctgctgctgcccaagaccatcacagctgaggtgcaccctgtgcccctgaggaagcccaagtatgaccagggcgtggagcctgagctggagccagcagatgacctggatggcggcacagaggagcagggcgagcaggacttcagaaaatatgaggagggctttgacccctacagcatgttcaccccagagcagatcatgggcaaggatgtgcggctgctgcgcatcaagaaggagggcagcctggacctggccctggagggcggcgtggacagccccatcggcaaggtggtggtgtctgctgtgtatgaaagaggagctgctgagcggcacggcggcatcgtgaagggagatgagatcatggccatcaatggcaagatcgtgacagactacaccctggccgaggccgaggccgccctgcagaaggcctggaaccagggcggggactggattgacctggtggtggccgtgtgcccccccaaggagtatgatgatgagctgaccttcttctag

SEQ ID NO: 112332 - DNA, 1602 bp, Artificial Sequence
  derived and/or modified sequence
atggaccggaaggtggcccgggagttccggcacaaggtggacttcctcatcgagaatgacgccgaaaaagattacctgtacgacgtgctgcgaatgtatcatcagacaatggatgtcgccgtattggtcggcgacctcaagctggtcattaacgagcccagtagactgccattgtttgacgctatcaggcctctcattcctctgaagcaccaggtcgaatatgaccaattaacgcccaggaggagccggaaattaaaagaggttagactcgaccgacttcacccggaagggttgggcctgtctgtccgaggggggctggagttcggctgcgggctgttcatctcccatctgatcaaaggcggacaagccgatagtgtggggctgcaagtgggtgacgaaatcgtccgtataaacggatatagtatctcttcctgcactcacgaagaggttattaacctgatacggactaaaaaaaccgtcagtatcaaagtgagacatataggccttatcccagtgaaaagttcaccggatgagcctctgacttggcagtatgtagatcagtttgtctctgaaagtggcggcgttaggggcagtctgggatccccgggcaacagggagaacaaagagaagaaggttttcataagccttgttggaagtcgggggttgggatgttcgatttcttccggccctattcagaagcccggcattttcatctcacatgttaagcctggaagtctgagcgcggaggtggggctggaaattggggaccaaatcgtagaagtgaatggagtagattttagcaatctggatcacaaagagggacgagagctatttatgaccgatagagaacgcctggccgaggctcgacagcgcgagctgcagagacaggaactgctaatgcaaaagagactagccatggagtcgaacaaaatcctccaggagcagcaagaaatggagagacagaggcgcaaggaaattgcccagaaggctgcagaagaaaacgaaagataccgcaaggagatggagcagatagtggaagaggaagagaaattcaagaagcagtgggaggaggattgggggtccaaggagcaattgctgctacccaagacaataaccgctgaggtacacccagttccactgcggaaaccaaagtacgatcaaggagtggaacccgagctagaacccgctgatgacctggatggtggtacagaagaacagggtgagcaagatttcagaaagtatgaggagggattcgacccttatagcatgttcacacccgagcagattatgggcaaagatgtgcggctactgaggataaagaaggagggtagcttggatcttgccttggaaggcggtgtcgacagccctattggcaaggttgttgtgagtgctgtatacgaaaggggtgccgctgagcggcatggaggcattgtcaaaggcgatgaaatcatggccatcaacggaaaaatcgtcacagactacacgctggccgaagcagaggctgcgctacagaaggcctggaatcagggaggggattggatcgatctggtggtggctgtgtgcccccccaaggagtatgatgatgaactgacctttttttag

SEQ ID NO: 112333 - DNA, 1602 bp, Artificial Sequence
  derived and/or modified sequence
atggatcgaaaggtggccagggagttcagacacaaggttgactttctgatagaaaacgatgctgagaaagattatctttacgacgtcctgaggatgtatcaccagacaatggatgttgcagtcttggtaggggatttaaagttggtcatcaacgaaccctcacgtctccccctctttgatgccatacgacccctcattccactgaagcaccaggtggagtacgaccagctgactccgcgacggtcccgaaagctcaaagaagtcaggttggatcggttgcatcccgaaggccttggactcagcgtacgtgggggacttgagttcggatgtgggctgtttatctcccacctcatcaagggcggacaggcagattctgtgggacttcaggtaggcgatgagatcgtccggatcaatgggtactctattagctcgtgcactcacgaggaggtaattaatctgatacgaaccaaaaagaccgtgtccatcaaagttcgccatataggcctcattcccgtgaagtctagtccagacgagcccctgacatggcaatatgtagatcagtttgtgtctgaatccggcggtgtgagaggatccctcgggagcccgggtaacagggaaaataaggagaagaaagtctttatcagcctcgtgggctcccgcggactcggttgttcaatcagttccggccctatccagaagcccggtatctttatctcccatgttaaacctggctccttatctgccgaggtagggcttgaaattggtgaccagattgtggaggtcaatggagtcgacttcagtaacctggatcataaagaaggccgtgaactgttcatgaccgatagggagcggttggcggaggcacgccaacgggaactgcagcgacaggagttattaatgcagaaaagattggccatggaatccaacaagattcttcaggagcagcaggagatggaacggcagaggcgcaaagaaatagcacagaaagccgcagaggagaatgaaagataccgcaaagagatggaacagatagtggaagaggaagagaagttcaagaaacagtgggaggaggattggggctcgaaagaacagttgctgttgcccaagacaataaccgcagaggtgcatccagtacccctacgcaaaccaaaatacgatcagggtgttgagcccgaactggaacccgctgacgacctcgacggcggaaccgaggaacagggagagcaggattttcggaaatatgaagaaggctttgatccttactctatgtttacacctgaacaaatcatgggcaaggacgttagactgctgcggattaagaaagagggctccctggaccttgctctggagggcggagtcgatagcccaattggtaaagtggtcgtgtctgccgtgtacgaacggggagcagccgagcgtcatggaggcattgtgaagggcgacgagatcatggccatcaacggaaagatcgtcacagactacacacttgcagaggctgaggctgccttacagaaggcctggaatcaaggcggtgattggattgacctggttgtggccgtgtgtccacccaaagagtatgatgatgaacttacattcttttag

SEQ ID NO: 112334 - DNA, 2159 bp, Artificial Sequence
  derived and/or modified sequence
ggcccggtcgcggtcgcggctctttccagctcctggcagccgggcacccgaaggaacgggtcgtgcaacgacgcagctggacctggcccagccatggaccgaaaagtggcccgagaattccggcataaggtggattttctgattgaaaatgatgcagagaaggactatctctatgatgtgctgcgaatgtaccaccagaccatggacgtggccgtgctcgtgggagacctgaagctggtcatcaatgaacccagccgtctgcctctgtttgatgccattcggccgctgatcccactgaagcaccaggtggaatatgatcagctgaccccccggcgctccaggaagctgaaggaggtgcgtctggaccgtctgcaccccgaaggcctcggcctgagtgtgcgtggtggcctggagtttggctgtgggctcttcatctcccacctcatcaaaggcggtcaggcagacagcgtcgggctccaggtaggggacgagatcgtccggatcaatggatattccatctcctcctgtacccatgaggaggtcatcaacctcattcgaaccaagaaaactgtgtccatcaaagtgagacacatcggcctgatccccgtgaaaagctctcctgatgagcccctcacttggcagtatgtggatcagtttgtgtcggaatctgggggcgtgcgaggcagcctgggctcccctggaaatcgggaaaacaaggagaagaaggtcttcatcagcctggtaggctcccgaggccttggctgcagcatttccagcggccccatccagaagcctggcatctttatcagccatgtgaaacctggctccctgtctgctgaggtgggattggagataggggaccagattgtcgaagtcaatggcgtcgacttctctaacctggatcacaaggagggccgggagctgttcatgacagaccgggagcggctggcagaggcgcggcagcgtgagctgcagcggcaggagcttctcatgcagaagcggctggcgatggagtccaacaagatcctccaggagcagcaggagatggagcggcaaaggagaaaagaaattgcccagaaggcagcagaggaaaatgagagataccggaaggagatggaacagattgtagaggaggaagagaagtttaagaagcaatgggaagaagactggggctcaaaggaacagctactcttgcctaaaaccatcactgctgaggtacacccagtaccccttcgcaagccaaagtatgatcagggagtggaacctgagctcgagcccgcagatgacctggatggaggcacggaggagcagggagagcaggatttccggaaatatgaggaaggctttgacccctactctatgttcaccccagagcagatcatggggaaggatgtccggctcctacgcatcaagaaggagggatccttagacctggccctggaaggcggtgtggactcccccattgggaaggtggtcgtttctgctgtgtatgagcggggagctgctgagcggcatggtggcattgtgaaaggggacgagatcatggcaatcaacggcaagattgtgacagactacaccctggctgaggctgaggctgccctgcagaaggcctggaatcagggcggggactggatcgaccttgtggttgccgtctgccccccaaaggagtatgacgatgagctgaccttcttctgaagtccaaaaggggaaaccaaattcaccgttaggaaacagtgagctccggccccacctcgtgaacacaaagcctcggatcagccttgagagaggccacactacacacaccagatggcatccttgggacctgaatctatcacccaggaatctcaaactccctttggccctgaaccagggccagataaggaacagctcgggccactcttctgaaggccaacgtggaggaaagggagcagccagccatttgggagaagatctcaaggatccagactctcattcctttcctctggcccagtgaatttggtctctcccagctctgggggactccttccttgaaccctaataagaccccactggagtctctctctctccatccctctcctctgccctctgctctaattgctgccaggattgtcactccaaaccttactctgagctcattaataaaatagatttattttcca

SEQ ID NO: 112335 - protein, 215 aa, Artificial Sequence
  derived and/or modified sequence
MEFDCEGLRRLLGKYKFRDLTVEELRNVNVFFPHFKYSMDTYVFKDSSQKDLLNFTGTIPVMYQGNTYNIPIRFWILDSHPFAPPICFLKPTANMGILVGKHVDAQGRIYLPYLQNWSHPKSVIVGLIKEMIAKFQEELPMYSLSSSDEARQVDLLAYIAKITEGVSDTNSKSWANHENKTVNKITVVGGGELGIACTLAISAKVESRSVTQAGV

SEQ ID NO: 112336 - DNA, 648 bp, Artificial Sequence
  derived and/or modified sequence
atggagttcgactgcgagggcctgagaagactgctgggcaagtacaagttcagagacctgaccgtggaggagctgagaaacgtgaacgtgttcttcccccacttcaagtacagcatggacacctacgtgttcaaggacagcagccagaaggacctgctgaacttcaccggcaccatccccgtgatgtaccagggcaacacctacaacatccccatcagattctggatcctggacagccaccccttcgccccccccatctgcttcctgaagcccaccgccaacatgggcatcctggtgggcaagcacgtggacgcccagggcagaatctacctgccctacctgcagaactggagccaccccaagagcgtgatcgtgggcctgatcaaggagatgatcgccaagttccaggaggagctgcccatgtacagcctgagcagcagcgacgaggccagacaggtggacctgctggcctacatcgccaagatcaccgagggcgtgagcgacaccaacagcaagagctgggccaaccacgagaacaagaccgtgaacaagatcaccgtggtgggcggcggcgagctgggcatcgcctgcaccctggccatcagcgccaaggtggagagcagaagcgtgacccaggccggcgtgtag

SEQ ID NO: 112337 - DNA, 648 bp, Artificial Sequence
  derived and/or modified sequence
atggaatttgactgcgaggggctgcgcagattgctgggaaagtacaaattccgggacctgactgtggaggaattgcgaaatgtaaacgttttcttcccacatttcaagtacagcatggacacatacgtgttcaaagattcctctcagaaggatctcctgaattttacaggaactatcccagtgatgtatcaaggaaatacctataatatcccaattcgattctggatactagattcacacccctttgctccaccaatctgctttctcaaaccgaccgccaatatggggattctggtgggcaagcatgtagatgcccaggggcggatttacttgccctacctgcagaattggtcacatcccaagtccgttatcgtgggcctgattaaggagatgattgctaaatttcaggaagagctacctatgtactccctttcctcttccgacgaagcaaggcaggtggacctgttggcttacattgccaaaattacagaaggagtgtccgatacgaatagcaaatcctgggcaaaccacgagaacaagaccgtgaataagatcacagtagtgggcggcggcgagctcggtatcgcttgcactttggccatctctgccaaggtcgagagccgcagcgtcacccaggcaggagtatag

SEQ ID NO: 112338 - DNA, 648 bp, Artificial Sequence
  derived and/or modified sequence
atggagtttgactgtgagggcctgcggcggctgctgggcaagtacaagttccgggacctgactgtggaggagctgagaaatgtgaatgtgttcttcccccacttcaagtacagcatggacacctacgtgttcaaggacagcagccagaaggacctgctgaacttcaccggcaccatccctgtgatgtaccagggcaacacctacaacatccccatccgcttctggatcctggacagccacccctttgccccacccatctgcttcctgaagcccacagccaacatgggcatcctggtgggcaagcacgtggatgcccagggccgcatctacctgccctacctgcagaactggagccaccccaagagcgtcatcgtgggcctcatcaaggagatgattgccaagttccaggaggagctgcccatgtacagcctgagcagcagtgatgaggcccggcaggtggacctgctggcctacatcgccaagatcacagaaggagtgtctgacaccaacagcaagtcctgggccaaccacgagaacaagacagtgaacaagatcaccgtggtgggcggcggggagctgggcatcgcctgcaccctggccatcagcgccaaggtggagagccgctctgtgacccaggccggcgtgtag

SEQ ID NO: 112339 - DNA, 648 bp, Artificial Sequence
  derived and/or modified sequence
atggagttcgactgcgagggcctgcggcggctgctgggcaagtacaagttccgcgatctcaccgtcgaagaacttcgaaacgtgaacgtctttttccctcattttaaatactcgatggatacttacgtgtttaaagatagctctcagaaggacttgctgaatttcaccggcactatccccgtgatgtaccaaggaaacacttataatatcccgatcaggttctggatacttgactcacatccttttgctccaccgatttgcttcctaaagccaactgcaaacatgggcatcctggtggggaagcacgtcgacgcacaaggacgcatctatctgccctatttacagaattggtctcaccccaaaagcgtgatagtaggcctcatcaaagagatgatagcgaaatttcaagaagagctaccaatgtacagtttgagcagttccgatgaggccaggcaggtcgacctgctggcttacatcgccaaaataacagagggggttagcgataccaatagcaaaagctgggccaatcacgagaataagactgtgaataagattaccgtggtgggtggcggggaactcgggatcgcctgtacgctggctatcagcgccaaagtggagtccagaagcgttacacaggcgggggtctag

SEQ ID NO: 112340 - DNA, 648 bp, Artificial Sequence
  derived and/or modified sequence
atggaattcgactgcgaaggtctgcgccgtctcctgggtaagtataagtttcgggacttaactgtggaggaactcaggaacgtgaacgttttctttcctcatttcaagtacagcatggacacctatgtctttaaggactcatcccagaaagacctgttaaactttactggcaccatacctgtgatgtatcaaggaaatacctataacattcctatccggttttggattctcgattcccacccctttgcaccacccatttgtttcctgaagccgacagctaatatgggaatactcgtaggcaagcatgtcgatgcccaagggcgtatttacctgccctacctacagaactggtcccatcctaagtctgttatcgtggggttgatcaaagaaatgatcgccaagtttcaagaggagctgcctatgtactctctgtcctctagtgatgaggcccgtcaagtagacttgttagcatacattgctaagataaccgaaggcgtatccgatactaatagtaagtcatgggccaaccacgagaataagacagtgaataaaattactgtcgtcggagggggtgagctgggtatcgcctgtacactcgccatctccgccaaggttgagagccggtccgtgacccaggcaggtgtgtag

SEQ ID NO: 112341 - DNA, 995 bp, Artificial Sequence
  derived and/or modified sequence
gggacctagctcgggaccggcctggagatggagttcgactgcgagggcctgagacggctgcttggcaagtacaagttcagggacctaactgtggaagaactaaggaatgtaaatgtatttttcccacatttcaaatattccatggacacctatgtttttaaagatagttctcagaaagacctgctgaattttactggcacaattcctgtgatgtatcagggtaatacatataacataccaattcgtttctggattttggattctcaccctttcgctccccctatttgcttcttgaagccaactgcaaatatgggaatcttagtcggaaaacatgtggatgctcaaggcagaatatatttgccctatctccaaaactggagccatcctaaatctgtcattgttggattaattaaagaaatgattgccaagtttcaagaggaacttcccatgtattctctatcatcatctgatgaggcacggcaggtagacttgctagcctatattgcaaaaatcactgaaggtgtttcagatacaaattcaaagagctgggcaaatcatgagaataaaacagtcaataaaattactgtggttggaggtggagaactcggtattgcctgcacattagcaatttcagcaaaggtggagtctcgctctgttacccaggctggagtgtagtggtacaatcttggctcactacagcctccgcctcctgggttcaagcgattctcctgcctcagcctccagagtagctgggactacaggcatgcgccacgacgcccagctaatttttgtatttttagcagagacagggttttgccatgttggccaggctggtctcgaacttctgacctcaagtgatccacctgccctggcctcccaaagtgctgggattacaagtgtgagccaccgtacctggcctgctattacctcttaattagaatttgagttgtattcagtcttttgtcactaaataaatgcttctataaacatttcaa

SEQ ID NO: 112342 - protein, 1518 aa, Artificial Sequence
  derived and/or modified sequence
MSLSEGDALLALWRVERKQLKNIITVVIKCSLEIHGLFETQEWEEGLDIRVKIGLAAGHISMLVFGDETHSHFLVIGQAVDDVRLAQNMAQMNDVILSPNCWQLCDRSMIEIESVPDQRAVKVNFLKPPPNFNFDEFFTKCTTFMHYYPSGEHKNLLRLACTLKPDPELEMSLQKYVMESILKQIDNKQLQGYLSELRPVTIVFVNLMFEDQDKAEEIGPAIQDAYMHITSVLKIFQGQINKVFMFDKGCSFLCVFGFPGEKVPDELTHALECAMDIFDFCSQVHKIQTVSIGVASGIVFCGIVGHTVRHEYTVIGQKVNLAARMMMYYPGIVTCDSVTYNGSNLPAYFFKELPKKVMKGVADSGPLYQYWGRTEKVMFGMACLICNRKEDYPLLGRNKEINYFMYTMKKFLISNSSQVLMYEGLPGYGKSQILMKIEYLAQGKNHRIIAISLNKISFHQTFYTIQMFMANVLGLDTCKHYKERQTNLRNKVMTLLDEKFYCLLNDIFHVQFPISREISRMSTLKKQKQLEILFMKILKLIVKEERIIFIIDEAQFVDSTSWRFMEKLIRTLPIFIIMSLCPFVNIPCAAARAVIKNRNTTYIVIGAVQPNDISNKICLDLNVSCISKELDSYLGEGSCGIPFYCEELLKNLEHHEVLVFQQTESEEKTNRTWNNLFKYSIKLTEKLNMVTLHSDKESEEVCHLTSGVRLKNLSPPTSLKEISLIQLDSMRLSHQMLVRCAAIIGLTFTTELLFEILPCWNMKMMIKTLATLVESNIFYCFRNGKELQKALKQNDPSFEVHYRSLSLKPSEGMDHGEEEQLRELENEVIECHRIRFCNPMMQKTAYELWLKDQRKAMHLKCARFLEEDAHRCDHCRGRDFIPYHHFTVNIRLNALDMDAIKKMAMSHGFKTEEKLILSNSEIPETSAFFPENRSPEEIREKILNFFDHVLTKMKTSDEDIIPLESCQCEEILEIVILPLAHHFLALGENDKALYYFLEIASAYLIFCDNYMAYMYLNEGQKLLKTLKKDKSWSQTFESATFYSLKGEVCFNMGQIVLAKKMLRKALKLLNRIFPYNLISLFLHIHVEKNRHFHYVNRQAQESPPPGKKRLAQLYRQTVCLSLLWRIYSYSYLFHCKYYAHLAVMMQMNTALETQNCFQIIKAYLDYSLYHHLAGYKGVWFKYEVMAMEHIFNLPLKGEGIEIVAYVAETLVFNKLIMGHLDLAIELGSRALQMWALLQNPNRHYQSLCRLSRCLLLNSRYPQLIQVLGRLWELSVTQEHIFSKAFFYFVCLDILLYSGFVYRTFEECLEFIHQYENNRILKFHSGLLLGLYSSVAIWYARLQEWDNFYKFSNRAKNLLPRRTMTLTYYDGISRYMEGQVLHLQKQIKEQSENAQASGEELLKNLENLVAQNTTGPVFCPRLYHLMAYVCILMGDGQKCGLFLNTALRLSETQGNILEKCWLNMNKESWYSTSELKEDQWLQTILSLPSWEKIVAGRVNIQDLQKNKFLMRANTVDNHF

SEQ ID NO: 112343 - protein, 1457 aa, Artificial Sequence
  derived and/or modified sequence
MLVFGDETHSHFLVIGQAVDDVRLAQNMAQMNDVILSPNCWQLCDRSMIEIESVPDQRAVKVNFLKPPPNFNFDEFFTKCTTFMHYYPSGEHKNLLRLACTLKPDPELEMSLQKYVMESILKQIDNKQLQGYLSELRPVTIVFVNLMFEDQDKAEEIGPAIQDAYMHITSVLKIFQGQINKVFMFDKGCSFLCVFGFPGEKVPDELTHALECAMDIFDFCSQVHKIQTVSIGVASGIVFCGIVGHTVRHEYTVIGQKVNLAARMMMYYPGIVTCDSVTYNGSNLPAYFFKELPKKVMKGVADSGPLYQYWGRTEKVMFGMACLICNRKEDYPLLGRNKEINYFMYTMKKFLISNSSQVLMYEGLPGYGKSQILMKIEYLAQGKNHRIIAISLNKISFHQTFYTIQMFMANVLGLDTCKHYKERQTNLRNKVMTLLDEKFYCLLNDIFHVQFPISREISRMSTLKKQKQLEILFMKILKLIVKEERIIFIIDEAQFVDSTSWRFMEKLIRTLPIFIIMSLCPFVNIPCAAARAVIKNRNTTYIVIGAVQPNDISNKICLDLNVSCISKELDSYLGEGSCGIPFYCEELLKNLEHHEVLVFQQTESEEKTNRTWNNLFKYSIKLTEKLNMVTLHSDKESEEVCHLTSGVRLKNLSPPTSLKEISLIQLDSMRLSHQMLVRCAAIIGLTFTTELLFEILPCWNMKMMIKTLATLVESNIFYCFRNGKELQKALKQNDPSFEVHYRSLSLKPSEGMDHGEEEQLRELENEVIECHRIRFCNPMMQKTAYELWLKDQRKAMHLKCARFLEEDAHRCDHCRGRDFIPYHHFTVNIRLNALDMDAIKKMAMSHGFKTEEKLILSNSEIPETSAFFPENRSPEEIREKILNFFDHVLTKMKTSDEDIIPLESCQCEEILEIVILPLAHHFLALGENDKALYYFLEIASAYLIFCDNYMAYMYLNEGQKLLKTLKKDKSWSQTFESATFYSLKGEVCFNMGQIVLAKKMLRKALKLLNRIFPYNLISLFLHIHVEKNRHFHYVNRQAQESPPPGKKRLAQLYRQTVCLSLLWRIYSYSYLFHCKYYAHLAVMMQMNTALETQNCFQIIKAYLDYSLYHHLAGYKGVWFKYEVMAMEHIFNLPLKGEGIEIVAYVAETLVFNKLIMGHLDLAIELGSRALQMWALLQNPNRHYQSLCRLSRCLLLNSRYPQLIQVLGRLWELSVTQEHIFSKAFFYFVCLDILLYSGFVYRTFEECLEFIHQYENNRILKFHSGLLLGLYSSVAIWYARLQEWDNFYKFSNRAKNLLPRRTMTLTYYDGISRYMEGQVLHLQKQIKEQSENAQASGEELLKNLENLVAQNTTGPVFCPRLYHLMAYVCILMGDGQKCGLFLNTALRLSETQGNILEKCWLNMNKESWYSTSELKEDQWLQTILSLPSWEKIVAGRVNIQDLQKNKFLMRANTVDNHF

SEQ ID NO: 112344 - DNA, 4557 bp, Artificial Sequence
  derived and/or modified sequence
atgagcctgagcgagggcgacgccctgctggccctgtggagagtggagagaaagcagctgaagaacatcatcaccgtggtgatcaagtgcagcctggagatccacggcctgttcgagacccaggagtgggaggagggcctggacatcagagtgaagatcggcctggccgccggccacatcagcatgctggtgttcggcgacgagacccacagccacttcctggtgatcggccaggccgtggacgacgtgagactggcccagaacatggcccagatgaacgacgtgatcctgagccccaactgctggcagctgtgcgacagaagcatgatcgagatcgagagcgtgcccgaccagagagccgtgaaggtgaacttcctgaagcccccccccaacttcaacttcgacgagttcttcaccaagtgcaccaccttcatgcactactaccccagcggcgagcacaagaacctgctgagactggcctgcaccctgaagcccgaccccgagctggagatgagcctgcagaagtacgtgatggagagcatcctgaagcagatcgacaacaagcagctgcagggctacctgagcgagctgagacccgtgaccatcgtgttcgtgaacctgatgttcgaggaccaggacaaggccgaggagatcggccccgccatccaggacgcctacatgcacatcaccagcgtgctgaagatcttccagggccagatcaacaaggtgttcatgttcgacaagggctgcagcttcctgtgcgtgttcggcttccccggcgagaaggtgcccgacgagctgacccacgccctggagtgcgccatggacatcttcgacttctgcagccaggtgcacaagatccagaccgtgagcatcggcgtggccagcggcatcgtgttctgcggcatcgtgggccacaccgtgagacacgagtacaccgtgatcggccagaaggtgaacctggccgccagaatgatgatgtactaccccggcatcgtgacctgcgacagcgtgacctacaacggcagcaacctgcccgcctacttcttcaaggagctgcccaagaaggtgatgaagggcgtggccgacagcggccccctgtaccagtactggggcagaaccgagaaggtgatgttcggcatggcctgcctgatctgcaacagaaaggaggactaccccctgctgggcagaaacaaggagatcaactacttcatgtacaccatgaagaagttcctgatcagcaacagcagccaggtgctgatgtacgagggcctgcccggctacggcaagagccagatcctgatgaagatcgagtacctggcccagggcaagaaccacagaatcatcgccatcagcctgaacaagatcagcttccaccagaccttctacaccatccagatgttcatggccaacgtgctgggcctggacacctgcaagcactacaaggagagacagaccaacctgagaaacaaggtgatgaccctgctggacgagaagttctactgcctgctgaacgacatcttccacgtgcagttccccatcagcagagagatcagcagaatgagcaccctgaagaagcagaagcagctggagatcctgttcatgaagatcctgaagctgatcgtgaaggaggagagaatcatcttcatcatcgacgaggcccagttcgtggacagcaccagctggagattcatggagaagctgatcagaaccctgcccatcttcatcatcatgagcctgtgccccttcgtgaacatcccctgcgccgccgccagagccgtgatcaagaacagaaacaccacctacatcgtgatcggcgccgtgcagcccaacgacatcagcaacaagatctgcctggacctgaacgtgagctgcatcagcaaggagctggacagctacctgggcgagggcagctgcggcatccccttctactgcgaggagctgctgaagaacctggagcaccacgaggtgctggtgttccagcagaccgagagcgaggagaagaccaacagaacctggaacaacctgttcaagtacagcatcaagctgaccgagaagctgaacatggtgaccctgcacagcgacaaggagagcgaggaggtgtgccacctgaccagcggcgtgagactgaagaacctgagcccccccaccagcctgaaggagatcagcctgatccagctggacagcatgagactgagccaccagatgctggtgagatgcgccgccatcatcggcctgaccttcaccaccgagctgctgttcgagatcctgccctgctggaacatgaagatgatgatcaagaccctggccaccctggtggagagcaacatcttctactgcttcagaaacggcaaggagctgcagaaggccctgaagcagaacgaccccagcttcgaggtgcactacagaagcctgagcctgaagcccagcgagggcatggaccacggcgaggaggagcagctgagagagctggagaacgaggtgatcgagtgccacagaatcagattctgcaaccccatgatgcagaagaccgcctacgagctgtggctgaaggaccagagaaaggccatgcacctgaagtgcgccagattcctggaggaggacgcccacagatgcgaccactgcagaggcagagacttcatcccctaccaccacttcaccgtgaacatcagactgaacgccctggacatggacgccatcaagaagatggccatgagccacggcttcaagaccgaggagaagctgatcctgagcaacagcgagatccccgagaccagcgccttcttccccgagaacagaagccccgaggagatcagagagaagatcctgaacttcttcgaccacgtgctgaccaagatgaagaccagcgacgaggacatcatccccctggagagctgccagtgcgaggagatcctggagatcgtgatcctgcccctggcccaccacttcctggccctgggcgagaacgacaaggccctgtactacttcctggagatcgccagcgcctacctgatcttctgcgacaactacatggcctacatgtacctgaacgagggccagaagctgctgaagaccctgaagaaggacaagagctggagccagaccttcgagagcgccaccttctacagcctgaagggcgaggtgtgcttcaacatgggccagatcgtgctggccaagaagatgctgagaaaggccctgaagctgctgaacagaatcttcccctacaacctgatcagcctgttcctgcacatccacgtggagaagaacagacacttccactacgtgaacagacaggcccaggagagccccccccccggcaagaagagactggcccagctgtacagacagaccgtgtgcctgagcctgctgtggagaatctacagctacagctacctgttccactgcaagtactacgcccacctggccgtgatgatgcagatgaacaccgccctggagacccagaactgcttccagatcatcaaggcctacctggactacagcctgtaccaccacctggccggctacaagggcgtgtggttcaagtacgaggtgatggccatggagcacatcttcaacctgcccctgaagggcgagggcatcgagatcgtggcctacgtggccgagaccctggtgttcaacaagctgatcatgggccacctggacctggccatcgagctgggcagcagagccctgcagatgtgggccctgctgcagaaccccaacagacactaccagagcctgtgcagactgagcagatgcctgctgctgaacagcagatacccccagctgatccaggtgctgggcagactgtgggagctgagcgtgacccaggagcacatcttcagcaaggccttcttctacttcgtgtgcctggacatcctgctgtacagcggcttcgtgtacagaaccttcgaggagtgcctggagttcatccaccagtacgagaacaacagaatcctgaagttccacagcggcctgctgctgggcctgtacagcagcgtggccatctggtacgccagactgcaggagtgggacaacttctacaagttcagcaacagagccaagaacctgctgcccagaagaaccatgaccctgacctactacgacggcatcagcagatacatggagggccaggtgctgcacctgcagaagcagatcaaggagcagagcgagaacgcccaggccagcggcgaggagctgctgaagaacctggagaacctggtggcccagaacaccaccggccccgtgttctgccccagactgtaccacctgatggcctacgtgtgcatcctgatgggcgacggccagaagtgcggcctgttcctgaacaccgccctgagactgagcgagacccagggcaacatcctggagaagtgctggctgaacatgaacaaggagagctggtacagcaccagcgagctgaaggaggaccagtggctgcagaccatcctgagcctgcccagctgggagaagatcgtggccggcagagtgaacatccaggacctgcagaagaacaagttcctgatgagagccaacaccgtggacaaccacttctag

SEQ ID NO: 112345 - DNA, 4557 bp, Artificial Sequence
  derived and/or modified sequence
atgagcttaagtgaaggcgacgccttgctcgctctttggcgggtggagcgcaaacagctgaagaacattataaccgttgtgatcaagtgctccctcgagatccacgggttgttcgagacccaggagtgggaggaaggattggatattagggttaaaatcgggctggctgcggggcatatatctatgcttgttttcggagatgaaacgcactctcactttctggtgattgggcaagccgttgatgacgttcggctggcgcagaacatggcgcagatgaacgatgtgattctatctcccaattgctggcagctgtgtgaccggtctatgatcgaaattgaatcggtgcccgatcagagggctgtgaaggtcaacttcctgaagccgcctccaaactttaactttgatgaatttttcacgaagtgcacgacttttatgcattactacccgagcggcgaacacaagaatctccttagactggcttgtaccctgaagcccgaccctgagctggagatgagtttgcagaagtacgtgatggaatcaattttaaagcaaattgacaacaaacagttgcaaggctacctctccgagctgcgcccagtaacaatcgtttttgtgaatctgatgtttgaggatcaggacaaggcggaagagattgggccagccatccaggacgcttacatgcacataaccagtgtgcttaaaatttttcagggccagataaacaaggtgttcatgtttgataagggatgttcctttctctgtgtttttggttttccgggcgaaaaggtacctgatgagttaacacacgctctggaatgtgcgatggatatctttgatttctgtagtcaggttcacaagattcagaccgtgagcataggtgtggcaagcggtatcgtgttttgcggaatcgtgggccatacagtgcgccacgagtacacagtgattggtcagaaggtcaatctggcggcacggatgatgatgtattatcccggcatcgtgacctgtgattccgtgacctacaacgggtcaaacctgccagcatatttttttaaggagttgcctaaaaaggttatgaagggtgttgcggactctggccctctttaccagtattggggaaggacggaaaaagtgatgtttggtatggcatgcctgatctgcaataggaaggaagattacccattgctcgggcgcaataaggagattaattacttcatgtacactatgaaaaagttccttatctctaattccagtcaagtcctgatgtatgagggcctgcccggttacggcaagtctcaaatcctgatgaagattgaatatttggcgcagggcaaaaaccatcggataatagccataagcctgaataaaatttccttccaccagacattttataccatacagatgtttatggctaatgtgctgggcttggacacgtgtaagcactataaggaaaggcagactaacctgagaaataaagtgatgacattgctggatgagaagttctattgtttgctgaacgacattttccacgtgcagttccccatcagtcgagaaatctcccggatgagtaccctcaagaagcagaaacagttggaaatcttgtttatgaagatactgaaacttatagtgaaagaggaacgaataatttttattatagacgaagctcaattcgtcgatagcacttcttggcggttcatggagaagctaatcagaaccttacctatctttattatcatgagcctgtgcccattcgtcaatattccatgtgctgcagcacgcgccgtgatcaaaaaccgaaatacaacctacatcgtgatcggtgctgtgcaacctaacgacattagcaataagatctgtctggatttgaacgtaagctgtatctctaaagagctggactcatatctgggcgagggaagctgcggtatccctttttactgcgaggaactgctaaaaaacctggagcaccatgaagtactggtatttcagcagacagaaagcgaggagaagacaaatagaacctggaacaatctttttaagtactctattaagctgaccgagaagctcaacatggtgacactgcattctgacaaggaaagtgaagaggtctgccatttgacatccggagtccgcttgaagaacctttctcctcctacttccctgaaggaaatttccttaattcaactggatagcatgcgcctgagccaccaaatgctcgtcaggtgtgctgccataattggcttgacttttactacagaactgttgttcgaaatcctgccatgttggaacatgaagatgatgattaagactttggccaccctggtggagagtaatatattttactgcttcagaaacggtaaggagttacagaaagccctgaaacagaacgacccaagtttcgaggtacactatagatctctgtctttgaagcccagcgagggcatggatcacggcgaggaagagcagcttcgggagctagagaatgaggtcattgagtgccatagaattcggttttgtaatcctatgatgcagaagacggcttacgaactgtggctgaaagaccagaggaaagctatgcatctcaagtgcgctcgtttccttgaagaggacgcgcacaggtgcgaccactgtagggggcgtgactttattccctaccatcacttcactgtgaacattagactcaatgcgttggatatggatgcgataaagaagatggctatgagccacggattcaaaactgaggaaaaattgatcctatctaattcagagattccagaaaccagcgccttcttcccagagaacaggtctccggaagagatccgtgagaagattttgaattttttcgaccacgtgctgacgaagatgaagacatccgatgaagatattattcccctcgagtcctgccagtgcgaggaaatactcgagatcgtgattctgccacttgctcaccatttccttgccttaggagagaacgacaaggctttatactattttctggagattgcctctgcttacctgatcttttgcgataactatatggcgtatatgtacctcaacgagggacaaaagttgcttaagaccctcaaaaaggataagagctggtcccagacttttgaatctgccacattctattcactcaagggggaggtctgtttcaacatggggcaaatagttcttgcgaagaaaatgctgaggaaggctcttaagctgttgaacaggattttcccatacaatctcatatctcttttcctccatatccacgtggaaaagaataggcactttcactacgttaataggcaagcacaggagtctccccctccaggcaagaagagactcgctcaactgtacaggcagacagtctgtctctcgcttctgtggaggatatatagctattcttacctctttcactgtaagtattacgcacacctggccgtgatgatgcagatgaacaccgccctcgagacacaaaactgtttccaaatcatcaaggcttatctggactactctctttaccaccacctcgccggctataaaggagtctggttcaaatacgaggtgatggccatggaacatatcttcaatctccctctgaaaggcgagggcatcgagatcgtcgcgtatgtcgccgagacgttggtgtttaacaagctgatcatgggccaccttgatttagccatcgagcttggatcccgcgccctccaaatgtgggcactcctgcaaaaccccaacagacattaccagtctctctgtaggttgtcccggtgtctgctcctgaactcacggtatccacagctgatccaggtattgggccggctttgggaactatcagtgacccaggagcatatattctccaaggcattcttctacttcgtttgcctggacattttgctgtacagtggatttgtctaccgcaccttcgaagagtgccttgagttcatccatcagtatgaaaacaaccggatacttaaatttcattcggggttactcctcggactgtacagtagcgtagcaatctggtatgccagactgcaagaatgggacaacttctacaagttcagcaacagagcaaagaatcttctacctcgtaggacgatgactctgacatattatgacgggatcagccggtacatggaaggacaggtcctccatctgcagaaacaaattaaggagcaatcagagaacgcccaggcgtccggagaagagttgctgaaaaatcttgagaacctagttgcccagaacactacagggcctgtgttctgtcctaggctgtaccatttgatggcttacgtatgcattcttatgggtgatggccaaaaatgcggtctgttcttaaacaccgctctgagactgtccgagacccagggaaatatccttgaaaagtgctggctaaatatgaataaggagtcttggtactctacatccgagttgaaagaagatcaatggctgcagaccattctctccctgcctagttgggaaaaaatcgtggcaggccgtgtcaatatacaggacctgcagaagaataagttcctcatgagggccaataccgttgacaatcacttctag

SEQ ID NO: 112346 - DNA, 5055 bp, Artificial Sequence
  derived and/or modified sequence
gacagacatggcgcttcagctgtcttcagaataatgtcacccggcctcctctcctgtcttctgcagtcttaaaagacctagtccctaactgaggtctggcttttcctcagccctggatgaagtggagaagacctatttggagactgcttcctgtcaccataaaatcctgaacatttgtcttgaacatgaacactccaaaagaagaattccaggactggcccatagtcagaatagcagctcatttaccagacctcattgtctatggacatttctccccagagcgaccctttatggattattttgacggagtcctgatgtttgttgatatttcaggttttactgcaatgactgagaagttcagcagtgccatgtacatggacagaggggctgagcagttggtggagatcctcaactaccacataagtgcaatagtggagaaagtgttgatttttggaggagacatcctgaaatttgcagggcaggtcaaaagcccgcggcatgtctctctctgaaggtgatgcactgctagccctgtggagggtggagcgaaagcagctgaaaaacattatcacagtggtaattaaatgtagcctggagatccatggattgtttgagacccaggagtgggaagaaggcctagacatccgagtcaagataggactggctgctggccacatcagcatgttggtctttggagatgaaacacacagccactttctggtgattggtcaggcagtggacgatgtgcgccttgcccagaacatggctcagatgaatgatgttattctgtcaccaaactgctggcagctctgtgaccggagcatgattgaaattgagagtgttccagatcagagagcagttaaggttaacttcttaaaaccaccccccaattttaattttgatgaatttttcacaaagtgtacgaccttcatgcattattatccttctggtgagcacaaaaacctcctgaggcttgcatgcacgctgaagcctgatcctgaactggagatgtccctacaaaagtatgtgatggaaagcattttgaagcagattgataacaaacagcttcagggctatttatctgagcttcgcccagtgacgattgtgtttgtgaacctgatgtttgaagaccaagacaaagcagaagagataggcccagccatccaggatgcctatatgcacatcacttctgtcctgaagatcttccaaggccaaatcaataaagtcttcatgtttgacaagggctgctctttcctctgtgtctttggcttccctggggaaaaggtacctgacgagctcactcatgctctggaatgtgctatggatatatttgacttctgctctcaagtccacaaaatccaaactgtatccatcggtgttgccagtgggattgtcttctgtgggatcgttggacacactgtgagacacgagtacacagtcattggtcaaaaagtcaacttagctgccaggatgatgatgtactacccaggaattgtgacctgcgactctgtcacctacaatgggagcaacctaccagcgtacttttttaaagagcttccaaagaaagttatgaaaggtgttgcagattctggaccattgtatcagtattggggccgtactgagaaagtcatgtttggtatggcgtgcctcatctgcaacagaaaggaggattaccctttgctgggacgtaataaagagatcaactacttcatgtatactatgaagaaatttttgatatctaacagcagccaagtcttaatgtatgagggattaccaggatatggaaaaagccagatacttatgaaaattgagtacctggcccaaggtaagaatcacaggattattgccatttcattgaataagatcagcttccatcaaactttctataccatccagatgttcatggccaatgtcctaggcctagacacttgtaaacattataaagaacgacagaccaaccttcgaaataaagtcatgacactgttggatgaaaagttctactgtcttcttaatgacattttccatgttcagttccctatttctcgggagatttccaggatgagcaccttgaaaaagcaaaaacaattggaaatattgtttatgaagatcttgaagctgatagtgaaagaggaaaggattatttttatcattgatgaggcccagtttgtggattcgacctcctggagatttatggagaagcttatccggactcttcctatcttcatcattatgtccctgtgtcccttcgttaacattccctgtgcagctgccagggccgtaataaagaacaggaacaccacctacattgtcattggtgcagtacagcctaacgacatctccaacaagatctgtcttgacctcaatgtgagctgcatctccaaagaactggactcgtacctgggggagggaagctgtgggattccattttactgtgaagaattgcttaaaaacctggaacatcatgaggtactcgttttccaacaaacggagtctgaggaaaagacaaataggacctggaataacctgttcaagtattccattaagctaacagagaagttaaacatggttactctccatagtgataaggaaagtgaagaagtctgtcacctcacaagtggtgtcagactgaaaaacctgtcacctccaacgtcattaaaagaaatctctctgatccagctggatagcatgagactttcccaccaaatgctggtgagatgtgctgccatcattggcctgaccttcaccactgagttgttgtttgagattctcccctgttggaatatgaagatgatgatcaagaccctggcaaccctagtggaatctaacattttttattgtttccggaatggcaaggagcttcaaaaggccctgaaacagaatgatccctcatttgaggtgcactatcgttccttgtctctgaagcccagtgaagggatggatcacggtgaagaggaacagcttcgtgaactggagaatgaggtgatcgagtgccacaggattcgattctgtaaccctatgatgcagaaaacagcctacgagctgtggctcaaggaccagagaaaagccatgcacttgaaatgtgcccgctttttagaagaagatgcccacagatgtgaccactgccgaggcagggacttcattccctatcatcacttcacagtgaatattcggctcaacgctttagacatggatgccattaaaaagatggctatgtctcatggatttaaaactgaagaaaagcttatcttgtccaactcagagattcctgagacatctgcattttttcctgaaaatcgcagtcctgaagaaataagagaaaagatcttgaatttctttgaccacgttttaacaaaaatgaagacatctgacgaagacattatccctctggaatcttgccagtgtgaagaaatcctagagattgtcatcttgcctctggcccaccattttctggctttgggagaaaatgacaaagccttatattacttcttagaaattgcatctgcttatctcatcttttgtgataactacatggcatacatgtatttgaatgaaggacagaagttgctaaaaactctcaagaaggacaaatcttggagccagacatttgagtctgccaccttttacagcctcaaaggtgaggtctgtttcaatatgggccagatagtgcttgccaagaaaatgctgaggaaggcactgaagctcctcaaccgaatctttccttacaacttaatctccttgtttctccatatccatgtcgagaaaaacagacactttcattatgtgaatcggcaggcccaagagagcccacctccagggaagaagaggctggcacaactttaccggcaaactgtctgcctttccttgctgtggcgcatctatagctacagttatctttttcactgcaagtattatgcccacctggcagttatgatgcaaatgaatactgcactggaaactcaaaattgtttccagatcattaaggcttacctagactattcgctataccaccacctggctggctacaaaggtgtgtggttcaaatatgaagtcatggccatggagcacatcttcaacctccccctgaaaggcgagggcattgaaatcgtggcatacgtggctgagacactggtcttcaacaagctcataatgggacacctggatttggccattgagttaggctcccgagcccttcagatgtgggcactgctccagaatcccaaccgacattatcagtccctctgcagacttagcagatgtctccttctgaacagcagatacccgcaattgatccaggtgctggggcggctgtgggagctttctgtaacacaggaacacatcttcagcaaggcatttttctattttgtctgcttggacatcctgctttattctggttttgtttatagaacatttgaagaatgtttggaattcatacaccaatacgaaaacaacagaatcctcaagttccacagtggactcctcctgggactttattcctctgtagctatctggtatgccagacttcaggaatgggacaacttttacaaattttccaatagagctaaaaatcttttgccaagaagaaccatgacacttacttactatgacggaatatctaggtacatggaggggcaagttcttcaccttcaaaaacaaatcaaagaacagtcagagaatgcccaagccagtggggaggagctactcaagaacttggagaatctggtggctcaaaataccactggccctgtcttttgcccaaggctctaccacctgatggcttacgtctgtatattaatgggagatgggcagaaatgtggcctcttcctgaacacagccttgcggctctctgaaacacaggggaatatactggagaaatgctggctgaacatgaacaaagaatcatggtactcaacctctgagttaaaagaagaccaatggcttcagacgatcttgagtctcccatcatgggaaaaaattgtagcaggcagggtaaacattcaggatcttcaaaaaaacaaattcctgatgagagctaataccgtggacaatcatttctaa

SEQ ID NO: 112347 - DNA, 4557 bp, Artificial Sequence
  derived and/or modified sequence
atgagcctgtctgaaggagatgccctgctggccctgtggagggtggagaggaagcagctgaagaacatcatcaccgtggtgatcaagtgcagcctggagatccacggcctgtttgagacccaggagtgggaggagggcctggacatccgggtgaagattggcctggccgccggccacatctccatgctggtgtttggagatgagacccacagccacttcctggtgattggccaggccgtggatgatgtgcggctggcccagaacatggcccagatgaatgatgtgatcctgagccccaactgctggcagctgtgtgaccgctccatgattgaaattgagagcgtgcctgaccagagagctgtgaaggtgaacttcctgaagcccccacccaacttcaactttgatgagttcttcaccaagtgcaccaccttcatgcactactaccccagcggggagcacaagaacctgctgcggctggcctgcaccctgaagccagaccctgagctggagatgagcctgcagaagtatgtgatggagagcatcctgaagcagattgacaacaagcagctgcagggctacctgtctgagctgcggcctgtgaccatcgtgtttgtgaacctgatgtttgaggaccaggacaaggccgaggagatcggccctgccatccaggatgcctacatgcacatcacctctgtgctgaagatcttccagggccagatcaacaaggtgttcatgtttgacaagggctgcagcttcctgtgtgtgtttggcttccctggagagaaggtgcctgatgagctgacccacgccctggagtgtgccatggacatctttgacttctgcagccaggtgcacaagatccagacagtgtccattggagtggccagcggcatcgtgttctgtggcatcgtgggccacacagtgagacatgagtacacagtgattggccagaaggtgaacctggccgccaggatgatgatgtactacccaggcatcgtgacctgtgacagcgtgacctacaacggcagcaacctgcctgcctacttcttcaaggagctgcccaagaaggtgatgaagggcgtggccgacagcggccccctgtaccagtactggggccgcacagagaaggtgatgtttggcatggcctgcctgatctgcaacaggaaggaggactaccccctgctgggcaggaacaaggagatcaactacttcatgtacaccatgaagaagttcctgatcagcaacagcagccaggtgctgatgtatgagggcctgcccggctacggcaagagccagatcctgatgaagattgagtacctggcccagggcaagaaccaccgcatcatcgccatcagcctgaacaagatctccttccaccagaccttctacaccatccagatgttcatggccaacgtgctgggcctggacacctgcaagcactacaaggagcggcagaccaacctgaggaacaaggtgatgaccctgctggatgagaagttctactgcctgctgaatgacatcttccacgtgcagttccccatcagccgggagatcagcaggatgagcaccctgaagaagcagaagcagctggagatcctcttcatgaagatcctgaagctgattgtgaaggaggagcgcatcatcttcatcattgatgaggcccagtttgtggacagcacctcctggaggttcatggagaagctgatccgcaccctgcccatcttcatcatcatgagcctgtgcccctttgtgaacatcccctgtgccgccgcccgggctgtgatcaagaacagaaacaccacctacatcgtgattggagctgtgcagcccaatgacatcagcaacaagatctgcctggacctgaatgtgtcctgcatcagcaaggagctggacagctacctgggggagggcagctgtggcatccccttctactgtgaggagctgctgaagaacctggagcaccacgaggtgctggtgttccagcagacagaaagtgaggagaagaccaacagaacctggaacaacctcttcaagtacagcatcaagctgacagagaagctgaacatggtgaccctgcacagcgacaaggagagcgaggaggtgtgccacctgaccagcggcgtgcggctgaagaacctgagcccccccaccagcctgaaggagatcagcctcatccagctggacagcatgaggctgagccaccagatgctggtgcgctgtgccgccatcatcggcctgaccttcaccacagagctgctgtttgagatcctgccctgctggaacatgaagatgatgatcaagaccctggccaccctggtggagagcaacatcttctactgcttcagaaatggcaaggagctgcagaaggccctgaagcagaatgaccccagctttgaggtgcactaccgcagcctgagcctgaagcccagcgagggcatggaccatggagaggaggagcagctgcgggagctggagaatgaggtgattgagtgccaccgcatccgcttctgcaaccccatgatgcagaagacagcctatgagctgtggctgaaggaccagaggaaggccatgcacctgaagtgtgcccgcttcctggaggaggatgcccaccgctgtgaccactgccggggccgggacttcatcccctaccaccacttcaccgtgaacatccggctgaatgccctggacatggatgccatcaagaagatggccatgagccacggcttcaagacagaggagaagctgatcctgagcaacagcgagatccctgagaccagcgccttcttcccagaaaatagaagccctgaggagatccgggagaagatcctgaacttctttgaccacgtgctgaccaagatgaagaccagtgatgaggacatcatccccctggagagctgccagtgtgaggagatcctggagatcgtcatcctgcccctggcccaccacttcctggccctgggggagaatgacaaggccctgtactacttcctggagatcgccagcgcctacctgatcttctgtgacaactacatggcctacatgtacctgaatgaaggccagaagctgctgaagaccctgaagaaggacaagtcctggagccagacctttgagagcgccaccttctacagcctgaagggggaggtgtgcttcaacatgggccagatcgtgctggccaagaagatgctgaggaaggccctgaagctgctgaaccgcatcttcccctacaacctgatcagcctcttcctgcacatccacgtggagaagaacagacacttccactacgtgaaccggcaggcccaggagagccccccacctgggaagaagaggctggcccagctgtaccggcagacagtgtgcctgagcctgctgtggaggatctacagctacagctacctgttccactgcaagtactatgcccacctggccgtgatgatgcagatgaacacagccctggagacccagaactgcttccagatcatcaaggcctacctggactacagcctgtaccaccacctggccggctacaagggcgtgtggttcaagtatgaggtgatggccatggagcacatcttcaacctgcccctgaagggggagggcatcgagatcgtggcctacgtggccgagaccctggtgttcaacaagctgatcatgggccacctggacctggccatcgagctgggcagccgggccctgcagatgtgggccctgctgcagaaccccaacagacactaccagagcctgtgccgcctgagccgctgcctgctgctgaacagccgctacccccagctgatccaggtgctgggccgcctgtgggagctgtctgtgacccaggagcacatcttcagcaaggccttcttctactttgtgtgcctggacatcctgctgtacagcggctttgtgtaccgcacctttgaggagtgcctggagttcatccaccagtatgagaacaaccgcatcctgaagttccacagcggcctgctgctgggcctgtacagctctgtggccatctggtacgcccggctgcaggagtgggacaacttctacaagttcagcaacagagccaagaacctgctgcccaggaggaccatgaccctgacctactatgatggcatcagccgctacatggagggccaggtgctgcacctgcagaagcagatcaaggagcagagtgaaaatgcccaggccagcggggaggagctgctgaagaacctggagaacctggtggcccagaacaccactggacctgtgttctgcccccggctgtaccacctgatggcctacgtgtgcatcctgatgggagatggccagaagtgtggcctcttcctgaacacagccctgcggctgtctgagacccagggcaacatcctggagaagtgctggctgaacatgaacaaggagagctggtacagcaccagcgagctgaaggaggaccagtggctgcagaccatcctgagcctgcccagctgggagaagatcgtggccggccgggtgaacatccaggacctgcagaagaacaagttcctgatgagggccaacacagtggacaaccacttctag

SEQ ID NO: 112348 - DNA, 4557 bp, Artificial Sequence
  derived and/or modified sequence
atgagcctgagcgagggcgacgccctgctggccctgtggcgggtggagcgtaagcagctaaagaatataattaccgtggttattaagtgcagccttgagattcatggcctgtttgagacccaggagtgggaggagggtctggatattcgtgtgaaaataggcctggccgcagggcacatttccatgctagttttcggcgatgaaacacattcacactttttggtaattggtcaggcggtggatgacgtgcggctagcacaaaatatggcgcagatgaatgacgttattctttctccgaactgttggcagttatgcgatcggagtatgattgaaattgaatctgttccagatcagcgggcggttaaagtgaatttcctgaaaccaccaccaaatttcaacttcgacgaattctttacaaaatgcaccacattcatgcattattatccttccggggagcataagaacttgctgaggctggcctgtaccttaaagcctgatcccgagctggagatgagtctccaaaaatacgttatggagtccatactgaagcagattgataataagcagttgcaggggtatttgagtgaactgcggcccgtaactatagttttcgtaaaccttatgttcgaggaccaggacaaggctgaggagattggacccgctatccaggatgcttacatgcacatcactagcgttctcaagatttttcagggacagatcaacaaagtgttcatgtttgacaagggctgctcctttctatgcgtctttggattccccggagaaaaagtccccgacgagctgacccatgccctagaatgtgccatggacatattcgacttttgtagtcaggttcacaaaatccagactgtgtctatcggcgtggcctctggaattgtgttctgcggtatagtcggtcacacagtgcgtcacgagtataccgttattggccaaaaagtgaatctcgccgctcggatgatgatgtactaccctggcatcgtcacatgtgattcagtaacctacaatggctcgaatctccccgcctactttttcaaagagctgccaaagaaggtgatgaagggagtggctgatagcggacccctgtatcagtactgggggcgcacagaaaaagtgatgttcggcatggcttgtctgatatgtaatcgcaaggaagattaccctctgctcggaagaaacaaagagatcaactactttatgtacactatgaagaaattcttgatcagtaatagctcgcaggtgctgatgtatgagggcctgcccgggtacgggaagtcccagatcttaatgaagattgagtacctggctcagggtaagaatcacaggatcatcgccatcagtctgaataagatcagctttcaccagaccttctacacaattcagatgtttatggccaacgtgctgggactcgacacatgcaagcactacaaggagcgccagacaaatcttcgtaataaagtgatgactttgctggatgagaaattttattgtctactgaacgatatcttccatgtgcaattccccatttcccgggagatatccagaatgtcgactctgaaaaagcaaaagcagctggaaattctatttatgaaaatcctgaagctcatcgtgaaggaggagcggatcatcttcataatcgatgaggcacagttcgtggactcaaccagctggcgctttatggagaaactcattaggacgctgcccatatttattataatgtcactttgtccgttcgtaaacatcccttgtgctgccgcccgtgcagtcattaaaaatagaaatacgacgtacattgtaatcggtgcagttcagcccaatgatatcagtaacaagatttgtcttgatctaaacgtgagctgcatttcaaaggagcttgatagctacctgggtgaagggagctgtggcattcctttctactgtgaggagctgttaaagaacctggagcatcatgaggtgttggtgtttcagcagaccgagagcgaggaaaagaccaaccgtacctggaacaacctctttaaatatagcatcaagctgacagaaaagctcaacatggtcacattacacagcgataaagagagcgaagaggtgtgccatttaacctcaggcgtgcgcctcaaaaatctgtccccaccaacatcactgaaggagatcagccttattcagctagacagcatgcgcctgtctcatcagatgctggtgaggtgtgccgcgatcatcgggctcacatttaccacagagttactgtttgagattctaccctgttggaatatgaaaatgatgattaaaacacttgccactctcgtggaatcaaacatattctactgttttcgtaatgggaaggaactgcaaaaggccctcaaacagaatgacccctcatttgaggttcattacaggtctctctccctcaaacccagcgagggaatggatcacggagaggaggagcagctccgagagcttgaaaacgaagtgattgaatgccacaggattagattctgtaaccctatgatgcagaaaacagcttatgagttgtggctgaaggatcagaggaaagccatgcatctcaagtgcgctcgcttcctggaggaggacgcccaccggtgtgatcattgtaggggacgcgacttcataccataccatcactttacagttaacatacgcttgaacgccctggatatggatgctattaaaaaaatggctatgagccacggctttaaaactgaagaaaagctgatactctctaactctgaaatcccagaaacaagcgctttctttccagagaatagatctccagaggaaattagggagaaaatcctaaatttcttcgaccatgtactcaccaagatgaagacctctgatgaagacattatacctctcgaaagttgccagtgcgaggagatcctagagattgttattcttccactcgcgcaccacttcttggctttaggagagaacgataaggctctgtattattttctggagatagcttctgcttacctaattttctgcgataattacatggcttatatgtatctgaacgaaggccagaagctgttgaagacattaaaaaaggacaaaagttggtcccagacctttgagagcgcaaccttttactcactaaagggcgaagtctgcttcaacatggggcagattgtcctggccaaaaaaatgttgagaaaagccctgaagctgttgaaccggatattcccctacaatctgatcagcctgttcttacatatccacgttgagaagaatcggcacttccactacgtcaacaggcaagcgcaagagtccccgccccccggaaagaagaggttggctcagctgtacaggcagacagtctgtttgtctctgttatggaggatttattcttattcctatctgtttcactgtaaatattacgcacacctagctgtgatgatgcagatgaacacagccctcgaaacccagaattgttttcaaattattaaagcttatctcgactatagtttgtatcatcaccttgctgggtacaagggagtctggttcaaatatgaagtgatggcaatggaacacatctttaatctgcccctgaagggtgagggcattgagatcgtggcctacgtggccgaaaccctggtattcaacaagcttataatgggccacctggatttggccatcgaactgggtagcagagcactgcagatgtgggccctgttgcagaacccaaatcggcattaccagagtctgtgccgcctgagcagatgtctccttctgaacagtcggtacccccagctgatacaggttctggggaggctctgggagctctcagtaacacaggaacatattttttccaaagcgtttttttacttcgtttgtctggacatactcctctacagcggtttcgtgtaccgcacctttgaggaatgcctggaattcatccaccagtatgaaaataatcggatcctaaaatttcattccggcctgctgctcggcctttacagctccgtggctatttggtacgcacggctgcaagagtgggataacttctataaattctccaacagagccaaaaatctgctgccacgccgaaccatgaccctgacctattatgatgggatttcgagatatatggaagggcaggtgctgcacttacaaaaacagatcaaagagcagtcagaaaatgcccaagcttctggtgaagaactcctgaaaaacttagaaaatctggtcgcacaaaacaccaccggaccggttttctgcccaagactttatcatttaatggcctatgtctgcatactgatgggtgatggccagaagtgtggcttgtttcttaataccgctcttcgcctctctgaaactcagggaaatattcttgaaaaatgctggctcaatatgaacaaggaaagctggtactccacctctgagttaaaggaggaccagtggctgcagacgatcctatcacttccctcctgggagaaaatcgtggccggtcgcgtcaatatacaagatctgcaaaagaataagttcttgatgagagcgaacaccgtggataatcacttttag

SEQ ID NO: 112349 - DNA, 4557 bp, Artificial Sequence
  derived and/or modified sequence
atgtccttgagcgaaggcgatgcgctgctggcactgtggagagtggagagaaagcagctcaaaaacatcatcactgtggtgatcaagtgttctcttgaaattcacggcctatttgagactcaggaatgggaagaagggttagacatccgcgtaaagattggattggctgcaggacacatcagcatgctggtgtttggcgacgagacacactcccatttcttagtgataggtcaggctgtggatgatgtgcgcctcgcccaaaatatggctcagatgaatgatgtgattctctccccgaactgctggcagttgtgtgaccgaagtatgattgagattgagtcagtgccagaccagagagccgtgaaggtgaatttcctaaagccccctcccaacttcaactttgacgagttctttacaaaatgcactacctttatgcattattacccatccggtgagcacaagaacctcctgaggctagcctgtacactaaagcctgatccggagctagaaatgtctctgcagaagtatgttatggagagtatactgaagcagattgacaataaacagcttcagggatacttgtccgaactgagacccgtcactatcgtctttgttaatctgatgttcgaagatcaggacaaggcagaagaaattggcccagcgatccaggacgcatacatgcacatcacatctgtgcttaagatcttccagggccagatcaacaaggtgttcatgtttgataaaggatgtagcttcctgtgcgtctttggcttccctggagaaaaggttcctgacgagctgacccacgctcttgagtgcgctatggacatttttgacttttgctcacaggtgcataaaatccagacggtctccatcggggtcgcatctggaattgtcttttgcggtatcgtgggacataccgtgcgacacgaatacaccgtgatcgggcagaaagtgaatctcgccgctcgcatgatgatgtactaccctggtatcgttacctgcgattctgtcacctacaatggtagtaaccttcctgcatatttcttcaaagagctgcccaagaaggtcatgaaaggcgtagccgattctggacctctttaccaatactggggcagaactgagaaagtgatgttcggcatggcgtgtcttatctgcaatagaaaggaagattatcctctgctgggtcggaacaaagaaattaactactttatgtacaccatgaagaagtttcttataagcaatagttctcaggtcctgatgtacgaaggtctgcccggttatggcaaaagccagatcctcatgaagatcgagtacctggctcaaggcaagaaccaccggattattgccattagcctgaacaagatctcatttcaccagacattttacacaattcagatgttcatggccaatgtcttgggcttggatacttgtaaacattataaggaaagacagactaatctccgcaacaaggtgatgaccctgcttgacgagaagttttactgtctgttgaatgatatcttccacgtccagtttccaatctctagagaaataagccggatgtcgactcttaagaagcagaaacagctggagattctgtttatgaaaatcctcaagctgatcgttaaggaggagcgcatcatcttcatcatcgacgaagcgcagttcgttgacagcacttcgtggagatttatggaaaaactcatcaggaccctgcctatctttataattatgtcgctatgtccctttgtaaacattccttgcgctgctgccagagccgtcatcaaaaatagaaacaccacttacatcgtgatcggcgctgtgcagcccaacgatatttccaataagatttgccttgatttaaatgtctcgtgcattagcaaggagctcgactcctacctgggggaggggtcctgcggcatcccattttattgtgaggagctgctgaaaaatctggagcaccacgaggtgctggtgttccagcagactgagagtgaagaaaagacaaacagaacatggaacaatctgttcaagtactccatcaaactgaccgaaaagctgaatatggtgacactccacagcgacaaagaatcggaagaggtgtgccatctaacctcaggcgtccgactcaagaacctttcaccacccacctccttgaaagaaattagcctcatacagctcgactcaatgcgcctaagccaccagatgctggtccggtgcgctgcaataattggcttaacgtttaccacggagctgttgttcgaaattttgccctgctggaacatgaagatgatgataaagacgctggcgacacttgtggagagtaatattttctattgtttcaggaacggaaaggagcttcagaaggctctgaagcaaaatgatcctagctttgaggtgcactaccgttccctgtctctcaaaccatccgaaggaatggatcatggagaggaagagcaactgcgtgagctggaaaatgaggtgatcgaatgccaccgcattcgattttgtaacccaatgatgcagaagacagcctatgagctgtggcttaaagatcaacggaaggccatgcacttgaagtgtgcacgattcctggaggaggatgcgcatcggtgtgatcactgcagaggtcgagattttatcccatatcaccacttcactgtgaatatccgcctcaatgcattggacatggacgccatcaaaaaaatggctatgtcgcatgggtttaaaaccgaagagaagctgatcttgtctaattctgaaatcccagaaaccagtgctttcttccccgagaaccgctcgcccgaagaaatcagggagaagatcctgaatttcttcgatcacgtgttaactaagatgaaaacgtccgacgaggacatcatcccactggagtcctgccagtgcgaagagattctcgagattgttattcttcctctagcacaccacttcttggcgcttggagagaatgataaggccttgtactacttcctagagatcgcaagcgcttacctgattttctgtgacaattacatggcctacatgtacctgaatgagggccagaagcttctaaagacgctcaagaaagacaagtcctggtcccagacattcgagtctgcaacgttctacagcctgaagggtgaggtgtgttttaacatgggacagatagtactggccaagaagatgctgcgcaaggccttaaaattgttgaataggatctttccatataatcttatctctctatttttgcacatacatgtcgagaaaaaccgacattttcattacgtgaatagacaggcccaggagtcgcctccaccgggaaagaaaaggctggctcagctgtaccgacagaccgtctgcttatccctactttggcgcatatattcctacagttatcttttccactgtaagtactacgctcaccttgcagtcatgatgcaaatgaacaccgccctcgaaacgcagaactgtttccagattatcaaggcttacttggactactctctctaccaccacctggccggttataagggagtgtggttcaagtatgaggtcatggctatggaacacatctttaacctgcccctcaagggggaagggatagagatcgtggcatatgtagcagagactctggtgtttaataagctaattatggggcaccttgacttggctatcgaactcggcagccgcgcacttcaaatgtgggcgctgcttcagaacccaaatcgccactaccaatccttgtgcagactgtcccgttgtctgctgctgaattcccgttatccccagctgatccaagtgctgggcagactgtgggagctgtctgtgacacaggaacatattttttccaaggccttcttttactttgtttgccttgacatcctgctctattccggctttgtgtaccggacatttgaggaatgcctagagtttatacaccaatatgaaaacaatagaatcttaaagttccatagtggactattgttgggcctgtatagcagcgttgctatatggtatgccaggctgcaggagtgggacaatttctacaagttctctaaccgggctaagaaccttctcccacgcaggacaatgaccctaacctactacgacgggatcagtagatacatggagggccaggtgctgcatctgcaaaagcagataaaagagcaaagcgagaacgcccaggcatctggcgaggagctgctcaagaatctcgagaacctggtggcacagaataccaccggtccggtgttctgtccacgtctttatcatctgatggcctacgtttgtattttgatgggtgacgggcagaagtgcggactgtttctcaataccgcgctgaggctgagcgaaactcaaggcaacattcttgagaaatgttggcttaatatgaacaaggaatcctggtactcaaccagcgaactgaaggaagaccaatggttacagacaatcctgtccctccctagctgggaaaaaatagtggcagggcgagtgaacatacaagatttgcagaaaaataaatttctgatgcgtgcgaatacagttgacaaccatttttag

SEQ ID NO: 112350 - protein, 428 aa, Artificial Sequence
  derived and/or modified sequence
MGTLSAPPCTQRIKWKGLLLTASLLNFWNLPTTAQVTIEAEPTKVSEGKDVLLLVHNLPQNLTGYIWYKGQMRDLYHYITSYVVDGEIIIYGPAYSGRETAYSNASLLIQNVTREDAGSYTLHIIKGDDGTRGVTGRFTFTLHLETPKPSISSSNLNPRETMEAVSLTCDPETPDASYLWWMNGQSLPMTHSLKLSETNRTLFLLGVTKYTAGPYECEIRNPVSASRSDPVTLNLLPKLPKPYITINNLNPRENKDVLNFTCEPKSENYTYIWWLNGQSLPVSPRVKRPIENRILILPSVTRNETGPYQCEIRDRYGGIRSDPVTLNVLYGPDLPRIYPSFTYYRSGEVLYLSCSADSNPPAQYSWTINEKFQLPGQKLFIRHITTKHSGLYVCSVRNSATGKESSKSMTVEVSAYSSSINYTSGNRN

SEQ ID NO: 112351 - DNA, 1287 bp, Artificial Sequence
  derived and/or modified sequence
atgggaaccctgagcgcgccaccttgtactcaaaggattaaatggaaaggtttattgctgaccgcatccctgctcaatttctggaacctaccaaccaccgcacaggtcactatcgaagctgagcccacaaaggtttctgagggcaaggacgtgctcctgctggtgcacaacctccctcagaatctgacaggatatatctggtacaagggccagatgagagatctttatcactatattaccagttatgtggtggatggtgagattataatctatggtccggcctattcaggccgggagaccgcatactccaacgcgtcattgttgatccagaatgttacaagggaagacgccggcagttacaccttacacatcatcaaaggcgatgacggcaccagaggggtgaccggcaggtttaccttcacgctccacttggagacccccaagccatctatctcatcgtctaacctgaatcctcgagagactatggaagccgttagtttaacttgcgatcctgaaacacccgacgctagctacctttggtggatgaacgggcagagcctgccgatgacgcattccctgaagctcagtgaaacaaaccgaaccctgtttttactgggagtcaccaaatacactgctgggccatatgaatgtgagattagaaaccccgtgtcagcttcacgttcagatccggtgacgttgaatttactgcctaagctgccaaagccatatattaccatcaataacttgaaccctagggagaataaggatgttctgaattttacctgcgagcccaaatcagaaaactacacatatatctggtggcttaatggacagagtctccccgtgtctcctcgtgtgaaaaggcccatcgaaaatcgaattctgatcctgccatccgttactcgaaatgagactgggccttaccagtgcgagatcagagatcgttatggaggaatccgttctgaccctgtcaccctgaatgtgctgtacggaccagacttacctaggatctacccatctttcacgtattaccggtccggtgaagtcctctacctgagctgcagcgcagattcaaatccaccagcccagtacagctggactattaacgaaaaattccaactgcccggccaaaagctattcattaggcatattaccactaagcatagcgggttgtatgtgtgtagtgtgcggaacagtgccaccggtaaagagtcatccaagtccatgaccgtcgaagtgagtgcatattcctcctcaattaactatactagtggaaataggaattag

SEQ ID NO: 112352 - DNA, 1287 bp, Artificial Sequence
  derived and/or modified sequence
atgggcaccctgagcgccccaccctgcacccagaggatcaagtggaagggcctgctgctgacagccagcctgctgaacttctggaacctgcccaccacagcccaggtgaccatcgaggccgagcccaccaaggtgtctgagggcaaggatgtgctgctgctggtgcacaacctgccccagaacctgaccggctacatctggtacaagggccagatgagggacctgtaccactacatcaccagctatgtggtggatggagagatcatcatctacggccctgcctacagcggccgggagacagcctacagcaatgccagcctgctgatccagaatgtgaccagagaagatgctggcagctacaccctgcacatcatcaagggagatgatggcacccggggcgtgacaggccgcttcaccttcaccctgcacctggagacccccaagcccagcatcagcagcagcaacctgaacccccgggagaccatggaggccgtgtccctgacctgtgaccctgagaccccagatgccagctacctgtggtggatgaatggccagagcctgcccatgacccacagcctgaagctgtctgagaccaacagaaccctcttcctgctgggcgtgaccaagtacacagctggcccctatgaatgtgagatccggaaccctgtgtctgccagcagaagtgaccctgtgaccctgaacctgctgcccaagctgcccaagccctacatcaccatcaacaacctgaacccccgggagaacaaggatgtgctgaacttcacctgtgagcccaagtctgagaactacacctacatctggtggctgaatggccagagcctgcctgtgagcccccgggtgaagaggcccattgaaaatcgcatcctgatcctgcccagcgtgaccagaaatgaaacaggcccctaccagtgtgagatccgggacagatatggaggcatccgcagtgaccctgtgaccctgaatgtgctgtatggccctgacctgccccgcatctaccccagcttcacctactaccgcagcggggaggtgctgtacctgagctgcagcgctgacagcaaccccccagcccagtacagctggaccatcaatgagaagttccagctgcccggccagaagctgttcatccgccacatcaccaccaagcacagcggcctgtatgtgtgcagcgtgagaaattctgccaccgggaaggagagcagcaagtccatgacagtggaggtgtctgcctacagcagcagcatcaactacaccagcggcaacagaaattag

SEQ ID NO: 112353 - DNA, 1287 bp, Artificial Sequence
  derived and/or modified sequence
atgggcaccctgagcgcccccccctgcacccagcggatcaagtggaaaggcctgcttctgacagcctctttgttgaacttctggaatctgcccaccactgctcaagtgactattgaagccgaacctacgaaggttagtgaggggaaagacgtgctgttacttgtgcacaaccttccccagaatttgacaggttacatctggtacaaaggccagatgcgcgatctataccactatatcacatcttatgtggttgacggggaaattatcatttatggacctgcctactctgggagggagacagcatattcgaacgcttctctattgatacagaatgtcacaagagaagatgctggttcttatacgctccatattataaagggtgatgatggaaccagaggcgttaccggcagatttacttttactctgcacctggagactcctaaaccctcgatttccagttcaaatctgaatcctcgggagacaatggaagctgtgagcttgacgtgcgaccctgaaactccggatgccagttatctgtggtggatgaacgggcagagtctaccaatgacacactcacttaagctttctgaaacgaatagaacacttttcctgctgggcgtcacaaaatacacagccgggccctatgaatgcgagatcagaaacccagtttccgcttccagaagcgaccctgtcacccttaatctccttccaaagcttcccaagccttacatcaccatcaacaacctcaatccaagggagaacaaggacgttctcaactttacgtgtgaaccaaagtcagagaactacacatacatctggtggctgaacggacagtctctgcccgtgtccccacgcgtcaaaagacctatagagaatcggatcctaatcctgccgagtgttacaaggaacgagactggcccataccaatgcgagatcagagaccgttatggcggtatccgctctgaccccgtgactctgaatgttctctatggacccgatctaccaaggatctaccctagctttacctattataggagtggagaagtgctttacctctcgtgtagcgccgactcaaatcctcctgctcagtattcctggactataaacgagaagttccaactgccgggacagaagctcttcatccggcatattaccacgaaacatagcggattatacgtttgttcagtgagaaacagtgctacaggaaaggagagctctaaaagcatgaccgtggaagtgtcggcatactcctctagcataaattatacaagtgggaataggaattag

SEQ ID NO: 112354 - DNA, 1858 bp, Artificial Sequence
  derived and/or modified sequence
ggaaggacagcacagctgacagccgtgctcagagagtttctggatcctaggcttatctccacagaggagaacacacaagcagcagagaccatgggaaccctctcagcccctccctgcacacagcgcatcaaatggaaggggctcctgctcacagcatcacttttaaacttctggaacctgcccaccactgcccaagtcacgattgaagccgagccaaccaaagtttccgaggggaaggatgttcttctacttgtccacaatttgccccagaatcttaccggctacatctggtacaaagggcaaatgagggacctctaccattacattacatcatatgtagtagacggtgaaataattatatatgggcctgcatatagtggacgagaaacagcatattccaatgcatccctgctgatccagaatgtcacccgggaggacgcaggatcctacaccttacacatcataaagggagatgatgggactagaggagtaactggacgtttcaccttcaccttacacctggagactcctaagccctccatctccagcagcaacttaaatcccagggagaccatggaggctgtgagcttaacctgtgaccctgagactccagacgcaagctacctgtggtggatgaatggtcagagcctccctatgactcacagcttgaagctgtccgaaaccaacaggaccctctttctattgggtgtcacaaagtatactgcaggaccctatgaatgtgaaatacggaacccagtgagtgccagccgcagtgacccagtcaccctgaatctcctcccgaagctgcccaagccctacatcaccatcaacaacttaaaccccagggagaataaggatgtcttaaacttcacctgtgaacctaagagtgagaactacacctacatttggtggctaaatggtcagagcctcccggtcagtcccagggtaaagcgacccattgaaaacaggatcctcattctacccagtgtcacgagaaatgaaacaggaccctatcaatgtgaaatacgggaccgatatggtggcatccgcagtgacccagtcaccctgaatgtcctctatggtccagacctccccagaatttacccttcattcacctattaccgttcaggagaagtcctctacttgtcctgttctgcggactctaacccaccggcacagtattcttggacaattaatgaaaagtttcagctaccaggacaaaagctctttatccgccatattactacaaagcatagcgggctctatgtttgctctgttcgtaactcagccactggcaaggaaagctccaaatccatgacagtcgaagtctctgctcctccaggaataggacgtcttcctttctttactccaatagagcagcggtgatgtcatttctgtatttcaggaagactggcagacagttgctttgattcttcctcaaagtatttaccatcagctacagtccaaaattgctttttcttcaaggagatttatggaaaagactctgacaaggactctggaatacaagctcctgataacttcaagatcataccactggactaagaactttcaaaattttaatgaacaggctgataccttcatgaaattcaagacaaagaagaaaaaaaactcaattttattggaataaataatcaaaaggataatgttttcataattttctatttgaaaatgtgctgagtctttgaatgttttattctccagatttatgaacttttttccttgaacaattggtaaagtatacttttgtaaacaaaaattgaaacatttgcttttgctgagtgccccagaattgggaaactattcatgagtattcatatgtttatggtaataaagttat

SEQ ID NO: 112355 - DNA, 1882 bp, Artificial Sequence
  derived and/or modified sequence
ggacagcacagctgacagccgtgctcagagagtttctggatcctaggcttatctccacagaggagaacacacaagcagcagagaccatgggaaccctctcagcccctccctgcacacagcgcatcaaatggaaggggctcctgctcacagcatcacttttaaacttctggaacctgcccaccactgcccaagtcacgattgaagccgagccaaccaaagtttccgaggggaaggatgttcttctacttgtccacaatttgccccagaatcttaccggctacatctggtacaaagggcaaatgagggacctctaccattacattacatcatatgtagtagacggtgaaataattatatatgggcctgcatatagtggacgagaaacagcatattccaatgcatccctgctgatccagaatgtcacccgggaggacgcaggatcctacaccttacacatcataaagggagatgatgggactagaggagtaactggacgtttcaccttcaccttacacctggagactcctaagccctccatctccagcagcaacttaaatcccagggagaccatggaggctgtgagcttaacctgtgaccctgagactccagacgcaagctacctgtggtggatgaatggtcagagcctccctatgactcacagcttgaagctgtccgaaaccaacaggaccctctttctattgggtgtcacaaagtatactgcaggaccctatgaatgtgaaatacggaacccagtgagtgccagccgcagtgacccagtcaccctgaatctcctcccgaagctgcccaagccctacatcaccatcaacaacttaaaccccagggagaataaggatgtcttaaacttcacctgtgaacctaagagtgagaactacacctacatttggtggctaaatggtcagagcctcccggtcagtcccagggtaaagcgacccattgaaaacaggatcctcattctacccagtgtcacgagaaatgaaacaggaccctatcaatgtgaaatacgggaccgatatggtggcatccgcagtgacccagtcaccctgaatgtcctctatggtccagacctccccagaatttacccttcattcacctattaccgttcaggagaagtcctctacttgtcctgttctgcggactctaacccaccggcacagtattcttggacaattaatgaaaagtttcagctaccaggacaaaagctctttatccgccatattactacaaagcatagcgggctctatgtttgctctgttcgtaactcagccactggcaaggaaagctccaaatccatgacagtcgaagtctctgcttatagcagttcaataaactatacttctgggaaccgtaattgaaacatttacttttgctttctacctgactgccccagaattgggcaactattcatgagaattgatatgtttatggtaatacacatatttgcacaagtacagtaacaatctgctttctttgtaacatgacacatttgaaatcattggttatattaccaatgctttgattcggatgttatattaaaaacatagatagaatgaaccaatatgaactgcaggcaaagtctgaagtcagccttggtttggcttcctattctcaagaggtttgtgaagatttaatctcagattccttataaaaacttagagaaaagaaaattttagaagacagcctacatggtccattgctactcttgctgcacttatgtaaacaatcagaccacatttgaagaaactccacctattttgcaaacaaacttattctactgaaattatcattggtaaaagtagagatgcccatagagggaaaaattatgtggaaaataaaaactgtagtatacctgttatgagactgc

SEQ ID NO: 112356 - DNA, 1287 bp, Artificial Sequence
  derived and/or modified sequence
atgggtaccctctcggccccaccctgcactcagcgaattaaatggaaggggctcctacttactgcatctctgctgaatttctggaacctgcccacgacagcccaggtgactattgaagccgaacctactaaagtgtctgagggcaaagacgtgctgctgcttgttcacaacctgccacagaacctgactggttacatatggtataaggggcagatgagagacctgtatcactatattacatcctacgtagtagacggggaaatcattatctacggcccagcttactcaggtcgcgagaccgcctatagcaacgcctctctgctcatacagaacgtaacacgcgaagacgctgggtcttacacgctccatatcatcaagggcgatgatggtacccgcggtgttaccggacggttcacattcaccttgcacctagagacgcccaagccttctatatcttcgagcaatctcaatcccagggagacaatggaggccgtcagcctgacatgtgacccggaaacccctgatgcatcctacctctggtggatgaacggacagtctctgcctatgactcactccctgaagctgtcggagacaaatcgcaccctattcttactgggagtgaccaaatatacagctgggccttatgagtgcgaaatcaggaacccggtgagcgcttccagatccgatcctgtaactcttaatctcttacccaagctcccgaaaccctacatcactataaataacctgaacccaagagaaaacaaggacgtgctcaattttacgtgcgagcccaagagcgaaaactacacctatatttggtggctaaacggacagagcttacctgtttccccgagggtgaaaaggccaatagaaaacaggattctgattctgccaagtgtgaccaggaatgaaacaggcccatatcagtgtgagatcagagacagatatggagggataaggagcgacccagtcacgttgaatgtactatacggcccagacctgcccaggatctacccttccttcacgtattatcgatccggcgaggttctgtatttgagctgctcggccgactccaatcctcctgcacagtactcctggacaataaacgagaaattccagctccctggacagaaactttttattaggcacatcaccaccaaacattctggtctttacgtttgtagtgtgaggaattccgcaactgggaaggaatcttccaaaagcatgacagtcgaagtctcggcctatagcagcagcattaactacacaagcggaaaccgcaattag

SEQ ID NO: 112357 - DNA, 1287 bp, Artificial Sequence
  derived and/or modified sequence
atgggcaccctgagcgcccccccctgcacccagagaatcaagtggaagggcctgctgctgaccgccagcctgctgaacttctggaacctgcccaccaccgcccaggtgaccatcgaggccgagcccaccaaggtgagcgagggcaaggacgtgctgctgctggtgcacaacctgccccagaacctgaccggctacatctggtacaagggccagatgagagacctgtaccactacatcaccagctacgtggtggacggcgagatcatcatctacggccccgcctacagcggcagagagaccgcctacagcaacgccagcctgctgatccagaacgtgaccagagaggacgccggcagctacaccctgcacatcatcaagggcgacgacggcaccagaggcgtgaccggcagattcaccttcaccctgcacctggagacccccaagcccagcatcagcagcagcaacctgaaccccagagagaccatggaggccgtgagcctgacctgcgaccccgagacccccgacgccagctacctgtggtggatgaacggccagagcctgcccatgacccacagcctgaagctgagcgagaccaacagaaccctgttcctgctgggcgtgaccaagtacaccgccggcccctacgagtgcgagatcagaaaccccgtgagcgccagcagaagcgaccccgtgaccctgaacctgctgcccaagctgcccaagccctacatcaccatcaacaacctgaaccccagagagaacaaggacgtgctgaacttcacctgcgagcccaagagcgagaactacacctacatctggtggctgaacggccagagcctgcccgtgagccccagagtgaagagacccatcgagaacagaatcctgatcctgcccagcgtgaccagaaacgagaccggcccctaccagtgcgagatcagagacagatacggcggcatcagaagcgaccccgtgaccctgaacgtgctgtacggccccgacctgcccagaatctaccccagcttcacctactacagaagcggcgaggtgctgtacctgagctgcagcgccgacagcaacccccccgcccagtacagctggaccatcaacgagaagttccagctgcccggccagaagctgttcatcagacacatcaccaccaagcacagcggcctgtacgtgtgcagcgtgagaaacagcgccaccggcaaggagagcagcaagagcatgaccgtggaggtgagcgcctacagcagcagcatcaactacaccagcggcaacagaaactag

SEQ ID NO: 112358 - protein, 245 aa, Artificial Sequence
  derived and/or modified sequence
MYQLDITLRRGQSLAARDRGGTSDPYVKFKIGGKEVFRSKIIHKNLNPVWEEKACILVDHLREPLYIKVFDYDFGLQDDFMGSAFLDLTQLELNRPTDVTLTLKDPHYPDHDLGIILLSVILTPKEGESRDVTMLMRKSWKRSSKFQTQSLRLSDLHRKSHLWRGIVSITLIEGRDLKAMDSNGLSDPYVKFRLGHQKYKSKIMPKTLNPQWREQFDFHLYEERCGISPGESHQSGRVNGCRRHW

SEQ ID NO: 112359 - protein, 692 aa, Artificial Sequence
  derived and/or modified sequence
MLDSCKLKSACNLPFICNKKIINTAGTSNAEVPLADPGMYQLDITLRRGQSLAARDRGGTSDPYVKFKIGGKEVFRSKIIHKNLNPVWEEKACILVDHLREPLYIKVFDYDFGLQDDFMGSAFLDLTQLELNRPTDVTLTLKDPHYPDHDLGIILLSVILTPKEGESRDVTMLMRKSWKRSSKFQTQSLRLSDLHRKSHLWRGIVSITLIEGRDLKAMDSNGLSDPYVKFRLGHQKYKSKIMPKTLNPQWREQFDFHLYEERGGVIDITAWDKDAGKRDDFIGRCQVDLSALSREQTHKLELQLEEGEGHLVLLVTLTASATVSISDLSVNSLEDQKEREEILKRYSPLRIFHNLKDVGFLQVKVIRAEGLMAADVTGKSDPFCVVELNNDRLLTHTVYKNLNPEWNKVFTFNIKDIHSVLEVTVYDEDRDRSADFLGKVAIPLLSIQNGEQKAYVLKNKQLTGPTKGVIYLEIDVIFNAVKASLRTLIPKEQKYIEEENRLSKQLLLRNFIRMKRCVMVLVNAAYYVNSCFDWDSPPRSLAAFVVVEDMLEDEEEEDDKDDKDSEKKGFINKIYAIQEVCVSVQNILDEVASFGERIKNTFNWTVPFLSWLAIVALCVFTAILYCIPLRYIVLVWGINKFTKKLRSPYAIDNNELLDFLSRVPSDVQVVQYQELKPDPSHSPYKRKKNNLG

SEQ ID NO: 112360 - DNA, 738 bp, Artificial Sequence
  derived and/or modified sequence
atgtaccagctggacatcaccctgagaagaggccagagcctggccgccagagacagaggcggcaccagcgacccctacgtgaagttcaagatcggcggcaaggaggtgttcagaagcaagatcatccacaagaacctgaaccccgtgtgggaggagaaggcctgcatcctggtggaccacctgagagagcccctgtacatcaaggtgttcgactacgacttcggcctgcaggacgacttcatgggcagcgccttcctggacctgacccagctggagctgaacagacccaccgacgtgaccctgaccctgaaggacccccactaccccgaccacgacctgggcatcatcctgctgagcgtgatcctgacccccaaggagggcgagagcagagacgtgaccatgctgatgagaaagagctggaagagaagcagcaagttccagacccagagcctgagactgagcgacctgcacagaaagagccacctgtggagaggcatcgtgagcatcaccctgatcgagggcagagacctgaaggccatggacagcaacggcctgagcgacccctacgtgaagttcagactgggccaccagaagtacaagagcaagatcatgcccaagaccctgaacccccagtggagagagcagttcgacttccacctgtacgaggagagatgcggcatcagccccggcgagagccaccagagcggcagagtgaacggctgcagaagacactggtag

SEQ ID NO: 112361 - DNA, 2079 bp, Artificial Sequence
  derived and/or modified sequence
atgctggacagctgcaagctgaagagcgcctgcaacctgcccttcatctgcaacaagaagatcatcaacaccgccggcaccagcaacgccgaggtgcccctggccgaccccggcatgtaccagctggacatcaccctgagaagaggccagagcctggccgccagagacagaggcggcaccagcgacccctacgtgaagttcaagatcggcggcaaggaggtgttcagaagcaagatcatccacaagaacctgaaccccgtgtgggaggagaaggcctgcatcctggtggaccacctgagagagcccctgtacatcaaggtgttcgactacgacttcggcctgcaggacgacttcatgggcagcgccttcctggacctgacccagctggagctgaacagacccaccgacgtgaccctgaccctgaaggacccccactaccccgaccacgacctgggcatcatcctgctgagcgtgatcctgacccccaaggagggcgagagcagagacgtgaccatgctgatgagaaagagctggaagagaagcagcaagttccagacccagagcctgagactgagcgacctgcacagaaagagccacctgtggagaggcatcgtgagcatcaccctgatcgagggcagagacctgaaggccatggacagcaacggcctgagcgacccctacgtgaagttcagactgggccaccagaagtacaagagcaagatcatgcccaagaccctgaacccccagtggagagagcagttcgacttccacctgtacgaggagagaggcggcgtgatcgacatcaccgcctgggacaaggacgccggcaagagagacgacttcatcggcagatgccaggtggacctgagcgccctgagcagagagcagacccacaagctggagctgcagctggaggagggcgagggccacctggtgctgctggtgaccctgaccgccagcgccaccgtgagcatcagcgacctgagcgtgaacagcctggaggaccagaaggagagagaggagatcctgaagagatacagccccctgagaatcttccacaacctgaaggacgtgggcttcctgcaggtgaaggtgatcagagccgagggcctgatggccgccgacgtgaccggcaagagcgaccccttctgcgtggtggagctgaacaacgacagactgctgacccacaccgtgtacaagaacctgaaccccgagtggaacaaggtgttcaccttcaacatcaaggacatccacagcgtgctggaggtgaccgtgtacgacgaggacagagacagaagcgccgacttcctgggcaaggtggccatccccctgctgagcatccagaacggcgagcagaaggcctacgtgctgaagaacaagcagctgaccggccccaccaagggcgtgatctacctggagatcgacgtgatcttcaacgccgtgaaggccagcctgagaaccctgatccccaaggagcagaagtacatcgaggaggagaacagactgagcaagcagctgctgctgagaaacttcatcagaatgaagagatgcgtgatggtgctggtgaacgccgcctactacgtgaacagctgcttcgactgggacagcccccccagaagcctggccgccttcgtggtggtggaggacatgctggaggacgaggaggaggaggacgacaaggacgacaaggacagcgagaagaagggcttcatcaacaagatctacgccatccaggaggtgtgcgtgagcgtgcagaacatcctggacgaggtggccagcttcggcgagagaatcaagaacaccttcaactggaccgtgcccttcctgagctggctggccatcgtggccctgtgcgtgttcaccgccatcctgtactgcatccccctgagatacatcgtgctggtgtggggcatcaacaagttcaccaagaagctgagaagcccctacgccatcgacaacaacgagctgctggacttcctgagcagagtgcccagcgacgtgcaggtggtgcagtaccaggagctgaagcccgaccccagccacagcccctacaagagaaagaagaacaacctgggctag

SEQ ID NO: 112362 - DNA, 246 bp, Artificial Sequence
  derived and/or modified sequence
atgctggacagctgcaagctgaagagcgcctgcaacctgcccttcatctgcaacaagaagatcatcaacaccgccggcaccagcaacgccgaggtgcccctggccgaccccggcatgtaccagctggacatcaccctgagaagaggccagagcctggccgccagagacagaggcggcaccagcgacccctacgtgaagttcaagatcggcggcaaggaggtgttcagaagcaagatcatccactag

SEQ ID NO: 112363 - DNA, 738 bp, Artificial Sequence
  derived and/or modified sequence
atgtatcagctggatattactcttcgaagggggcaatccctcgccgcacgcgatcgcggcgggacttcggacccttatgtcaaatttaaaatcggcggtaaggaagtgttcaggtcaaaaataatacataagaacctcaatccagtgtgggaagaaaaggcctgcatcctcgttgatcatctcagggaacctttatatattaaggtgtttgactacgacttcggtctgcaggacgacttcatgggctctgctttccttgacttgactcagcttgagctcaaccgcccaaccgacgttacactgacacttaaagacccacattacccagaccacgacctgggaattatcctgctgagtgtgattttaacaccaaaagagggggagtcccgagatgtgacgatgttgatgcggaaatcttggaaaagaagcagtaaatttcagacgcagtcgcttcggctgtcggatttgcaccgcaagtctcacctatggcgggggatcgttagcattaccctaatcgaaggcagagatctcaaggccatggacagtaacgggctttcggacccttatgtgaagttccgcctgggacaccaaaaatacaaaagtaagataatgccaaaaactctgaaccctcaatggcgggaacagtttgatttccacctttatgaggaaagatgtggtatcagtcctggggaatcgcaccagtctggtcgagtaaacggatgtaggaggcactggtag

SEQ ID NO: 112364 - DNA, 2079 bp, Artificial Sequence
  derived and/or modified sequence
atgctcgactcttgcaagcttaaatccgcctgcaatctgcctttcatttgcaataagaagatcattaatacggctgggacctccaatgctgaagtgcctttggctgaccccggcatgtatcaactggacataacactccgcagggggcagagtcttgccgcacgtgacagagggggcacatcagatccatatgtaaagtttaagataggtggtaaggaggtgttcaggtccaaaatcatacataagaatctgaatcctgtgtgggaagagaaggcatgcatcctggtagaccacttacgagagcccctgtacatcaaggtttttgactatgattttggactgcaggacgatttcatgggcagcgcgttcctggaccttacacagctggagctgaacaggcccacagacgtgaccctgacgctcaaagatccccactacccggatcacgatctcggtatcatactactcagtgtaattctcactccaaaagagggcgagagtcgggacgttacaatgctcatgagaaagtcgtggaagaggagcagtaagtttcagactcagtccctgagactgagtgatctccacaggaaatcacacttatggagggggatcgtaagcattacactgatcgaaggtagagacctaaaggccatggacagcaatggacttagcgacccctacgtgaaatttaggctgggccatcagaaatataagagtaaaatcatgcccaaaacacttaacccccaatggcgcgagcaattcgactttcatctgtatgaggaacgaggcggggttatcgacattactgcgtgggataaagacgcgggaaaaagagatgactttatcggccggtgccaggttgacttgtcagccttgagccgcgaacaaacgcacaagttggaactacagttagaagaaggcgaaggtcaccttgtcctactggtaaccctgaccgcctcagccacagtcagcatctccgatctgtccgttaattccctggaggaccagaaagagcgagaggagatcctcaaacgatatagtcccctgagaatcttccacaatctcaaggacgtgggctttctgcaagtcaaggtcatccgggctgaaggcttaatggcggccgatgtcacaggcaagagcgaccccttctgtgttgtcgaactaaataacgatcgcctgttgactcatactgtttataaaaatttgaatccagaatggaacaaggtttttaccttcaatataaaggatatccactctgtgctggaggttactgtgtatgacgaagacagggacaggtctgccgactttctgggcaaggttgccattccactgctctctattcagaacggcgagcaaaaggcctacgtgttgaagaataagcagctcacaggtcccacaaaaggcgttatctacctcgaaatcgacgtcatcttcaacgccgtgaaagcctccctgcggaccctaatccccaaggagcaaaaatatattgaggaggagaatcggctgagcaaacagttgctgttgcggaactttatccgcatgaagagatgtgtgatggtcctcgtaaacgcagcatattatgtgaacagttgttttgactgggactcacctcccagaagcctggccgcgttcgttgtggtggaggacatgcttgaggacgaagaagaggaagatgataaagatgacaaggactccgaaaagaaaggctttatcaacaagatctatgcgattcaagaagtctgtgtttccgtgcagaatatccttgacgaggttgcatcctttggagagagaatcaaaaacactttcaactggacagtaccattcctgagttggcttgccattgtcgcactttgtgtcttcacagctattctgtattgcattccactgcgctacatcgtgctggtgtggggtatcaataagttcactaagaagctgagaagtccttatgccatcgataataatgagctactggattttctttcacgggtaccatccgatgtccaggtggtgcaataccaggaactcaagccggacccgtctcactctccttataaacgaaagaagaataatctcgggtag

SEQ ID NO: 112365 - DNA, 246 bp, Artificial Sequence
  derived and/or modified sequence
atgctggacagttgtaagttgaaaagtgcctgtaacctcccgtttatttgcaataaaaaaatcatcaacacagcaggaactagcaatgccgaagtgccattagccgaccccggcatgtaccagttggatatcacattgcgcaggggacagagcttagccgcccgagacaggggcgggacatccgatccatacgtgaaatttaaaattgggggcaaagaagtgtttcgcagcaagatcatacattag

SEQ ID NO: 112366 - DNA, 738 bp, Artificial Sequence
  derived and/or modified sequence
atgtaccagctggacatcaccctgcggcggggccagagcctggccgcccgggaccggggcggcaccagtgacccctacgtgaagttcaagattggaggcaaggaggtgttccgcagcaagatcatccacaagaacctgaaccctgtgtgggaggagaaggcctgcatcctggtggaccacctgcgggagcccctgtacatcaaggtgtttgattatgactttggcctgcaggatgacttcatgggcagcgccttcctggacctgacccagctggagctgaaccggcccacagatgtgaccctgaccctgaaggacccccactacccagaccatgacctgggcatcatcctgctgagcgtcatcctgacccccaaggagggggagagcagagatgtgaccatgctgatgaggaagtcctggaagaggagcagcaagttccagacccagagcctgcggctgagtgacctgcacaggaagagccacctgtggaggggcatcgtgtccatcaccctcatcgagggccgggacctgaaggccatggacagcaatggcctgagtgacccctacgtgaagttccggctgggccaccagaagtacaagagcaagatcatgcccaagaccctgaacccccagtggagggagcagtttgacttccacctgtatgaggagcgctgtggcatcagccctggagagagccaccagagcggccgggtgaatggctgccgccgccactggtag

SEQ ID NO: 112367 - DNA, 2079 bp, Artificial Sequence
  derived and/or modified sequence
atgctggacagctgcaagctgaagagcgcctgcaacctgcccttcatctgcaacaagaagatcatcaacacagctggcaccagcaatgctgaggtgcccctggccgaccccggcatgtaccagctggacatcaccctgcggcggggccagagcctggccgcccgggaccggggcggcaccagtgacccctacgtgaagttcaagattggaggcaaggaggtgttccgcagcaagatcatccacaagaacctgaaccctgtgtgggaggagaaggcctgcatcctggtggaccacctgcgggagcccctgtacatcaaggtgtttgattatgactttggcctgcaggatgacttcatgggcagcgccttcctggacctgacccagctggagctgaaccggcccacagatgtgaccctgaccctgaaggacccccactacccagaccatgacctgggcatcatcctgctgagcgtcatcctgacccccaaggagggggagagcagagatgtgaccatgctgatgaggaagtcctggaagaggagcagcaagttccagacccagagcctgcggctgagtgacctgcacaggaagagccacctgtggaggggcatcgtgtccatcaccctcatcgagggccgggacctgaaggccatggacagcaatggcctgagtgacccctacgtgaagttccggctgggccaccagaagtacaagagcaagatcatgcccaagaccctgaacccccagtggagggagcagtttgacttccacctgtatgaggagcggggcggcgtcatcgacatcacagcctgggacaaggatgctgggaagagagatgacttcatcggccgctgccaggtggacctgagcgccctgagccgggagcagacccacaagctggagctgcagctggaggagggggagggccacctggtgctgctggtgaccctgacagccagcgccaccgtgtccatcagtgacctgtctgtgaacagcctggaggaccagaaggagcgggaggagatcctgaagcgctacagccccctgcgcatcttccacaacctgaaggatgtgggcttcctgcaggtgaaggtgatccgggcagagggcctgatggccgcagatgtgacaggcaagagtgaccccttctgtgtggtggagctgaacaatgaccggctgctgacccacacagtgtacaagaacctgaaccctgagtggaacaaggtgttcaccttcaacatcaaggacatccacagcgtgctggaggtgacagtgtatgatgaggaccgggacagatctgctgacttcctgggcaaggtggccatccccctgctgagcatccagaatggagagcagaaggcctacgtgctgaagaacaagcagctgaccggccccaccaagggcgtcatctacctggagattgatgtgatcttcaatgctgtgaaggccagcctgcggaccctcatccccaaggagcagaagtacatcgaggaggagaaccggctgagcaagcagctgctgctgaggaacttcatccgcatgaagagatgtgtgatggtgctggtgaatgctgcctactacgtgaacagctgctttgactgggacagccccccaagaagcctggccgcctttgtggtggtggaggacatgctggaggatgaggaggaggaggatgacaaggatgacaaggacagcgagaagaagggcttcatcaacaagatctatgccatccaggaggtgtgtgtgtctgtgcagaacatcctggatgaggtggccagctttggagagcgcatcaagaacaccttcaactggacagtgcccttcctgtcctggctggccatcgtggccctgtgtgtgttcaccgccatcctgtactgcatccccctgcgctacatcgtgctggtgtggggcatcaacaagttcaccaagaagctgcggagcccctatgccatcgacaacaatgagctgctggacttcctgagccgggtgcccagtgatgtgcaggtggtgcagtaccaggagctgaagccagaccccagccacagcccctacaagaggaagaagaacaacctgggctag

SEQ ID NO: 112368 - DNA, 246 bp, Artificial Sequence
  derived and/or modified sequence
atgctggacagctgcaagctgaagagcgcctgcaacctgcccttcatctgcaacaagaagatcatcaacacagctggcaccagcaatgctgaggtgcccctggccgaccccggcatgtaccagctggacatcaccctgcggcggggccagagcctggccgcccgggaccggggcggcaccagtgacccctacgtgaagttcaagattggaggcaaggaggtgttccgcagcaagatcatccactag

SEQ ID NO: 112369 - DNA, 1211 bp, Artificial Sequence
  derived and/or modified sequence
ctgcatgtttgatttagcaggtgaagtttttagtatttaatgtgagtattttagaaccccagatatgatgtttgttatgtaatctgtactaacagttttgcaatgggaaactcttcccttactggtttgagagttgagtcatatcctgtgaatctaaagctacgttatttaaacatcacgggttcttcttactttcattccaagtcgctgctgtgcagagcagcaagtgctccgtgcagggctgttgctatcacttggaggtgaacagcctcttttgccggtattcagtgaagaaagcaagtctaaatatgcagttctctcactggagtgaaagatgttttgttcatttctaatcaactatgctagacagctgcaagctgaaaagtgcctgcaatttgccatttatttgtaataagaaaataataaacactgctggaaccagtaatgcagaagtccccttggctgatcccggaatgtaccagctggacattacattaagaaggggtcaaagtttagctgctcgagatcgaggagggacgagtgatccatatgtgaagtttaaaatcggaggaaaagaagtttttagaagtaagataatacacaagaacctcaaccctgtgtgggaagaaaaagcttgtattctggttgatcatcttagggagccattgtatataaaggtatttgactatgattttggactacaggatgactttatgggctcagcctttctggatctgacacaattggagttaaacaggcccacagatgtgacccttactctgaaagatcctcattatcctgaccatgatcttggaatcattttgctctcagtcatccttacccctaaagaaggagagtccagggatgtgacaatgctaatgaggaagagttggaaaagatcaagtaagtttcagacccaaagtttacgcctatcagacctacacagaaaatcgcatctttggagaggaatagtcagcatcaccttgattgaagggagagacctcaaggccatggattccaacgggttgagcgatccctacgtgaagttccggcttgggcatcagaagtacaagagcaagattatgccaaaaacgttgaatcctcagtggagggaacaatttgattttcacctttatgaagaaagatgtgggatttctccaggtgaaagtcatcagagcggaagggttaatggctgccgacgtcactggtaa

SEQ ID NO: 112370 - DNA, 3159 bp, Artificial Sequence
  derived and/or modified sequence
attccaagtcgctgctgtgcagagcagcaagtgctccgtgcagggctgttgctatcacttggaggtgaacagcctcttttgccggtattcagtgaagaaagcaagtctaaatatgcagttctctcactggagtgaaagatgttttgttcatttctaatcaactatgctagacagctgcaagctgaaaagtgcctgcaatttgccatttatttgtaataagaaaataataaacactgctggaaccagtaatgcagaagtccccttggctgatcccggaatgtaccagctggacattacattaagaaggggtcaaagtttagctgctcgagatcgaggagggacgagtgatccatatgtgaagtttaaaatcggaggaaaagaagtttttagaagtaagataatacacaagaacctcaaccctgtgtgggaagaaaaagcttgtattctggttgatcatcttagggagccattgtatataaaggtatttgactatgattttggactacaggatgactttatgggctcagcctttctggatctgacacaattggagttaaacaggcccacagatgtgacccttactctgaaagatcctcattatcctgaccatgatcttggaatcattttgctctcagtcatccttacccctaaagaaggagagtccagggatgtgacaatgctaatgaggaagagttggaaaagatcaagtaagtttcagacccaaagtttacgcctatcagacctacacagaaaatcgcatctttggagaggaatagtcagcatcaccttgattgaagggagagacctcaaggccatggattccaacgggttgagcgatccctacgtgaagttccggcttgggcatcagaagtacaagagcaagattatgccaaaaacgttgaatcctcagtggagggaacaatttgattttcacctttatgaagaaagaggaggagtcattgatatcactgcatgggacaaagatgctgggaaaagggatgatttcattggcaggtgccaggtcgacctgtcagccctcagtagggaacagacgcacaagctggagttgcagctggaagagggtgagggacacctggtgctgctggtcactctgacagcatcagccacagtcagcatctctgacctgtctgtcaactccctggaggaccagaaggaacgagaggagatattaaagagatatagcccattgaggatatttcacaacctgaaagatgtgggatttctccaggtgaaagtcatcagagcggaagggttaatggctgccgacgtcactggaaaaagtgacccattttgtgtggtagaactgaacaacgatagactgctaacacatactgtctacaaaaatctcaatcctgagtggaataaagtcttcacgttcaacattaaagatatccattcagttcttgaagtgacagtttatgatgaagatcgggatcgaagtgctgactttctgggcaaagttgctataccattgctgtctattcaaaatggtgaacagaaagcctacgtcttgaaaaacaagcagctgacagggccaacaaagggggtcatctatcttgaaatagatgtgatttttaatgctgtgaaagccagcttacgaacattaatacccaaagaacagaagtacattgaagaggaaaacagactctctaaacagctgctactaagaaactttatcagaatgaaacgttgtgtcatggtgctggtaaatgctgcatactacgttaatagttgctttgattgggattcacccccaaggagtctcgctgcttttgtggtagtggaggacatgctagaggacgaggaagaagaagatgacaaagatgacaaggacagtgaaaaaaagggatttataaataaaatctatgccatccaggaggtatgtgtcagtgtccagaacatcctagatgaagtggcttcctttggcgaaaggataaagaatactttcaactggactgtcccattcttaagctggctggccattgtagccctctgtgtgttcacagccatcctgtactgcattccgctgagatacattgtccttgtctggggcatcaataaatttacaaaaaagcttcggagtccatatgcaattgataacaatgaactacttgacttcctttccagagtcccttcagatgtacaagtggtgcaataccaagaactgaaaccagatccttctcatagcccatataaaagaaagaaaaacaatcttggctagccagctcccagcactgaggagaccagcatctgtttgggaagataaaagaaaaagccctcagcctcagcagcatttcctttctttctgctttttatttattttgcctttttatcatgatcgagagaatctgtaaatagtgtacaaaggcatatgtctttgaatatatacttctattgtacagactcaacttgataaaggttttgctactgctgtgtcaaaaccttgttagctgtggataataatataacacactgaaagaacaaatataagaatgataacactggaagatatattcttatctaattactagtggattaaatactcacctgtgctctgattaaatctacatcaattgtaaatgtcgatttgattttaaagtttttttttaatgcgactattttttatctgaaaagtaatccattacacttttctatgttttatacatttcaaaagggagggaaattccaaagcctgaataatggaatggatacatttcaatttaacatatattctggctttagatcccgacattcactcctgtgcaaattacttaggtatgacttaggctaattttaagctaataagtgaaggtacattcactccctcaagagaatcaatactcagaaggttacaaagttttctttatagaatttcaatcaatcattccatctaaaaccttaaaatctctacaggactacataacataaatactgccagtttataaacgattgcctatctgaatttttatacctaccactactttaatttatacagttagttagcaaattagcaacccagtaagtacagttatcaaaaatactaggaaactatatccatatcgcttttggtgtcagattgtatctgtgcatctaaaaatattttaataaatactcaagtgctctcagagaaaaaaaaaa

SEQ ID NO: 112371 - DNA, 483 bp, Artificial Sequence
  derived and/or modified sequence
cctgttgtggcttttgccatgaggaagaggttgactactaacactgcatgtttgatttagcaggtgaagtttttagtatttaattcgctgctgtgcagagcagcaagtgctccgtgcagggctgttgctatcacttggaggtgaacagcctcttttgccggtattcagtgaagaaagcaagtctaaatatgcagttctctcactggagtgaaagatgttttgttcatttctaatcaactatgctagacagctgcaagctgaaaagtgcctgcaatttgccatttatttgtaataagaaaataataaacactgctggaaccagtaatgcagaagtccccttggctgatcccggaatgtaccagctggacattacattaagaaggggtcaaagtttagctgctcgagatcgaggagggacgagtgatccatatgtgaagtttaaaatcggaggaaaagaagtttttagaagtaagataatacaca

SEQ ID NO: 112372 - DNA, 738 bp, Artificial Sequence
  derived and/or modified sequence
atgtaccagctggacatcaccctgcggcggggccagagcctggccgcaagggataggggcggtacctctgatccatacgtcaaattcaagatcggcggcaaggaggtttttcgcagtaagattatccacaaaaacctgaaccccgtgtgggaggagaaagcctgtatacttgtggatcaccttagggaacctctgtacataaaagtgtttgactatgattttggcctgcaggacgacttcatgggcagcgctttcctggatctgacacagctggagttgaaccggcctaccgatgtgacgcttacccttaaggatccacactatcccgatcacgacctggggatcatcctgcttagtgtcattctgacgccaaaggagggtgagtctcgagatgtaacaatgctgatgaggaaatcttggaagcggtcgtcgaaatttcagacgcagagtctgcgattgagcgacctgcaccgcaaaagccatctttggcggggaattgtgagcattaccctcattgagggcagagacttaaaggccatggacagcaatgggctgagcgatccctacgtcaaattcagattaggccaccaaaaatacaaaagtaagattatgcccaagaccctgaatccacagtggcgggaacagttcgactttcacctgtatgaagaaagatgtggcattagtcccggtgaatcccaccaaagcgggcgcgtgaatggctgcagaagacattggtag

SEQ ID NO: 112373 - DNA, 2079 bp, Artificial Sequence
  derived and/or modified sequence
atgctggacagctgcaagctgaagagcgcctgcaacctgcccttcatttgcaataagaaaatcataaacaccgcaggtacatcaaacgccgaggtacccctggccgatcctggcatgtatcagttggatatcacccttcgaaggggacagagcctagcagccagagacagaggcgggacgtccgacccctatgtgaagtttaagattggaggaaaagaggtgtttcgaagcaaaataatccacaaaaatcttaatcccgtgtgggaagagaaggcatgcattctggttgaccatctgcgcgaaccactgtatattaaggtgttcgattatgacttcgggctacaggatgactttatggggagtgcattcctagatctcacgcagctggaattaaacaggcctactgatgtgacgttgaccctaaaagaccctcattacccagaccacgatcttggaatcattctgctgtcagtgatactgacccctaaggaaggtgagtctagggatgtgactatgctgatgcgcaaatcttggaagagaagctctaagttccaaactcagtccctgagactttctgacctccacaggaaaagccacttatggagaggcatcgtatccattaccttgatcgaaggtagggatctgaaggcaatggacagcaacgggttgtccgacccatacgtgaagttcaggctgggacaccagaaatataaaagtaagattatgccgaaaacactgaacccgcaatggcgtgaacagttcgatttccacctctacgaagaacgtgggggggtgatcgatatcacagcatgggacaaagatgccggaaagcgggacgacttcatcggcagatgccaggtggacctgtccgcactaagtcgggagcagactcacaaattagagttacaactggaggagggtgagggccacttagtcctcctcgtcacgctgacagcttcagcaaccgtgtcgattagcgacctttccgtcaactctctcgaggaccagaaggaaagagaagagattctgaagcggtactcccctctgcgcatcttccacaacttgaaggacgtgggcttcctgcaggtgaaggtaatccgagcggaaggcctcatggccgccgacgtcaccgggaaatcagaccctttctgcgtcgtcgagttaaacaatgacagactattgacacatacggtctataagaatctcaatccagagtggaataaggtgttcactttcaatataaaggacatccattcggtgcttgaggtgactgtttacgatgaggacagagaccgaagcgccgatttcttagggaaggttgcaattcccctgcttagcatccaaaatggcgagcaaaaggcatacgtgctcaagaacaagcagctcaccggaccaacaaagggcgtgatctaccttgaaatagacgttatcttcaacgcagtgaaggcttcactgagaactctgatcccgaaagaacagaagtacatcgaggaggagaatcgtctgtctaagcagcttctgctgcggaactttatccggatgaagcggtgcgtcatggtcctggtcaacgctgcatactacgttaattcatgttttgactgggacagcccaccaaggtccctcgctgctttcgttgttgtggaagacatgctggaagacgaggaggaggaggatgataaggatgacaaagacagcgagaagaaaggatttatcaataagatttatgcaattcaggaggtgtgtgttagcgtacaaaacatcctggatgaggtggccagcttcggcgaaagaataaaaaatacatttaactggaccgtgcccttcctgtcatggctggccattgtcgcgctttgtgtcttcacagcgatcctgtattgtataccactacgctacattgtgctcgtgtggggaattaacaagtttacaaagaagttacggagtccatatgccatcgacaataatgaactcctggacttccttagtcgtgtgccctctgatgtgcaagtggtgcagtaccaggagctgaagccagaccctagtcacagcccctacaagcggaaaaaaaataacctgggctag

SEQ ID NO: 112374 - DNA, 246 bp, Artificial Sequence
  derived and/or modified sequence
atgctggacagctgcaagctgaagagcgcctgcaacctgcccttcatatgcaacaaaaaaatcattaacactgcaggcacctccaatgccgaggtgccactggctgatcctggcatgtatcagctggatattacactccgccgtggacagagtctagccgcacgagataggggtggcacctctgatccctatgtgaaatttaaaatcggagggaaagaagtgttcaggtcaaagattatccattag

SEQ ID NO: 112375 - DNA, 738 bp, Artificial Sequence
  derived and/or modified sequence
atgtatcagcttgacattaccctgagaagagggcagagcctcgcggctagagatcgcggtggcacgagcgatccttatgtgaagttcaagatcggcggaaaagaggtgttccgttctaagatcatccataaaaatctgaacccagtatgggaagagaaggcatgcatactcgtggaccacttgcgggagcccctgtacatcaaagtgttcgactacgactttggcctgcaggatgattttatgggtagcgcattcctggatctaacccagctggaactgaatagacctactgatgtcacactgacattgaaagatccacactacccagaccacgatctgggaattattttgctttccgtgatcctcacccccaaagaaggcgagagccgtgacgtgacaatgctcatgcggaagtcatggaagagatcttccaagttccaaacccagagtttgcgtttgtcagacctacataggaaatcacacctttggaggggcatcgtgtcgatcacattaatagagggcagggatttgaaggccatggattctaatggactgtccgacccttacgtaaaatttcggttaggacatcagaagtacaagagtaaaattatgccaaagactttgaacccgcagtggagggagcagttcgactttcacctgtatgaagagcgatgtggcatttccccaggggaaagccaccagtcaggcagggtgaacggatgtcggaggcattggtag

SEQ ID NO: 112376 - DNA, 2079 bp, Artificial Sequence
  derived and/or modified sequence
atgctcgactcctgcaaactgaagtccgcatgtaacctgcctttcatttgtaacaagaagatcatcaataccgctggaaccagcaacgccgaggtgcccctcgccgacccaggtatgtaccaactcgatattactttaagacgcggtcagagccttgccgcacgcgatcgaggaggaacgtctgacccatatgtgaaatttaaaattggtgggaaggaggtgttccgctcgaagataatccataagaatttgaaccccgtatgggaagagaaggcctgcattctcgtcgatcacctcagggagcccctttatatcaaagtgttcgactacgatttcgggcttcaggacgatttcatgggtagcgcctttctcgaccttacacagttggagctcaacaggccaactgacgtgacgctgactctgaaagacccccactacccagaccatgacctgggcattattcttctgagcgttatcctgaccccaaaggaaggcgagtcccgcgacgtaactatgctcatgagaaagagctggaagcgatctagtaaatttcaaactcagagccttcgtctgagtgatctgcataggaaaagtcacctgtggagggggattgtttctattaccctcatcgagggacgtgacttaaaggccatggacagcaacggtctttccgacccctatgtgaaattccgattaggccaccagaaatataaatcaaaaattatgcccaagaccctgaatccgcagtggcgcgaacagttcgactttcatctatacgaggagcggggaggcgtgatcgacattaccgcctgggacaaggacgccggaaagcgggacgattttattgggaggtgtcaggtagacctgtctgctctgtcacgagagcagacacataagttagaacttcagttggaggaaggcgaggggcatttggtgctcctggtgactctgactgcaagtgctaccgtcagtatttccgacctatctgtgaattccctggaagatcagaaagaaagggaggaaatactaaagagatactcaccccttaggatcttccacaacctgaaagatgttggattcctccaggtaaaagtcattagagcggagggcttgatggctgccgacgtcaccggaaagagtgacccattttgtgtggtggaactcaataacgaccgcctcctaacccatacagtctataagaatctgaacccagagtggaacaaagtgttcacattcaatatcaaggacatacattccgtgcttgaggtgactgtctatgatgaagatagggatcggtccgccgattttcttgggaaagtggccatccctttactgagtatccagaacggcgagcagaaagcatacgtgttgaaaaataagcaactgactgggccaaccaaaggcgtgatctatcttgaaattgacgtgatattcaacgcggtcaaggcttcccttcgcacgctgatccccaaggagcagaagtatattgaggaagaaaacagactgagtaaacagcttctactacgaaatttcattagaatgaagcgttgcgttatggtgctggtcaatgcagcttactacgtgaatagctgcttcgattgggactccccacccagatctctggcagcattcgtagtggtagaagatatgctggaagatgaggaggaggaggacgacaaggatgataaggatagcgagaagaaaggattcataaacaagatctatgcgatccaggaagtatgcgtctcagtgcagaatatattggacgaagttgcatcttttggagagagaatcaagaacactttcaattggacagtcccctttctgtcttggctggccatagtggcattatgcgtgttcaccgccatcctgtattgtatcccactgcgttacatcgtacttgtgtggggtatcaataaatttacaaagaaactgcgcagcccgtacgccatcgataacaatgagctgctcgacttcctgagccgtgtaccgagtgatgtccaggtggttcagtatcaagagctcaagccagatccctctcacagcccttacaaaaggaaaaaaaataatctcggttag

SEQ ID NO: 112377 - DNA, 246 bp, Artificial Sequence
  derived and/or modified sequence
atgcttgacagctgtaagctaaagtctgcatgtaacctgcccttcatatgcaacaaaaaaattatcaatacagcaggaacctccaacgcagaggttccactggcagaccccggaatgtatcagctggacattaccctgcgccgtggtcaatctttagcagctcgagatcggggtgggacatccgatccatatgtcaagttcaaaatcggaggcaaagaggtttttcggtctaagataatccactag

SEQ ID NO: 112378 - protein, 279 aa, Artificial Sequence
  derived and/or modified sequence
MENSEKTEVVLLACGSFNPITNMHLRLFELAKDYMNGTGRYTVVKGIISPVGDAYKKKGLIPAYHRVIMAELATKNSKWVEVDTWESLQKEWKETLKVLRHHQEKLEASDCDHQQNSPTLERPGRKRKWTETQDSSQKKSLEPKTKAVPKVKLLCGADLLESFAVPNLWKSEDITQIVANYGLICVTRAGNDAQKFIYESDVLWKHRSNIHVVNEWIANDISSTKIRRALRRGQSIRYLVPDLVQEYIEKHNLYSSESEDRNAGVILAPLQRNTAEAKT

SEQ ID NO: 112379 - DNA, 840 bp, Artificial Sequence
  derived and/or modified sequence
atggagaacagtgagaaaaccgaggttgttttgctggcttgcgggtcatttaatccgataacaaacatgcaccttcggctgttcgagctggctaaggattacatgaatggcaccggccggtatacagttgtgaaaggaatcattagtcctgtgggagatgcctacaaaaagaagggcctgatccctgcttaccacagggtgatcatggcagagcttgctactaagaatagcaagtgggtcgaagttgacacttgggaatcacttcaaaaggagtggaaagagactttgaaggtgttgaggcaccatcaggagaagcttgaggcgtccgattgcgaccatcagcaaaactctccaaccctggagcggccggggaggaagcgtaaatggaccgagacccaggactcctctcagaagaagagcctcgaacctaagaccaaagcagtgccaaaggttaagctgctttgtggtgcggacctgcttgagagttttgcggtgcccaacttgtggaaaagcgaggatataactcagatagttgcaaactatgggctgatctgcgttaccagggctggaaacgacgctcagaagttcatatacgaaagcgatgttctatggaaacacagatcaaatattcacgttgtcaacgagtggattgcaaatgatatcagcagtacaaagatccgtagagccctgcggaggggccaatctatccgatatctggtccctgatctggtgcaggagtatattgagaaacacaacctctactcttcagaaagcgaagacaggaacgcgggggtgatactggctcccctgcagcgcaatacagccgaggctaaaacctag

SEQ ID NO: 112380 - DNA, 840 bp, Artificial Sequence
  derived and/or modified sequence
atggaaaacagcgagaagactgaggtcgtcctactggcttgcggatcattcaacccaataacgaacatgcatcttaggctgtttgagctggcaaaggactacatgaacggcaccggacgctatacagtagtgaaaggaattattagtccagtgggcgacgcctataagaagaaagggctcattcccgcatatcatagagtgatcatggccgagttagcaactaaaaatagtaaatgggtagaggtcgacacctgggagagcctacagaaagagtggaaggagaccctaaaagtcctgaggcaccatcaggagaagctggaagcctcagactgcgaccaccagcaaaatagtccaactctagaacggccgggacgtaagcgaaaatggactgagacacaggactcaagtcaaaagaaaagcctggaacccaagaccaaagccgtgcccaaagttaaactgctctgcggcgctgacctgttggagtcctttgccgtccccaacttgtggaaatctgaggacataacacagattgttgctaactatggtctaatctgcgtcacacgcgctggaaacgatgcacagaaattcatttatgagtcagacgttttatggaagcatagaagcaacatccacgtggtcaatgaatggattgccaacgatatatcgagtacaaaaattcggcgggctctgaggaggggacagagtatcaggtatttagtgccagacctcgtccaggagtacatcgaaaaacacaacctctacagctccgagtcagaggatcgcaacgccggggtgattctggcccctctgcagagaaatacagctgaggcgaaaacatag

SEQ ID NO: 112381 - DNA, 3781 bp, Artificial Sequence
  derived and/or modified sequence
gagagtgcgaccgagatgttccactcgctggcgtccgggccgctggtgatctccggtagcactcgggccggcggacagtgagggcgcgacaacaagggaggtgtcacagttttccatttagatcaacaacttcaagttcttaccatggaaaattccgagaagactgaagtggttctccttgcttgtggttcattcaatcccatcaccaacatgcacctcaggttgtttgagctggccaaggactacatgaatggaacaggaaggtacacagttgtcaaaggcatcatctctcctgttggtgatgcctacaagaagaaaggactcattcctgcctatcaccgggtcatcatggcagaacttgctaccaagaattctaaatgggtggaagttgatacatgggaaagtcttcagaaggagtggaaagagactctgaaggtgctaagacaccatcaagagaaattggaggctagtgactgtgatcaccagcagaactcacctactctagaaaggcctggaaggaagaggaagtggactgaaacacaagattctagtcaaaagaaatccctagagccaaaaacaaaagctgtgccaaaggtcaagctgctgtgtggggcagatttattggagtcctttgctgttcccaatttgtggaagagtgaagacatcacccaaatcgtggccaactatgggctcatatgtgttactcgggctggaaatgatgctcagaagtttatctatgaatcggatgtgctgtggaaacaccggagcaacattcacgtggtgaatgaatggatcgctaatgacatctcatccacaaaaatccggagagccctcagaaggggccagagcattcgctacttggtaccagatcttgtccaagaatacattgaaaagcataatttgtacagctctgagagtgaagacaggaatgctggggtcatcctggcccctttgcagagaaacactgcagaagctaagacataggaattctacagcatgatatttcagacttcccatttggggatctgaaacaatctgggagttaataactggggaaagaagttgtgatctgttgcctaaactaaagcttaaaagtttagtaaaaatcgtctgggcacagtggctcacgcctgtaatcccagcactttgggaggctgaggcaggtggatcacggggtcaagagatcgagaccatcctggccaatatggtgaaaccccatctctactaaaaatacaaaaattagctgtgtgtggtggcacgtgcctgtagtcccagctacttgggaggctgaggcaggagaatcacttgaccccaggtggtggaggttgcagtgagccaagattgcaccattgcactccagcctggcgacagagcaagactctgtctcaaaaaaaaaaaaaaatttagtaaaaatcaatggtaagctaaaataagtttttgtttgtttatttgtttttgagatggagtctctactaaaaatacaaaaaattagccaggcatggtgccgcataactataatcccagctacttgggaggctgaggcaggagaatcgcttgaacccgggaggcacaggttccagtgagccaaggttgtgccactgcactccagcctgggcaaaaaagcaaaactccatctcaaagagaaaaaaaaaaaagaccgggtgtggtggctcacacctgtaatcccagcactttgggaggcctaagtgggtggatcacgtgaggtcaagagttcaagaccagcctggccaatatggtgaaaccccatctctactaagaatacaaaaaattagctgagcatggtggtgggctcctgtagtcccagctacttgggaggctgaggcaggagaatcgcttgaacctgggaggcagaggttgcagtaagccaagatcgtgccattgcactccagcctgggtgacagagcgagactccatctcaaaaaaaaaaaaaagcctgacagctagcaggtttcaggatccatctgccaagttagtgaaaggctggagcctcaaatcatacagatgagggtcattttctcctccttagcttcttggagtttaagagttgaaggagtcctgaaaagtaatgatagagcaagatgaagctatcagaactgaatttggacttcctctgggaaactacacctagttcatctgaagtgtcacgtaaactgcagaaagtttccaatgctggaaacttctctcatactatcgtgccttcctactcagaagtgcctgtgccctgctcagctgtgactactgacctcaggacctcactggacaaggcatgtggggacccttgcaggagccctggtaagggtacaatgatcctattgttttttgtttttgagatggagtctcactctgtctcccaggctggagtgcagtggtgcgatctccgctcactgcaacctccgcctcccgggttcaagcaattctcctgcctcagcctgctgagtagctgggattacaggcacccactaccatgtccggctaattttgtatttttagtagagatggggtttcgccatgttagacaggctggtcttgaactcctgacctcaggtgatctgcccacctcggccttccaaagtgctgggattacaggcatgagccactgcacccagcctgatcctattgttgcactatttatggagcaacaactttgtacaaagaacaagctttgtacagagaacaagcttggctttttctcccaacgccgaggatgctgttgatgctgccacgtaatagcataattttgggtgtcctcaaggacagaacttccactttgaataatggaagttagaacaatgaatttcacaggggaataaatattaatgactgacgtgaagaaaatatgccattgtttattccctcctgcatcatttccataatttgcttttgtactgtcaatttagaggaaatgtgtgatgctggtgttttgtttggcctgtttgtttgatgctgggggttttatgtgttgtaccctttaccccttacattgtgtaatttgaaagtggcaaacaaacctgcagtaaaagtccttgattggcatcttcattcggatgatggagagcctttgtggtagtgtttgcttatgtgaacagcaggcctttcagataagagaagtggcttttccttggtgatgaaggggtagagattgagccatggggatggtttaggttaaagaatgcttttttttggccatcatgaggatctaacaacagagtagaaggaaggatgccctaggtcagcatgcagggtggtgggagggctttcatcttccttacccaagcctctcttttcacttttctagaagtccagaagttgttatatgatgaaatagcctcctttaacgtttatttctgggtgccaacggaggcccattcctctaacattctcataatttttctcaaaggcctatgatctaaacatttcaccacggcatccactcagctgtgaggctgcgtacacagtctccacctctgaaatctgaacttcgtttaccagtggtgctgtttgaacttcataatgtcagcacttcctgaacacttactgtgtgcttggcttgtgctcctgagtgccttatatcataaggaaacggcaaaatcaggggactggtataaatggtgagctgagcttgaatctaagctttgtcttcagagccagtacccctaatctctctttctgtaaaatattacttttcaaagaatgaagttgtagccaaatcttgaaatttttcatttaccctaagtgaggacaaataaagctttcaacaaca

SEQ ID NO: 112382 - DNA, 1818 bp, Artificial Sequence
  derived and/or modified sequence
agagtgcgaccgagatgttccactcgctggcgtccgggccgctggtgatctccggtagcactcgggccggcggacagtgagggcgcgacaacaagggaggtgtcacagttttccatttagatcaacaacttcaagttcttaccatggaaaattccgagaagactgaagtggttctccttgcttgtggttcattcaatcccatcaccaacatgcacctcaggttgtttgagctggccaaggactacatgaatggaacaggaaggtacacagttgtcaaaggcatcatctctcctgttggtgatgcctacaagaagaaaggactcattcctgcctatcaccgggtcatcatggcagaacttgctaccaagaattctaaatgggtggaagttgatacatgggaaagtcttcagaaggagtggaaagagactctgaaggtgctaagacaccatcaagagaaattggaggctagtgactgtgatcaccagcagaactcacctactctagaaaggcctggaaggaagaggaagtggactgaaacacaagattctagtcaaaagaaatccctagagccaaaaacaaaagctgtgccaaaggtcaagctgctgtgtggggcagatttattggagtcctttgctgttcccaatttgtggaagagtgaagacatcacccaaatcgtggccaactatgggctcatatgtgttactcgggctggaaatgatgctcagaagtttatctatgaatcggatgtgctgtggaaacaccggagcaacattcacgtggtgaatgaatggatcgctaatgacatctcatccacaaaaatccggagagccctcagaaggggccagagcattcgctacttggtaccagatcttgtccaagaatacattgaaaagcataatttgtacagctctgagagtgaagacaggaatgctggggtcatcctggcccctttgcagagaaacactgcagaagctaagacataggaattctacagcatgatatttcagacttcccatttggggatctgaaacaatctgggagttaataactggggaaagaagttgtgatctgttgcctaaactaaagcttaaaagtttagtaaaaatcgtctgggcacagtggctcacgcctgtaatcccagcactttgggaggctgaggcaggagaatcacttgaccccaggtggtggaggttgcagtgagccaagattgcaccattgcactccagcctggcgacagagcaagactctgtctcaaaaaaaaaaaaaaatttagtaaaaatcaatggtaagctaaaataagtttttgtttgtttatttgtttttgagatggagtctctactaaaaatacaaaaaattagccaggcatggtgccgcataactataatcccagctacttgggaggctgaggcaggagaatcgcttgaacccgggaggcacaggttccagtgagccaaggttgtgccactgcactccagcctgggcaaaaaagcaaaactccatctcaaagagaaaaaaaaaaaagaccgggtgtggtggctcacacctgtaatcccagcactttgggaggcctaagtgggtggatcacgtgaggtcaagagttcaagaccagcctggccaatatggtgaaaccccatctctactaagaatacaaaaaattagctgagcatggtggtgggctcctgtagtcccagctacttgggaggctgaggcaggagaatcgcttgaacctgggaggcagaggttgcagtaagccaagatcgtgccattgcactccagcctgggtgacagagcgagactccatctcaaaaaaaaaaaaaa

SEQ ID NO: 112383 - DNA, 840 bp, Artificial Sequence
  derived and/or modified sequence
atggagaacagcgagaagacagaggtggtgctgctggcctgtggcagcttcaaccccatcaccaacatgcacctgcggctgtttgagctggccaaggactacatgaatggcaccggccgctacacagtggtgaagggcatcatcagccctgtgggagatgcctacaagaagaagggcctcatcccagcctaccacagggtcatcatggccgagctggccaccaagaacagcaagtgggtggaggtggacacctgggagagcctgcagaaggagtggaaggagaccctgaaggtgctgcggcaccaccaggagaagctggaggccagtgactgtgaccaccagcagaacagccccaccctggagaggcctggcaggaagaggaagtggacagagacccaggacagcagccagaagaagagcctggagcccaagaccaaggctgtgcccaaggtgaagctgctgtgtggggctgacctgctggagagctttgctgtgcccaacctgtggaagtctgaggacatcacccagatcgtggccaactacggcctcatctgtgtgaccagggctggaaatgatgcccagaagttcatctatgaaagtgatgtgctgtggaagcacaggagcaacatccacgtggtgaatgagtggatcgccaatgacatcagcagcaccaagatcagaagagccctgcggcggggccagagcatccgctacctggtgcctgacctggtgcaggagtacatcgagaagcacaacctgtacagcagcgagagtgaagatagaaatgctggggtcatcctggcccccctgcagaggaacacagctgaggccaagacctag

SEQ ID NO: 112384 - DNA, 840 bp, Artificial Sequence
  derived and/or modified sequence
atggagaacagcgagaagaccgaggtggtgctgctggcctgcggctccttcaatccgatcacaaacatgcatttgcgcctttttgagctagcaaaggattacatgaatggaacgggccggtacacagtagtcaagggcatcatctccccagtcggggatgcgtacaaaaagaagggcctcattcctgcctaccatcgggtgattatggccgaactggcaaccaaaaacagcaagtgggtggaagtcgacacatgggagagcttgcagaaggaatggaaggaaacactcaaagtactgcgccatcaccaggaaaaattagaagccagcgattgcgaccatcagcaaaattccccaactcttgagaggccgggtcgtaaaagaaaatggacagagacacaggactccagtcagaagaaatccctcgaacccaagacaaaagctgtgcccaaagtcaaactcctgtgtggcgctgacctacttgagtctttcgctgtgccaaatttatggaaatctgaagatatcacacagatcgtggccaattatggcctgatttgcgtcaccagagcgggtaacgatgcacagaagttcatctacgagagcgacgtgctgtggaagcacaggagtaatatccatgtcgtgaatgagtggatagccaacgacatatcctcaacaaagatccgacgagccttacgccgcggacagtcaatccgatatttggtccctgatctggttcaagagtatatcgaaaagcacaatctgtactcatctgaatctgaggatcgtaatgctggcgtgatcctggccccccttcagcgcaatacggcagaggccaagacttag

SEQ ID NO: 112385 - DNA, 840 bp, Artificial Sequence
  derived and/or modified sequence
atggagaacagcgagaagaccgaggtggtgctgctggcctgcggcagcttcaatccaatcaccaacatgcatctgcggctttttgaattggcaaaggattacatgaacgggaccggccgctatacggtcgtaaaaggcataatctcgccggttggcgacgcttacaaaaagaagggactgatccccgcctaccaccgtgtcatcatggcggagctggctacgaagaactcaaagtgggtagaagtggatacctgggaaagcctccaaaaggagtggaaagagactctgaaggttctgcgacaccaccaggaaaagctagaagcttctgattgcgaccatcagcagaattcgcccaccctagagcgccctggacgcaaaaggaaatggaccgagacacaggacagctcccagaaaaaatccctggaaccgaaaacgaaggccgtgccaaaagtgaaattactctgtggtgccgacttgctggagtccttcgctgtaccaaacctgtggaagtctgaggatattacgcagatcgtcgctaactatgggttgatttgcgttacacgggccggaaacgatgcccaaaaattcatctacgagtccgatgtcctgtggaagcaccgctccaatattcatgtagtgaatgaatggattgcaaatgacatctctagcacgaaaatcagacgcgcactgcgccggggccaatctattagatatctggttcctgatcttgttcaggagtatatcgaaaagcacaatctctattcttccgaatcagaggaccgcaatgcaggggtcatcctggcccctttgcagagaaacactgctgaggcaaagacttag

SEQ ID NO: 112386 - DNA, 840 bp, Artificial Sequence
  derived and/or modified sequence
atggagaatagtgaaaagacggaggtcgtgctcctggcctgcggttcattcaaccccataacaaatatgcacctgagattgttcgagctcgctaaggactacatgaacggaactggccgatacactgtggtaaagggtatcatcagcccagtgggggacgcatacaagaagaaaggattaatacccgcttatcaccgggtgattatggctgaactggctacaaaaaacagtaagtgggtggaagtggacacctgggagtccctgcaaaaagagtggaaggagacactgaaagtgttgcgacatcatcaggaaaaacttgaggccagtgactgcgaccatcagcagaactccccaaccctcgagaggcctggcagaaaacgtaagtggaccgagacacaagattcgtcgcagaagaaatcccttgagcccaaaaccaaagccgtgccaaaagtgaagcttctctgcggcgctgatctgctggaatcttttgcggtgcctaatctatggaaatccgaagatatcactcagattgtcgcaaactacggactgatctgcgttacgagggctggcaacgatgcgcagaaattcatttatgagagtgatgtcttatggaaacacaggtccaatatccacgtggtaaacgagtggattgcaaatgacatcagctctaccaaaattaggcgagcgcttcggcgaggccagtcaattagatatctggtgcctgatctagtgcaggagtatatcgaaaaacacaatctgtatagttcggagagtgaagaccgaaacgctggagttatcctggccccattacagagaaatacagccgaggcaaaaacctag

SEQ ID NO: 112387 - DNA, 840 bp, Artificial Sequence
  derived and/or modified sequence
atggagaacagcgaaaaaacggaggtcgtcctcttagcatgtggatcattcaaccccatcacgaacatgcatctccgactgtttgagctcgccaaggattatatgaacggaacaggcagatatacggtagttaagggcataatctcccccgtgggagacgcatacaagaaaaaggggctgattcctgcctaccaccgcgtgattatggcagagctggccacaaagaactccaaatgggtggaggtcgacacatgggagagcctgcagaaggagtggaaggaaaccttaaaagttctgcgccaccatcaagagaagttggaggcaagcgactgtgatcatcagcagaattcacctaccctcgagcgtcccggacgtaaaaggaagtggaccgagacgcaggatagtagccagaagaagtctttggagcccaaaactaaagcagtgcccaaggttaaactgctctgcggcgcagacctgcttgaatcctttgcagtccccaacctgtggaaatcagaggacatcactcaaatagtggccaactacggactcatctgtgtgacccgagcgggaaatgacgcacagaagtttatctatgaaagcgacgtgctgtggaaacaccgctccaatatccacgtagtcaatgaatggatcgcgaacgatatcagttccacgaagatacgcagagctctccgcagagggcaatcaattcggtaccttgtgccagacctggtccaagagtacatcgagaaacacaacctctactcaagtgagtccgaggataggaacgctggtgtcattcttgcccctctccagcgtaacaccgcggaggctaagacatag

SEQ ID NO: 112388 - DNA, 840 bp, Artificial Sequence
  derived and/or modified sequence
atggagaacagcgagaagaccgaggtggtgctgctggcctgcggcagcttcaaccccatcaccaacatgcacctgagactgttcgagctggccaaggactacatgaacggcaccggcagatacaccgtggtgaagggcatcatcagccccgtgggcgacgcctacaagaagaagggcctgatccccgcctaccacagagtgatcatggccgagctggccaccaagaacagcaagtgggtggaggtggacacctgggagagcctgcagaaggagtggaaggagaccctgaaggtgctgagacaccaccaggagaagctggaggccagcgactgcgaccaccagcagaacagccccaccctggagagacccggcagaaagagaaagtggaccgagacccaggacagcagccagaagaagagcctggagcccaagaccaaggccgtgcccaaggtgaagctgctgtgcggcgccgacctgctggagagcttcgccgtgcccaacctgtggaagagcgaggacatcacccagatcgtggccaactacggcctgatctgcgtgaccagagccggcaacgacgcccagaagttcatctacgagagcgacgtgctgtggaagcacagaagcaacatccacgtggtgaacgagtggatcgccaacgacatcagcagcaccaagatcagaagagccctgagaagaggccagagcatcagatacctggtgcccgacctggtgcaggagtacatcgagaagcacaacctgtacagcagcgagagcgaggacagaaacgccggcgtgatcctggcccccctgcagagaaacaccgccgaggccaagacctag

SEQ ID NO: 112389 - protein, 160 aa, Artificial Sequence
  derived and/or modified sequence
MENSEKTEVVLLACGSFNPITNMHLRLFELAKDYMNGTGRYTVVKGIISPVGDAYKKKGLIPAYHRVIMAELATKNSKWVEVDTWESLQKEWKETLKVLRHHQEKLEASDCDHQQNSPTLERPGRKRKWTETQDSSQKKSLEPKTKDGVSLYHPGWSAVA

SEQ ID NO: 112390 - DNA, 483 bp, Artificial Sequence
  derived and/or modified sequence
atggaaaatagcgaaaaaaccgaggtagtactgctcgcatgcggcagtttcaatcccattaccaacatgcaccttcgcctgttcgagctggctaaagactacatgaatggtacaggccggtacaccgttgtgaagggtatcatttctccggtcggcgatgcctataaaaaaaagggtcttatacctgcttaccaccgggtgatcatggctgagcttgccactaagaattcaaagtgggtcgaagtcgatacctgggaaagcctgcagaaggagtggaaagaaaccctgaaggtgctgcgccatcaccaggaaaaattggaagcgagcgactgcgaccaccagcagaattctcctactttggagcgccccgggagaaagcggaaatggacagaaacacaagacagtagccagaagaagtccctcgagcccaagacaaaggatggggtgagtctgtatcacccaggctggtccgccgtggcatag

SEQ ID NO: 112391 - DNA, 1094 bp, Artificial Sequence
  derived and/or modified sequence
gagagtgcgaccgagatgttccactcgctggcgtccgggccgctggtgatctccggtagcactcgggccggcggacagtgagggcgcgacaacaagggaggtgtcacagttttccatttagatcaacaacttcaagttcttaccatggaaaattccgagaagactgaagtggttctccttgcttgtggttcattcaatcccatcaccaacatgcacctcaggttgtttgagctggccaaggactacatgaatggaacaggaaggtacacagttgtcaaaggcatcatctctcctgttggtgatgcctacaagaagaaaggactcattcctgcctatcaccgggtcatcatggcagaacttgctaccaagaattctaaatgggtggaagttgatacatgggaaagtcttcagaaggagtggaaagagactctgaaggtgctaagacaccatcaagagaaattggaggctagtgactgtgatcaccagcagaactcacctactctagaaaggcctggaaggaagaggaagtggactgaaacacaagattctagtcaaaagaaatccctagagccaaaaacaaaagatggagtctcgctctatcacccaggctggagtgcagtggcatgatctcagctcactgcaagctctgcctcctgggttcatgccattctcctgcctcagcctcctgagcagctgggactacaggtgcctgccaccacgcctgtctaatttgtttgtatttttagtagagacggggttgcaccatgttagccaggatggtcttgatctcctgacctcatgatccgcccacctcggcctcccaaagtgctgggattacaggcgtgagccacagcgcctgggccttattttttttgttttatagagatggggtctcactattttggccaggttggtcttgaactcctggccccaagcagtcctcctgccttggcctcccaaagtgttaggattacaggtgtcagccactatgcctggcctttattttcattttatattgcatacttgtgggtgtctggaaaatgccccttgttagttgcatgaagtgaaggagaataaaaggcacttggagctta

SEQ ID NO: 112392 - DNA, 483 bp, Artificial Sequence
  derived and/or modified sequence
atggagaacagcgagaagacagaggtggtgctgctggcctgtggcagcttcaaccccatcaccaacatgcacctgcggctgtttgagctggccaaggactacatgaatggcaccggccgctacacagtggtgaagggcatcatcagccctgtgggagatgcctacaagaagaagggcctcatcccagcctaccacagggtcatcatggccgagctggccaccaagaacagcaagtgggtggaggtggacacctgggagagcctgcagaaggagtggaaggagaccctgaaggtgctgcggcaccaccaggagaagctggaggccagtgactgtgaccaccagcagaacagccccaccctggagaggcctggcaggaagaggaagtggacagagacccaggacagcagccagaagaagagcctggagcccaagaccaaggatggagtgtccctgtaccaccctggctggagcgctgtggcctag

SEQ ID NO: 112393 - DNA, 483 bp, Artificial Sequence
  derived and/or modified sequence
atggagaacagcgagaagaccgaggtggtgctgctggcctgcggctcctttaacccgatcaccaacatgcatttacggctgttcgaactcgccaaggactatatgaacggcacaggccggtacactgtagtgaaaggaattatttcacctgtaggcgatgcatataagaagaaaggactgattcctgcgtaccatcgcgtcataatggcagagctggccactaagaacagcaagtgggtggaggtagacacatgggagtcgctgcagaaagaatggaaagaaaccctgaaggtgctgcggcaccaccaggagaagcttgaggcttctgattgtgaccaccagcagaatagcccaaccctcgagaggcctgggagaaagaggaaatggacagagactcaggacagctcacagaagaagtcactagagcctaagactaaggacggcgtgtccctataccatcccggttggtccgccgtggcatag

SEQ ID NO: 112394 - DNA, 483 bp, Artificial Sequence
  derived and/or modified sequence
atggagaattccgaaaagaccgaggtggtgctcctcgcctgcggatccttcaaccctatcaccaacatgcacttgcgcctgtttgagctagccaaggattatatgaacgggaccggaaggtacacagtcgtaaaaggcatcatttcccctgtgggcgacgcatacaaaaagaagggtttgattccggcttaccaccgcgtgattatggctgaactggcaacaaagaactccaaatgggtggaagtcgatacgtgggagagcctacagaaggagtggaaggaaacgctcaaagtgcttcgccaccaccaggaaaagttggaggcctccgattgcgaccatcagcagaacagtcctaccctggagcggcctgggagaaagaggaagtggacggagactcaggacagttctcagaaaaaatcattggaaccaaagactaaagatggagtgtccttgtaccatcctggatggtccgccgtagcatag

SEQ ID NO: 112395 - DNA, 483 bp, Artificial Sequence
  derived and/or modified sequence
atggagaacagcgagaagaccgaggtggtgctgctggcctgcggcagcttcaaccccatcaccaacatgcacctgagactgttcgagctggccaaggactacatgaacggcaccggcagatacaccgtggtgaagggcatcatcagccccgtgggcgacgcctacaagaagaagggcctgatccccgcctaccacagagtgatcatggccgagctggccaccaagaacagcaagtgggtggaggtggacacctgggagagcctgcagaaggagtggaaggagaccctgaaggtgctgagacaccaccaggagaagctggaggccagcgactgcgaccaccagcagaacagccccaccctggagagacccggcagaaagagaaagtggaccgagacccaggacagcagccagaagaagagcctggagcccaagaccaaggacggcgtgagcctgtaccaccccggctggagcgccgtggcctag

SEQ ID NO: 112396 - protein, 237 aa, Artificial Sequence
  derived and/or modified sequence
MSFLKSFPPPGPAEGLLRQQPDTEAVLNGKGLGTGTLYIAESRLSWLDGSGLGFSLEYPTISLHALSRDRSDCLGEHLYVMVNAKFEEESKEPVADEEEEDSDDDVEPITEFRFVPSDKSALEAMFTAMCECQALHPDPEDEDSDDYDGEEYDVEAHEQGQGDIPTFYTYEEGLSHLTAEGQATLERLEGMLSQSVSSQYNMAGVRTEDSIRDYEDGMEVDTTPTVAGQFEDADVDH

SEQ ID NO: 112397 - protein, 669 aa, Artificial Sequence
  derived and/or modified sequence
MAAAQEADGARSAVVAAGGGSSGQVTSNGSIGRDPPAETQPQNPPAQPAPNAWQVIKGVLFRIFIIWAISSWFRRGPAPQDQAGPGGAPRVASRNLFPKDTLMNLHVYISEHEHFTDFNATSALFWEQHDLVYGDWTSGENSDGCYEHFAELDIPQSVQQNGSIYIHVYFTKSGFHPDPRQKALYRRLATVHMSRMINKYKRRRFQKTKNLLTGETEADPEMIKRAEDYGPVEVISHWHPNITINIVDDHTPWVKGSVPPPLDQYVKFDAVSGDYYPIIYFNDYWNLQKDYYPINESLASLPLRVSFCPLSLWRWQLYAAQSTKSPWNFLGDELYEQSDEEQDSVKVALLETNPYLLALTIIVSIVHSVFEFLAFKNDIQFWNSRQSLEGLSVRSVFFGVFQSFVVLLYILDNETNFVVQVSVFIGVLIDLWKITKVMDVRLDREHRVAGIFPRLSFKDKSTYIESSTKVYDDMAFRYLSWILFPLLGCYAVYSLLYLEHKGWYSWVLSMLYGFLLTFGFITMTPQLFINYKLKSVAHLPWRMLTYKALNTFIDDLFAFVIKMPVMYRIGCLRDDVVFFIYLYQRWIYRVDPTRVNEFGMSGEDPTAAAPVAEVPTAAGALTPTPAPTTTTATREEASTSLPTKPTQGASSASEPQEAPPKPAEDKKKD

SEQ ID NO: 112398 - protein, 686 aa, Artificial Sequence
  derived and/or modified sequence
MAAAQEADGARSAVVAAGGGSSGQVTSNGSIGRDPPAETQPQNPPAQPAPNAWQVIKGVLFRIFIIWAISSWFRRGPAPQDQAGPGGAPRVASRNLFPKDTLMNLHVYISEHEHFTDFNATSALFWEQHDLVYGDWTSGENSDGCYEHFAELDIPQSVQQNGSIYIHVYFTKSGFHPDPRQKALYRRLATVHMSRMINKYKRRRFQKTKNLLTGETEADPEMIKRAEDYGPVEVISHWHPNITINIVDDHTPWVKGSVPPPLDQYVKFDAVSGDYYPIIYFNDYWNLQKDYYPINESLASLPLRVSFCPLSLWRWQLYAAQSTKSPWNFLGDELYEQSDEEQDSVKVALLETNPYLLALTIIVSIVHSVFEFLAFKNDIQFWNSRQSLEGLSVRSVFFGVFQSFVVLLYILDNETNFVVQVSVFIGVLIDLWKITKVMDVRLDREHRVAGIFPRLSFKDKSTYIESSTKVYDDMAFRYLSWILFPLLGCYAVYSLLYLEHKGWYSWVLSMLYGFLLTFGFITMTPQLFINYKLKSVAHLPWRMLTYKALNTFIDDLFAFVIKMPVMYRIGCLRDDVVFFIYLYQRWIYRVDPTRVNEFGMSGEDPTAAAPVAEVPTAAGALTPTPAPTTTTATREEASTSLPTKPTQGASSASEPQGLFVEALSVPLSLCVSSHLALPAQHHWESW

SEQ ID NO: 112399 - protein, 567 aa, Artificial Sequence
  derived and/or modified sequence
MNLHVYISEHEHFTDFNATSALFWEQHDLVYGDWTSGENSDGCYEHFAELDIPQSVQQNGSIYIHVYFTKSGFHPDPRQKALYRRLATVHMSRMINKYKRRRFQKTKNLLTGETEADPEMIKRAEDYGPVEVISHWHPNITINIVDDHTPWVKGSVPPPLDQYVKFDAVSGDYYPIIYFNDYWNLQKDYYPINESLASLPLRVSFCPLSLWRWQLYAAQSTKSPWNFLGDELYEQSDEEQDSVKVALLETNPYLLALTIIVSIVHSVFEFLAFKNDIQFWNSRQSLEGLSVRSVFFGVFQSFVVLLYILDNETNFVVQVSVFIGVLIDLWKITKVMDVRLDREHRVAGIFPRLSFKDKSTYIESSTKVYDDMAFRYLSWILFPLLGCYAVYSLLYLEHKGWYSWVLSMLYGFLLTFGFITMTPQLFINYKLKSVAHLPWRMLTYKALNTFIDDLFAFVIKMPVMYRIGCLRDDVVFFIYLYQRWIYRVDPTRVNEFGMSGEDPTAAAPVAEVPTAAGALTPTPAPTTTTATREEASTSLPTKPTQGASSASEPQEAPPKPAEDKKKD

SEQ ID NO: 112400 - DNA, 2469 bp, Artificial Sequence
  derived and/or modified sequence
gacccggagcgggaagatggcggcggcgcaggaggcggacggggcccgcagcgccgtggtggcggccgggggaggcagctccggtcaggtgaccagcaatggcagcatcgggagggacccgccagcggagacccagcctcagaacccaccggcccagccggcacccaatgcctggcaggtcatcaaaggtgtgctgtttaggatcttcatcatctgggccatcagcagttggttccgccgagggccggcccctcaggaccaggcgggccccggaggagctccacgcgtcgccagccgcaacctgttccccaaagacactttaatgaacctgcatgtgtacatctcagagcacgagcactttacagacttcaacgccacgtcggcactcttctgggaacagcacgatcttgtgtatggcgactggactagcggcgagaactcagacggctgctacgagcactttgctgagctcgatatcccacagagcgtccagcagaacggctccatctacatccacgtttacttcaccaagagtggcttccacccagacccccggcagaaggccctgtaccgccggcttgccacagtccacatgtcccggatgatcaacaaatacaagcgcagacgatttcagaaaaccaagaacctgctgacaggagagacagaagcggacccagaaatgatcaagagggctgaggactatgggcctgtggaggtgatctcccattggcaccccaacatcaccatcaacatcgtggacgaccacacgccgtgggtgaagggcagtgtgccccctcccctggatcaatatgtgaagttcgacgccgtgagcggtgactactatcccatcatctacttcaatgactactggaacctgcagaaggactactaccccatcaacgagagcctggccagcctgccgctccgcgtctccttctgcccactctcgctttggcgctggcagctctatgctgcccagagcaccaagtcgccctggaacttcctgggtgatgagttgtacgagcagtcagatgaggagcaggactcggtgaaggtggccctgctggagaccaacccctacctgctggcgctcaccatcatcgtgtctatcgttcacagtgtcttcgagttcctggccttcaagaatgatatccagttctggaacagccggcagtccctggagggcctgtccgtgcgctccgtcttcttcggcgttttccagtcattcgtggtcctcctctacatcctggacaacgagaccaacttcgtggtccaggtcagcgtcttcattggggtcctcatcgacctctggaagatcaccaaggtcatggacgtccggctggaccgagagcacagggtggcaggaatcttcccccgcctatccttcaaggacaagtccacgtatatcgagtcctcgaccaaagtgtatgatgatatggcattccggtacctgtcctggatcctcttcccgctcctgggctgctatgccgtctacagtcttctgtacctggagcacaagggctggtactcctgggtgctcagcatgctctacggcttcctgctgaccttcggcttcatcaccatgacgccccagctcttcatcaactacaagctcaagtctgtggcccaccttccctggcgcatgctcacctacaaggccctcaacacattcatcgacgacctgttcgcctttgtcatcaagatgcccgttatgtaccggatcggctgcctgcgggacgatgtggttttcttcatctacctctaccaacggtggatctaccgcgtcgaccccacccgagtcaacgagtttggcatgagtggagaagaccccacagctgccgcccccgtggccgaggttcccacagcagcaggggccctcacgcccacacctgcacccaccacgaccaccgccaccagggaggaggcctccacgtccctgcccaccaagcccacccagggggccagctctgccagcgagccccaggaagcccctccaaagccagcagaggacaagaaaaaggattagtcgagactggtcctcacctgctccggctcctggcgaccactacccctgcgtcccggccccctcgcctcccctccctgtcgccctttccctggacagatcaggccggggcggtgggaggcccgcctcaggtcagggcccagcgtgtgatgtaggggccggggcaggccagggtttgtttgtggaggcgctgtctgtccctctgtccctctgtgtttccagccatctcgccctgccagcccagcaccactgggaatcatggtgaagctgatgcagcgttgccgagggggtgggttgggcgggggtggggccgggcccccctacgggatgcccacggccgttcatcatcttgtccctcgtccccctaccacactccccctcctagaccgccgccctttaacacagtctggatttaataaattcatatgggtgtttaacttaaactc

SEQ ID NO: 112401 - DNA, 2066 bp, Artificial Sequence
  derived and/or modified sequence
ggaagatggcggcggcgcaggaggcggacggggcccgcagcgccgtggtggcggccgggggaggcagctccggtcaggtgaccagcaatggcagcatcgggagggacccgccagcggagacccagcctcagaacccaccggcccagccggcacccaatgcctggcaggtcatcaaaggtgtgctgtttaggatcttcatcatctgggccatcagcagttggttccgccgagggccggcccctcaggaccaggcgggccccggaggagctccacgcgtcgccagccgcaacctgttccccaaagacactttaatgaacctgcatgtgtacatctcagagcacgagcactttacagacttcaacgccacgtcggcactcttctgggaacagcacgatcttgtgtatggcgactggactagcggcgagaactcagacggctgctacgagcactttgctgagctcgatatcccacagagcgtccagcagaacggctccatctacatccacgtttacttcaccaagagtggcttccacccagacccccggcagaaggccctgtaccgccggcttgccacagtccacatgtcccggatgatcaacaaatacaagcgcagacgatttcagaaaaccaagaacctgctgacaggagagacagaagcggacccagaaatgatcaagagggctgaggactatgggcctgtggaggtgatctcccattggcaccccaacatcaccatcaacatcgtggacgaccacacgccgtgggtgaagggcagtgtgccccctcccctggatcaatatgtgaagttcgacgccgtgagcggtgactactatcccatcatctacttcaatgactactggaacctgcagaaggactactaccccatcaacgagagcctggccagcctgccgctccgcgtctccttctgcccactctcgctttggcgctggcagctctatgctgcccagagcaccaagtcgccctggaacttcctgggtgatgagttgtacgagcagtcagatgaggagcaggactcggtgaaggtggccctgctggagaccaacccctacctgctggcgctcaccatcatcgtgtctatcgttcacagtgtcttcgagttcctggccttcaagaatgatatccagttctggaacagccggcagtccctggagggcctgtccgtgcgctccgtcttcttcggcgttttccagtcattcgtggtcctcctctacatcctggacaacgagaccaacttcgtggtccaggtcagcgtcttcattggggtcctcatcgacctctggaagatcaccaaggtcatggacgtccggctggaccgagagcacagggtggcaggaatcttcccccgcctatccttcaaggacaagtccacgtatatcgagtcctcgaccaaagtgtatgatgatatggcattccggtacctgtcctggatcctcttcccgctcctgggctgctatgccgtctacagtcttctgtacctggagcacaagggctggtactcctgggtgctcagcatgctctacggcttcctgctgaccttcggcttcatcaccatgacgccccagctcttcatcaactacaagctcaagtctgtggcccaccttccctggcgcatgctcacctacaaggccctcaacacattcatcgacgacctgttcgcctttgtcatcaagatgcccgttatgtaccggatcggctgcctgcgggacgatgtggttttcttcatctacctctaccaacggtggatctaccgcgtcgaccccacccgagtcaacgagtttggcatgagtggagaagaccccacagctgccgcccccgtggccgaggttcccacagcagcaggggccctcacgcccacacctgcacccaccacgaccaccgccaccagggaggaggcctccacgtccctgcccaccaagcccacccagggggccagctctgccagcgagccccagggtttgtttgtggaggcgctgtctgtccctctgtccctctgtgtttccagccatctcgccctgccagcccagcaccactgggaatcatggtga

SEQ ID NO: 112402 - DNA, 2342 bp, Artificial Sequence
  derived and/or modified sequence
aaactaagggtctctcagcagatggccgggtttagagctgtacgaagacacacagctaatgaaaaattgtggaattctcagagcccgtgaagcctagcccacggatgcgaggtgaccagcaatggcagcatcgggagggacccgccagcggagacccagcctcagaacccaccggcccagccggcacccaatgcctggcaggtcatcaaaggtgtgctgtttaggatcttcatcatctgggccatcagcagttggttccgccgagggccggcccctcaggaccaggcgggccccggaggagctccacgcgtcgccagccgcaacctgttccccaaagacactttaatgaacctgcatgtgtacatctcagagcacgagcactttacagacttcaacgccacgtcggcactcttctgggaacagcacgatcttgtgtatggcgactggactagcggcgagaactcagacggctgctacgagcactttgctgagctcgatatcccacagagcgtccagcagaacggctccatctacatccacgtttacttcaccaagagtggcttccacccagacccccggcagaaggccctgtaccgccggcttgccacagtccacatgtcccggatgatcaacaaatacaagcgcagacgatttcagaaaaccaagaacctgctgacaggagagacagaagcggacccagaaatgatcaagagggctgaggactatgggcctgtggaggtgatctcccattggcaccccaacatcaccatcaacatcgtggacgaccacacgccgtgggtgaagggcagtgtgccccctcccctggatcaatatgtgaagttcgacgccgtgagcggtgactactatcccatcatctacttcaatgactactggaacctgcagaaggactactaccccatcaacgagagcctggccagcctgccgctccgcgtctccttctgcccactctcgctttggcgctggcagctctatgctgcccagagcaccaagtcgccctggaacttcctgggtgatgagttgtacgagcagtcagatgaggagcaggactcggtgaaggtggccctgctggagaccaacccctacctgctggcgctcaccatcatcgtgtctatcgttcacagtgtcttcgagttcctggccttcaagaatgatatccagttctggaacagccggcagtccctggagggcctgtccgtgcgctccgtcttcttcggcgttttccagtcattcgtggtcctcctctacatcctggacaacgagaccaacttcgtggtccaggtcagcgtcttcattggggtcctcatcgacctctggaagatcaccaaggtcatggacgtccggctggaccgagagcacagggtggcaggaatcttcccccgcctatccttcaaggacaagtccacgtatatcgagtcctcgaccaaagtgtatgatgatatggcattccggtacctgtcctggatcctcttcccgctcctgggctgctatgccgtctacagtcttctgtacctggagcacaagggctggtactcctgggtgctcagcatgctctacggcttcctgctgaccttcggcttcatcaccatgacgccccagctcttcatcaactacaagctcaagtctgtggcccaccttccctggcgcatgctcacctacaaggccctcaacacattcatcgacgacctgttcgcctttgtcatcaagatgcccgttatgtaccggatcggctgcctgcgggacgatgtggttttcttcatctacctctaccaacggtggatctaccgcgtcgaccccacccgagtcaacgagtttggcatgagtggagaagaccccacagctgccgcccccgtggccgaggttcccacagcagcaggggccctcacgcccacacctgcacccaccacgaccaccgccaccagggaggaggcctccacgtccctgcccaccaagcccacccagggggccagctctgccagcgagccccaggaagcccctccaaagccagcagaggacaagaaaaaggattagtcgagactggtcctcacctgctccggctcctggcgaccactacccctgcgtcccggccccctcgcctcccctccctgtcgccctttccctggacagatcaggccggggcggtgggaggcccgcctcaggtcagggcccagcgtgtgatgtaggggccggggcaggccagggtttgtttgtggaggcgctgtctgtccctctgtccctctgtgtttccagccatctcgccctgccagcccagcaccactgggaatcatggtgaagctgatgcagcgttgccgagggggtgggtt

SEQ ID NO: 112403 - DNA, 2010 bp, Artificial Sequence
  derived and/or modified sequence
atggccgccgcccaggaggccgacggcgccagaagcgccgtggtggccgccggcggcggcagcagcggccaggtgaccagcaacggcagcatcggcagagacccccccgccgagacccagccccagaacccccccgcccagcccgcccccaacgcctggcaggtgatcaagggcgtgctgttcagaatcttcatcatctgggccatcagcagctggttcagaagaggccccgccccccaggaccaggccggccccggcggcgcccccagagtggccagcagaaacctgttccccaaggacaccctgatgaacctgcacgtgtacatcagcgagcacgagcacttcaccgacttcaacgccaccagcgccctgttctgggagcagcacgacctggtgtacggcgactggaccagcggcgagaacagcgacggctgctacgagcacttcgccgagctggacatcccccagagcgtgcagcagaacggcagcatctacatccacgtgtacttcaccaagagcggcttccaccccgaccccagacagaaggccctgtacagaagactggccaccgtgcacatgagcagaatgatcaacaagtacaagagaagaagattccagaagaccaagaacctgctgaccggcgagaccgaggccgaccccgagatgatcaagagagccgaggactacggccccgtggaggtgatcagccactggcaccccaacatcaccatcaacatcgtggacgaccacaccccctgggtgaagggcagcgtgcccccccccctggaccagtacgtgaagttcgacgccgtgagcggcgactactaccccatcatctacttcaacgactactggaacctgcagaaggactactaccccatcaacgagagcctggccagcctgcccctgagagtgagcttctgccccctgagcctgtggagatggcagctgtacgccgcccagagcaccaagagcccctggaacttcctgggcgacgagctgtacgagcagagcgacgaggagcaggacagcgtgaaggtggccctgctggagaccaacccctacctgctggccctgaccatcatcgtgagcatcgtgcacagcgtgttcgagttcctggccttcaagaacgacatccagttctggaacagcagacagagcctggagggcctgagcgtgagaagcgtgttcttcggcgtgttccagagcttcgtggtgctgctgtacatcctggacaacgagaccaacttcgtggtgcaggtgagcgtgttcatcggcgtgctgatcgacctgtggaagatcaccaaggtgatggacgtgagactggacagagagcacagagtggccggcatcttccccagactgagcttcaaggacaagagcacctacatcgagagcagcaccaaggtgtacgacgacatggccttcagatacctgagctggatcctgttccccctgctgggctgctacgccgtgtacagcctgctgtacctggagcacaagggctggtacagctgggtgctgagcatgctgtacggcttcctgctgaccttcggcttcatcaccatgaccccccagctgttcatcaactacaagctgaagagcgtggcccacctgccctggagaatgctgacctacaaggccctgaacaccttcatcgacgacctgttcgccttcgtgatcaagatgcccgtgatgtacagaatcggctgcctgagagacgacgtggtgttcttcatctacctgtaccagagatggatctacagagtggaccccaccagagtgaacgagttcggcatgagcggcgaggaccccaccgccgccgcccccgtggccgaggtgcccaccgccgccggcgccctgacccccacccccgcccccaccaccaccaccgccaccagagaggaggccagcaccagcctgcccaccaagcccacccagggcgccagcagcgccagcgagccccaggaggccccccccaagcccgccgaggacaagaagaaggactag

SEQ ID NO: 112404 - DNA, 2061 bp, Artificial Sequence
  derived and/or modified sequence
atggccgccgcccaggaggccgacggcgccagaagcgccgtggtggccgccggcggcggcagcagcggccaggtgaccagcaacggcagcatcggcagagacccccccgccgagacccagccccagaacccccccgcccagcccgcccccaacgcctggcaggtgatcaagggcgtgctgttcagaatcttcatcatctgggccatcagcagctggttcagaagaggccccgccccccaggaccaggccggccccggcggcgcccccagagtggccagcagaaacctgttccccaaggacaccctgatgaacctgcacgtgtacatcagcgagcacgagcacttcaccgacttcaacgccaccagcgccctgttctgggagcagcacgacctggtgtacggcgactggaccagcggcgagaacagcgacggctgctacgagcacttcgccgagctggacatcccccagagcgtgcagcagaacggcagcatctacatccacgtgtacttcaccaagagcggcttccaccccgaccccagacagaaggccctgtacagaagactggccaccgtgcacatgagcagaatgatcaacaagtacaagagaagaagattccagaagaccaagaacctgctgaccggcgagaccgaggccgaccccgagatgatcaagagagccgaggactacggccccgtggaggtgatcagccactggcaccccaacatcaccatcaacatcgtggacgaccacaccccctgggtgaagggcagcgtgcccccccccctggaccagtacgtgaagttcgacgccgtgagcggcgactactaccccatcatctacttcaacgactactggaacctgcagaaggactactaccccatcaacgagagcctggccagcctgcccctgagagtgagcttctgccccctgagcctgtggagatggcagctgtacgccgcccagagcaccaagagcccctggaacttcctgggcgacgagctgtacgagcagagcgacgaggagcaggacagcgtgaaggtggccctgctggagaccaacccctacctgctggccctgaccatcatcgtgagcatcgtgcacagcgtgttcgagttcctggccttcaagaacgacatccagttctggaacagcagacagagcctggagggcctgagcgtgagaagcgtgttcttcggcgtgttccagagcttcgtggtgctgctgtacatcctggacaacgagaccaacttcgtggtgcaggtgagcgtgttcatcggcgtgctgatcgacctgtggaagatcaccaaggtgatggacgtgagactggacagagagcacagagtggccggcatcttccccagactgagcttcaaggacaagagcacctacatcgagagcagcaccaaggtgtacgacgacatggccttcagatacctgagctggatcctgttccccctgctgggctgctacgccgtgtacagcctgctgtacctggagcacaagggctggtacagctgggtgctgagcatgctgtacggcttcctgctgaccttcggcttcatcaccatgaccccccagctgttcatcaactacaagctgaagagcgtggcccacctgccctggagaatgctgacctacaaggccctgaacaccttcatcgacgacctgttcgccttcgtgatcaagatgcccgtgatgtacagaatcggctgcctgagagacgacgtggtgttcttcatctacctgtaccagagatggatctacagagtggaccccaccagagtgaacgagttcggcatgagcggcgaggaccccaccgccgccgcccccgtggccgaggtgcccaccgccgccggcgccctgacccccacccccgcccccaccaccaccaccgccaccagagaggaggccagcaccagcctgcccaccaagcccacccagggcgccagcagcgccagcgagccccagggcctgttcgtggaggccctgagcgtgcccctgagcctgtgcgtgagcagccacctggccctgcccgcccagcaccactgggagagctggtag

SEQ ID NO: 112405 - DNA, 2010 bp, Artificial Sequence
  derived and/or modified sequence
atggccgcagcccaggaggcagacggggcccggagcgctgtagtggctgccgggggcgggagttccggacaggtgacgtccaatggctcaatcggaagagatcctcccgcagaaacccagccccagaatcccccggcccaacccgcacccaacgcctggcaggtcatcaagggtgtcctgttccgcatcttcattatctgggctattagtagctggtttaggaggggccccgccccacaggaccaagccggccccggcggagcaccaagagttgcctcacgcaatctcttccctaaagatacattgatgaacctccacgtatacattagcgagcacgagcactttaccgacttcaacgctacaagcgctctgttttgggagcagcatgacctcgtgtacggcgattggacctctggggaaaatagcgatggctgttacgaacactttgccgagctcgacattccccagtccgtgcaacagaacgggtccatctacattcacgtgtacttcactaaatcaggtttccaccctgacccgcggcaaaaggccttgtatcgcagactggccactgttcacatgtcacgcatgattaacaaatacaagaggagacgcttccagaagactaagaatctcttaacaggcgaaactgaggccgacccagaaatgatcaagagagccgaagattacgggccggtcgaagtaatttcccattggcatcccaacatcaccattaacatcgtagacgatcacactccctgggtgaaggggtctgtgcctccccctctcgaccagtacgtgaaatttgatgccgtatccggcgattactatccaataatatatttcaacgattactggaacttgcagaaagactactatcctattaacgagtctctggccagtctcccactgcgagttagtttttgccccttaagcttgtggcgctggcagctctatgcagcccaatcaaccaagtcaccatggaactttctgggagatgagctttacgaacagtctgatgaagagcaggactccgtgaaagtggctctcctggaaactaatccctatctgctggccctgactattattgtctccattgtccactccgtgtttgagttcctagcttttaaaaatgacatccagttttggaactcccgtcagagtttggaaggactgagtgttaggagtgtattcttcggtgtgttccagtcttttgttgttctgttatacattctcgacaacgaaacaaattttgtagtgcaggtttccgtcttcattggggtcctgatcgacctctggaagataacaaaagtgatggacgtgcgtctggaccgagaacatagggtcgctggcattttcccacgtctgagcttcaaggacaagtctacatacattgaatcatcaaccaaagtgtacgacgacatggcgtttagatacctaagttggattttgtttccactgcttggctgctacgctgtgtactctctgctttacctggaacataaaggctggtacagctgggtactttcgatgctctatggttttctgctcactttcgggtttatcaccatgacaccacagcttttcatcaactataaactgaaaagcgtcgcacatttgccctggcggatgttaacttacaaggccctcaacacatttatcgatgacctgtttgctttcgtcatcaagatgcccgtgatgtaccgaatcggttgcttgcgcgatgatgtcgtcttctttatatatctctatcagcgctggatctaccgcgtggatcccactcgggttaatgagtttggcatgtcaggggaggatcccaccgctgctgcacctgtcgctgaggtccccaccgccgcgggtgcgttgactcccacccctgcccccactaccaccactgccacacgggaagaagctagcacctcactccctaccaaacccacccagggcgcgagttcggccagtgaaccacaggaggcacctcctaagcctgccgaagacaaaaaaaaggactag

SEQ ID NO: 112406 - DNA, 2061 bp, Artificial Sequence
  derived and/or modified sequence
atggctgccgcacaggaggcagacggcgcccgctccgccgttgtcgccgctggaggggggtcgagcgggcaggtaacgtccaacggtagtattggaagagatcctcccgccgagacacagcctcagaaccctcccgcccagcctgcaccaaatgcgtggcaagtgatcaagggggtactatttaggatctttatcatctgggcaatcagctcttggtttagacgcggccccgcgccacaggatcaggccggcccaggaggggcgccacgggtggcgtcacgcaacctctttcccaaagacactcttatgaacctccacgtttacatatccgaacatgaacactttacagactttaatgcaacctccgccttattttgggaacaacacgatctcgtgtacggagactggacaagtggcgagaattccgacggctgctatgagcactttgccgagttagatatacctcagtcagtgcagcaaaacgggagcatctacattcatgtctactttacaaagtctggcttccatccagatccacgccagaaggcattgtatcgccgtctagcaaccgtacatatgagcaggatgattaacaagtacaagcgacggcgattccaaaagactaaaaatctcttgacaggcgagacggaagccgacccggaaatgatcaagagagccgaagattacggcccagtggaggtgattagccactggcatccaaatatcaccatcaacatcgtggatgaccataccccctgggttaaaggttccgtgcctcctcctctcgaccagtatgtgaaatttgacgccgttagcggcgattattatccaatcatctattttaacgactactggaacctccagaaggattattatccaatcaacgagagtttggcctctctgcctctgcgagttagcttctgtcctctgtccctctggcggtggcaactctatgcagcacagtctaccaaatccccctggaatttcctgggcgatgaactgtacgagcaatcagatgaggagcaggacagtgttaaggtggccctgttggagacaaacccctacctcctggcgctgactattatcgtgtcaattgtccactctgtctttgagtttctggcatttaagaacgatatacagttttggaatagtcggcagagtctggaaggcctttccgtgagatcagtgtttttcggagtgttccaaagctttgttgtcctcctgtacattctggataatgaaaccaacttcgtggttcaagtgagtgtattcatcggagtcctcattgacttgtggaaaatcaccaaagttatggatgtgaggttggacagagagcacagagtggcaggaatctttccgaggttgtccttcaaggacaagtcaacctacattgagtcctcaactaaggtctatgacgatatggccttcagatacctcagctggattctctttccattgctgggctgttacgcagtttactcactgctgtatctcgaacacaaagggtggtattcatgggtattgtccatgttgtacggatttctgctgacattcggtttcattaccatgaccccacaactattcattaattacaagctcaagagcgtcgcccatcttccgtggcgcatgttaacctataaagcactgaatacgtttatcgatgacctgttcgcctttgtcatcaagatgcccgtgatgtacagaatagggtgcctgcgggacgatgtggtgttcttcatttacctgtatcaacgctggatctatagggtggatcccacccgcgtaaacgaattcggaatgtccggtgaggaccctacggctgccgctcccgtggctgaggtgcctactgctgccggggcgctgactcccaccccagcgccgactaccactaccgccacaagagaggaagcatcaacctcattgcctactaaacccacacaaggagcatcctctgcttccgaaccacaggggctgttcgtcgaagcactatcagtgcccctgtcactctgtgtcagttcccatctggccttaccagcccagcaccattgggaaagttggtag

SEQ ID NO: 112407 - DNA, 2010 bp, Artificial Sequence
  derived and/or modified sequence
atggctgctgcccaggaggctgatggagcccggtctgctgtggtggccgccggcggcggcagcagcggccaggtgaccagcaatggcagcatcggccgggaccccccagctgagacccagccccagaaccccccagcccagcctgccccaaatgcctggcaggtgatcaagggcgtgctcttccgcatcttcatcatctgggccatcagctcctggttccggcggggccctgccccccaggaccaggccggccctggaggagccccccgggtggccagcaggaacctcttccccaaggacaccctgatgaacctgcacgtgtacatcagcgagcacgagcacttcacagacttcaatgccaccagcgccctcttctgggagcagcacgacctggtgtatggagactggaccagcggggagaacagtgatggctgctatgagcactttgctgagctggacatcccccagagcgtgcagcagaatggcagcatctacatccacgtgtacttcaccaagagcggcttccacccagacccccggcagaaggccctgtaccgccgcctggccaccgtgcacatgagcaggatgatcaacaagtacaagagaagacgcttccagaagaccaagaacctgctgactggagaaacagaggccgaccctgagatgatcaagagagcagaagattatggccctgtggaggtgatcagccactggcaccccaacatcaccatcaacatcgtggatgaccacaccccctgggtgaagggctctgtgcccccacccctggaccagtatgtgaagtttgatgctgtgtctggggactactaccccatcatctacttcaatgactactggaacctgcagaaggactactaccccatcaatgaaagcctggccagcctgcccctgcgggtgtccttctgccccctgagcctgtggcgctggcagctgtatgctgcccagagcaccaagagcccctggaacttcctgggagatgagctgtatgagcagagtgatgaggagcaggacagcgtgaaggtggccctgctggagaccaacccctacctgctggccctgaccatcatcgtgtccatcgtgcacagcgtgtttgagttcctggccttcaagaatgacatccagttctggaacagccggcagagcctggagggcctgtctgtgcgctctgtgttcttcggggtcttccagagctttgtggtgctgctgtacatcctggacaatgagaccaactttgtggtgcaggtgtctgtgttcatcggcgtgctgattgacctgtggaagatcaccaaggtgatggatgtgcggctggaccgggagcaccgggtggccggcatcttcccccggctgtccttcaaggacaagagcacctacatcgagagcagcaccaaggtgtatgatgacatggccttccgctacctgtcctggatcctcttccccctgctgggctgctatgctgtgtacagcctgctgtacctggagcacaagggctggtacagctgggtgctgtccatgctgtatggcttcctgctgaccttcggcttcatcaccatgaccccccagctgttcatcaactacaagctgaagtctgtggcccacctgccctggaggatgctgacctacaaggccctgaacaccttcattgatgacctgtttgcctttgtgatcaagatgcctgtgatgtacagaattggctgcctgagagatgatgtggtgttcttcatctacctgtaccagcgctggatctacagagtggaccccaccagggtgaatgaatttggcatgtctggagaggaccccacagctgctgcccctgtggccgaggtgcccacagctgctggggccctgacccccaccccagcccccaccaccaccacagccacccgggaggaggccagcaccagcctgcccaccaagcccacccagggcgccagcagcgccagcgagccccaggaggccccacccaagccagctgaggacaagaagaaggactag

SEQ ID NO: 112408 - DNA, 2061 bp, Artificial Sequence
  derived and/or modified sequence
atggctgctgcccaggaggctgatggagcccggtctgctgtggtggccgccggcggcggcagcagcggccaggtgaccagcaatggcagcatcggccgggaccccccagctgagacccagccccagaaccccccagcccagcctgccccaaatgcctggcaggtgatcaagggcgtgctcttccgcatcttcatcatctgggccatcagctcctggttccggcggggccctgccccccaggaccaggccggccctggaggagccccccgggtggccagcaggaacctcttccccaaggacaccctgatgaacctgcacgtgtacatcagcgagcacgagcacttcacagacttcaatgccaccagcgccctcttctgggagcagcacgacctggtgtatggagactggaccagcggggagaacagtgatggctgctatgagcactttgctgagctggacatcccccagagcgtgcagcagaatggcagcatctacatccacgtgtacttcaccaagagcggcttccacccagacccccggcagaaggccctgtaccgccgcctggccaccgtgcacatgagcaggatgatcaacaagtacaagagaagacgcttccagaagaccaagaacctgctgactggagaaacagaggccgaccctgagatgatcaagagagcagaagattatggccctgtggaggtgatcagccactggcaccccaacatcaccatcaacatcgtggatgaccacaccccctgggtgaagggctctgtgcccccacccctggaccagtatgtgaagtttgatgctgtgtctggggactactaccccatcatctacttcaatgactactggaacctgcagaaggactactaccccatcaatgaaagcctggccagcctgcccctgcgggtgtccttctgccccctgagcctgtggcgctggcagctgtatgctgcccagagcaccaagagcccctggaacttcctgggagatgagctgtatgagcagagtgatgaggagcaggacagcgtgaaggtggccctgctggagaccaacccctacctgctggccctgaccatcatcgtgtccatcgtgcacagcgtgtttgagttcctggccttcaagaatgacatccagttctggaacagccggcagagcctggagggcctgtctgtgcgctctgtgttcttcggggtcttccagagctttgtggtgctgctgtacatcctggacaatgagaccaactttgtggtgcaggtgtctgtgttcatcggcgtgctgattgacctgtggaagatcaccaaggtgatggatgtgcggctggaccgggagcaccgggtggccggcatcttcccccggctgtccttcaaggacaagagcacctacatcgagagcagcaccaaggtgtatgatgacatggccttccgctacctgtcctggatcctcttccccctgctgggctgctatgctgtgtacagcctgctgtacctggagcacaagggctggtacagctgggtgctgtccatgctgtatggcttcctgctgaccttcggcttcatcaccatgaccccccagctgttcatcaactacaagctgaagtctgtggcccacctgccctggaggatgctgacctacaaggccctgaacaccttcattgatgacctgtttgcctttgtgatcaagatgcctgtgatgtacagaattggctgcctgagagatgatgtggtgttcttcatctacctgtaccagcgctggatctacagagtggaccccaccagggtgaatgaatttggcatgtctggagaggaccccacagctgctgcccctgtggccgaggtgcccacagctgctggggccctgacccccaccccagcccccaccaccaccacagccacccgggaggaggccagcaccagcctgcccaccaagcccacccagggcgccagcagcgccagcgagccccagggcctgtttgtggaggccctgtctgtgcccctgagcctgtgtgtgagcagccacctggccctgcctgcccagcaccactgggagagctggtag

SEQ ID NO: 112409 - DNA, 2010 bp, Artificial Sequence
  derived and/or modified sequence
atggccgccgcccaggaggccgacggcgcccggagcgccgtggtggccgccggaggtggcagctctggccaggtcacctctaacggctcaattggtagagatcctcctgcagaaactcagccacagaacccgcctgcacaacctgctccaaacgcgtggcaggtgattaagggcgtcctctttcgcatctttattatatgggcgatcagtagctggtttcgccgcgggcctgcccctcaggaccaggcagggcctggaggggcccctagagtggcctctaggaatctatttccaaaggatacgctgatgaatctccacgtttatatctctgagcatgagcacttcacggattttaatgccactagcgctctcttttgggaacagcacgatctggtgtacggcgactggacctctggcgaaaattctgatggttgttacgagcatttcgctgagttagatatccctcagtcagttcagcagaatgggtcaatttacattcacgtgtactttaccaagtccggttttcacccagatccaaggcaaaaggccctgtaccggcgcctggcaaccgtgcacatgtcacgcatgattaacaagtataagcgccgcagattccagaaaacaaagaacctcttgaccggagagacagaagcagaccccgagatgatcaagagagccgaggactatggccccgttgaggtcattagccactggcatcctaatatcacgattaacattgtggatgatcacactccctgggtcaaagggagtgtcccgccccccctggatcagtacgtcaaatttgacgccgtgtctggcgactactaccccatcatttactttaatgactattggaacctgcagaaggattactaccctatcaacgaatctctagcatcactcccccttcgggtgagcttttgtcctctgtcactgtggcggtggcaactttacgcggcacagagtacgaaaagtccttggaatttcctgggcgacgagctatatgagcaatcggacgaggaacaagacagtgtgaaggttgcactcctcgaaacaaatccctacctgctggccctcacaatcatagtatcaatcgtacactccgttttcgaatttctggcgttcaaaaacgatatccagttttggaattcacgccagtctctggagggactctctgttcgaagcgttttctttggagttttccagagtttcgtggtgctactgtatatactggataacgaaacgaacttcgttgtgcaggtctctgttttcatcggggtgcttatcgacttatggaaaattactaaagtaatggacgtgagactcgaccgggagcatcgagtcgctggcatcttcccaaggctcagctttaaagataagagcacgtatatcgagtccagtaccaaggtctacgacgacatggcgttcaggtacttgagctggattctgtttcctcttctgggttgctacgccgtttactcgctgctataccttgagcacaagggttggtactcttgggttctaagcatgctgtacgggttcctgctcactttcgggttcatcactatgaccccacagttatttatcaattataagctgaaaagtgtggcccatctgccttggcgaatgctcacctataaagcactgaatacgttcatcgatgacctctttgcctttgtgatcaaaatgcctgtgatgtacaggatcggatgcctacgggatgatgtggtattcttcatctacctgtatcagcgctggatctacagggttgacccaacacgcgttaatgagtttgggatgtccggcgaggatcccaccgctgctgctcccgttgcggaggttccaacggccgccggagctctcacccctacccctgcgccgaccaccactacggcaacaagggaagaagccagtacttccctccctactaagccaacccagggtgcctccagcgcaagcgagccgcaggaggcgcctccaaaacccgccgaagacaagaagaaggactag

SEQ ID NO: 112410 - DNA, 2061 bp, Artificial Sequence
  derived and/or modified sequence
atggccgccgcccaggaggccgacggcgcccggagcgccgtggtggcagctggcggaggtagtagcggccaggtcacgtccaatggctccataggacgggatccacctgccgagacacagcctcagaacccgccggcacagcccgctccaaatgcctggcaagtgattaaaggggttctgttccgcatttttatcatttgggcaattagctcctggttcaggagaggacccgccccacaggatcaggccggacccggaggcgcgcctagagttgctagccggaacctgttccccaaagacactcttatgaatctgcacgtatacatctcagaacatgagcactttacggacttcaatgcgacatctgccttgttttgggaacaacacgacctcgtttatggggactggacctcgggcgagaactccgatggctgctatgagcacttcgcagaactcgacatccctcagtctgtgcagcagaatggaagtatttacattcatgtgtacttcactaaatctgggtttcatcccgatcctagacagaaagctttatatagacgtctcgctacggtgcacatgagccggatgataaacaagtataagagacgtaggtttcagaaaacgaagaatttattgactggggagaccgaggctgatcccgagatgatcaagagggcagaagattacggccccgtagaagtcataagccattggcacccgaatattactatcaacatcgtagatgatcacacaccttgggtgaaaggatctgtacccccgcccttggaccagtatgtcaaattcgatgccgtttctggagactattacccaatcatttattttaatgactactggaatctgcagaaggactactaccccattaatgagtctctggccagcctgccactcagggtctcattttgcccactgtccctgtggcgatggcagctgtacgcggctcagagcaccaagtctccctggaatttcttaggggacgaactatatgagcaatccgatgaagagcaggatagcgtaaaagtcgctttgctagaaaccaatccctatctgctcgcgcttactatcatcgtcagtattgtgcatagcgtctttgagtttctcgcatttaaaaatgacatccaattttggaattcacgccagagcctcgagggcctgagcgtacgcagcgtcttcttcggagtcttccagagcttcgtagtcctgttgtacattctggacaatgaaaccaacttcgtggtccaagtctctgtgttcatcggcgtactcatcgatctgtggaagattactaaggtgatggacgtgcgcctcgatcgggagcatcgtgtagccgggatttttcctagactttccttcaaagacaagagtacttatattgaatcctcaaccaaagtgtatgatgacatggcttttcgctaccttagttggattctttttcccctcctagggtgttatgccgtgtattcactgctgtacctcgagcacaagggctggtattcatgggttctcagtatgctatacggattcctgctcacgtttggtttcattacgatgactccgcagctgttcataaactataaactgaaatccgtcgctcacctcccgtggaggatgctgacgtacaaagctttgaatacttttatagacgacctttttgcattcgtgatcaagatgccggtaatgtatcgaattggatgtctgcgcgacgatgtagtctttttcatctacctctaccagcgctggatatacagagtggatccgacccgggtcaatgaattcggcatgtccggcgaggaccccaccgctgccgctccagtggctgaagtccccactgcagctggcgcgctaacccctacacctgctcctacaacaaccacagcgactcgagaggaagcgtcaacttccctgcctactaagccaacccagggtgccagctccgcgagtgaaccccagggtcttttcgtggaagcgctcagtgtccctttaagcctatgtgtatccagccaccttgccctgcccgcgcagcaccattgggaaagttggtag

SEQ ID NO: 112411 - DNA, 2010 bp, Artificial Sequence
  derived and/or modified sequence
atggccgctgcccaggaggctgatggcgcacgatcggccgtggttgcagccggtgggggtagcagcgggcaggttacatcgaatggtagcattggacgggatcctcctgccgaaacccaaccgcagaatcctccagctcagcctgccccaaatgcctggcaggtgatcaagggcgttcttttcagaatctttataatttgggccatctctagctggttccgtcggggacctgccccacaagaccaagctggaccaggtggtgccccaagagtagcaagccgtaatttgttccccaaggatactctcatgaatctgcatgtgtacatttctgagcacgaacacttcactgacttcaacgcaaccagcgccttattttgggaacagcacgacctcgtgtatggcgactggacttcaggtgagaactcagatggatgctatgaacatttcgcggagctggacattcctcagagcgtacagcagaatggttctatctacattcacgtgtacttcaccaaatccggcttccacccagatcccaggcaaaaagcgctctacaggagactggcgactgtccacatgtcacgcatgatcaataagtataagcgacgaagattccaaaagaccaagaatttattgaccggggagactgaggccgaccctgagatgatcaaaagagcggaggattatggacctgttgaggttattagtcactggcacccaaatattactattaacatcgttgatgaccatactccatgggttaaaggatccgtcccgccaccccttgaccaatacgtgaaattcgatgccgtatccggtgactattacccaatcatctattttaacgactattggaacctccagaaagactactatccaataaatgaatccttagcaagcctgcctctccgggtctcattttgcccccttagtttgtggagatggcagttgtacgctgcgcagtctactaaatcgccctggaacttcctgggggacgagttgtatgaacagtcagatgaggaacaagatagtgtaaaggtggcattgctggaaactaacccctatctcctagcacttaccattattgttagtatagtccactctgtgtttgagttcctggcattcaaaaacgacatccagttttggaactccaggcagagcctcgagggactgtcagttagatcagtgttctttggtgtatttcaatctttcgttgtgctgttgtacattttggataacgagaccaatttcgtggtgcaggtgtcagttttcatcggcgtgctgatcgacctgtggaagattactaaggttatggacgtcagactcgatcgggaacatagggtggcaggcatatttccaagactctcttttaaagacaagtccacttacatagagagtagcacaaaggtgtatgatgacatggccttcaggtatctatcatggatactgttccctctgctgggatgctatgcagtgtatagcctgctttacctggaacataaaggctggtattcctgggtgttatctatgctgtatggttttctgctcactttcgggtttatcaccatgacccctcagttgtttatcaattataaactcaagagtgtggctcacctgccttggcggatgctgacctacaaagctctgaatacttttatcgacgacttgtttgcatttgtgatcaaaatgccagtgatgtatagaattggctgtttgagagatgacgtcgtgtttttcatttacctctatcagagatggatttaccgggtggaccctacaagagtgaacgagtttggaatgagcggtgaggaccctacagccgcagcccctgtcgccgaggtgccaactgccgcaggggctctcactccaactcccgctccgaccaccacaactgccacccgggaggaggcatcaacgtctctcccaaccaagcctactcagggtgcatcgtccgcgtccgaaccacaagaggcccctccaaagccagctgaagacaaaaaaaaagactag

SEQ ID NO: 112412 - DNA, 2061 bp, Artificial Sequence
  derived and/or modified sequence
atggctgccgctcaggaagccgacggggcacggagcgcagttgtcgcggcaggcggaggcagctctggacaggttacgtccaacgggtcaatcggcagagatccccctgccgagactcagccccagaatcctccagctcagcccgctcccaacgcctggcaagtcattaagggggtgttgtttcgcatctttatcatctgggctatttcttcctggttcagacgagggccagcacctcaagatcaggctggccctggaggcgcacccagggtcgcatccaggaatttgtttcccaaagacacactcatgaacctgcatgtgtatattagcgagcacgaacacttcaccgacttcaacgcgaccagcgcattattttgggagcagcacgacctggtgtatggggactggacgtctggtgagaattcagacggttgctacgaacacttcgctgagctcgatatcccacaatcagtccagcagaatggatccatttatattcatgtctattttacgaagagtggatttcatccagatcccaggcaaaaagctttatacaggcgtctggctacagtccatatgagtcgaatgataaacaaatataagcgcagacgcttccagaaaacgaagaatttactgaccggggaaaccgaggctgacccagagatgattaagagagccgaggattacggcccagttgaggttatctcccattggcatccaaacatcactatcaacattgttgacgatcacacgccatgggtgaaagggagcgtgccacctcctctggaccagtacgtgaagttcgacgccgtgtctggcgactactaccctataatatatttcaatgactattggaacctgcagaaggattactaccccatcaacgagagcctggctagcctccccctccgggtttctttctgccccctctcgctgtggcgctggcagttgtacgccgcacaaagcaccaagtcaccctggaactttctgggcgatgagctgtacgagcaaagcgacgaagaacaagatagtgtgaaggttgctctgcttgaaaccaatccctacttgctggctctgactatcattgtgtcaatagtgcacagcgtgtttgagttcttagccttcaaaaacgatatccaattttggaacagccgccagtctcttgaagggctgagcgtgcgtagtgtgttcttcggcgtgttccagtcattcgtagtgctgttatacatcctcgataacgaaaccaacttcgtcgtgcaagtgagcgtatttatcggggttttgattgatctttggaagatcaccaaggtcatggatgtgcggcttgatcgggagcaccgtgtggccggaatcttccctcggctgagcttcaaagataagagcacttacatcgaaagcagtaccaaggtgtacgacgacatggccttccggtatttgtcatggattcttttcccactattagggtgttatgcagtgtattctctgttgtacctggagcacaagggatggtattcctgggtgctcagcatgctctacggctttctgctgacatttggcttcatcaccatgacaccgcagctctttattaactacaaacttaaaagcgtcgcgcacctgccatggaggatgttaacctataaggccttaaacacattcatcgacgatttgtttgccttcgtgatcaagatgcctgtgatgtaccggatcggatgcctccgagacgacgtggtgtttttcatctatctttatcagagatggatctacagggtggatccgacgagggtcaacgaatttggaatgtccggtgaggaccctaccgccgcagctccagttgccgaagtgcctacagctgcaggggctctcacgccaacacctgcacctacaactactacagccacgcgcgaagaggcctcaacgtcgcttcccacaaaaccaacacagggagcctcttcagcatctgagccacaggggctgtttgttgaagccctgagcgttcccttgagtctgtgcgtctcttcacacctcgccctgcccgcacagcaccattgggaatcctggtag

SEQ ID NO: 112413 - protein, 355 aa, Artificial Sequence
  derived and/or modified sequence
METPNTTEDYDTTTEFDYGDATPCQKVNERAFGAQLLPPLYSLVFVIGLVGNILVVLVLVQYKRLKNMTSIYLLNLAISDLLFLFTLPFWIDYKLKDDWVFGDAMCKILSGFYYTGLYSEIFFIILLTIDRYLAIVHAVFALRARTVTFGVITSIIIWALAILASMPGLYFSKTQWEFTHHTCSLHFPHESLREWKLFQALKLNLFGLVLPLLVMIICYTGIIKILLRRPNEKKSKAVRLIFVIMIIFFLFWTPYNLTILISVFQDFLFTHECEQSRHLDLAVQVTEVIAYTHCCVNPVIYAFVGERFRKYLRQLFHRRVAVHLVKWLPFLSVDRLERVSSTSPSTGEHELSAGF

SEQ ID NO: 112414 - DNA, 1068 bp, Artificial Sequence
  derived and/or modified sequence
atggaaacccccaatactactgaggactatgatactactactgagtttgattacggcgacgccaccccgtgccagaaggtaaacgaacgtgcttttggggctcaactcttgccaccattatattctctcgtctttgtgataggcctcgtgggcaacattttagttgtgctcgtgctggtgcagtacaaacgattaaagaacatgacttccatttatcttctaaatctggcaattagtgacctcctattccttttcactcttcctttttggatcgactacaagctgaaggacgactgggtctttggcgatgctatgtgcaaaatactcagcggattctactacactggactgtatagtgagatattcttcataattctgctcactattgatcgatatcttgccatcgtgcatgctgttttcgcactcagagccaggacagtgacattcggggtgattacttctattatcatttgggcccttgctatcctggcatctatgccagggttgtatttcagtaagacacagtgggagttcacacaccacacttgtagtcttcatttcccacacgaaagcctccgcgagtggaaactttttcaggctttgaagttgaatctcttcggtctagtcttaccactgcttgtgatgataatctgctacacagggatcatcaaaatcctcctgagacgccctaatgagaagaaaagcaaggccgtccgattgatcttcgtgatcatgattatcttcttccttttttggactccatacaatttaactatccttatcagcgttttccaggactttctttttacccacgaatgtgagcagagtaggcacctcgacttagctgtacaggtgacagaggtgattgcttacacgcactgttgtgtgaatcctgtgatctacgcgttcgttggggaacggtttcggaagtatctccgccagctctttcaccgaagggtggcggtacatctcgtgaagtggctgccgttcctgtcagttgaccgcctagagagggtctctagtactagccccagtactggggaacatgaattatctgctggcttttag

SEQ ID NO: 112415 - DNA, 1068 bp, Artificial Sequence
  derived and/or modified sequence
atggagacccccaacaccacagaggactatgacaccaccacagaatttgattatggagatgccaccccctgccagaaggtgaatgaaagagccttcggggcccagctgctgccccccctgtacagcctggtgtttgtgattggcctggtgggcaacatcctggtggtgctggtgctggtgcagtacaagaggctgaagaacatgaccagcatctacctgctgaacctggccatcagtgacctgctcttcctgttcaccctgcccttctggattgactacaagctgaaggatgactgggtgtttggagatgccatgtgcaagatcctgagcggcttctactacacaggcctgtacagcgagatcttcttcatcatcctgctgaccatcgaccgctacctggccatcgtgcatgctgtgtttgccctgcgggccaggacagtgacctttggagtcatcaccagcatcatcatctgggccctggccatcctggcctccatgcctggcctgtacttcagcaagacccagtgggagttcacccaccacacctgcagcctgcacttcccccatgagagcctgcgggagtggaagctgttccaggccctgaagctgaacctgtttggcctggtgctgcccctgctggtgatgatcatctgctacacaggcatcatcaagatcctgctgcggcggcccaatgagaagaagagcaaggctgtgcggctcatcttcgtcatcatgatcatcttcttcctgttctggaccccctacaacctgaccatcctgatcagcgtcttccaggacttcctgttcacccatgaatgtgagcagagccgccacctggacctggccgtgcaggtgacagaggtgattgcctacacccactgctgcgtgaaccctgtgatctatgcctttgtgggggagcgcttcaggaagtacctgcggcagctgttccaccggcgggtggccgtgcacctggtgaagtggctgcccttcctgtctgtggaccggctggagcgggtgagcagcaccagccccagcactggagaacatgagctgtctgctggcttctag

SEQ ID NO: 112416 - DNA, 1068 bp, Artificial Sequence
  derived and/or modified sequence
atggagacccccaacaccaccgaggactacgacaccaccaccgagttcgattatggtgacgccaccccttgtcagaaggtgaacgaacgtgcctttggtgcccagcttctccctccgctgtattcactagtgttcgtaattgggttagtcgggaatatccttgttgtacttgttcttgtccagtacaagcgcctgaagaacatgacgagcatctaccttctgaaccttgcaatcagcgacttattgtttctgttcacactccccttttggattgactacaaactcaaagatgactgggttttcggcgatgcaatgtgcaaaattctgagcggattctattacacgggactgtactcagaaatcttctttattatactgctcacaattgatcgttacttagctatcgtccacgccgtctttgcactgcgggcccggacagttacctttggagtgattacatctattattatttgggctctggccatcttagcatcaatgcctggattgtatttttccaagactcagtgggagttcacacaccacacttgcagcctccacttccctcacgaatccctacgggaatggaagctgttccaagccttgaaactcaacttgtttgggttggtactgcctcttctcgtcatgattatctgttacacgggaataattaagatcctgcttagaagacctaacgagaagaagtccaaggctgtgcgactgatcttcgtgattatgatcatcttcttccttttctggaccccttataatctaactattcttatttcagtctttcaagacttcctgtttacgcatgagtgtgaacagtcacggcatcttgatctggcagtgcaagttacagaagtcatcgcctacactcattgttgtgtaaatcccgtcatttacgccttcgtgggagagaggttccgaaaatacctgcggcaattattccacaggcgagtcgctgtgcatctggtaaagtggctccctttcttgagcgtggacagactggaacgcgtctcctctaccagcccgagcaccggcgaacatgagctcagcgctggattctag

SEQ ID NO: 112417 - DNA, 1068 bp, Artificial Sequence
  derived and/or modified sequence
atggaaactccaaatacaaccgaagactacgatacgaccaccgagtttgattatggagatgccacaccttgtcagaaagtcaatgagcgtgccttcggcgcacagctcctaccacctttatattctctggtatttgttatcggtttggttgggaatatcctcgtagtgttagtgctcgtgcagtataaaaggctgaaaaatatgacctcaatctatctcttgaatcttgccatttctgatttacttttcctgttcacacttccgttctggattgactataagctcaaggacgactgggtatttggtgatgcgatgtgtaagattttatcgggattttactatactggactgtactcggaaatctttttcattattctccttacaatcgatcggtacctggccattgtccacgcagtgtttgcactccgggctaggaccgtgacatttggcgtgatcacatccataattatatgggctctagccattctggcctccatgcctgggttatattttagcaagacccaatgggaattcactcaccacacctgcagtcttcacttcccacacgaatcgctgagagaatggaaactattccaggcgctgaaactcaatctgttcggattggtattgcctctcctggtcatgatcatttgttacaccggaataataaaaatccttctgaggcgcccaaacgagaagaagagtaaggcagtccgactgatctttgttatcatgataatattctttttgttctggaccccctacaatctcactattctcattagcgtctttcaggactttctgtttacgcacgaatgcgaacagtcgaggcacctggacctcgccgtccaggtaaccgaggtcatcgcgtatacccattgctgcgtcaatcccgttatttacgcgttcgtcggtgagcggttccgcaagtaccttagacagctgttccatcgcagagtggccgtccacttggtcaagtggctgccattcttgtcagttgacaggctggagcgcgtttcctcaacatcaccttccacaggtgaacacgaactgagcgcaggtttctag

SEQ ID NO: 112418 - DNA, 2731 bp, Artificial Sequence
  derived and/or modified sequence
atcacacaggaagctgagtacttcctacttggtcaggatcttgaaacttgaattcataaaaacccagaaagccccagaaacaaagacttcacggacaaagtcccttggaaccagagagaagccgggatggaaactccaaacaccacagaggactatgacacgaccacagagtttgactatggggatgcaactccgtgccagaaggtgaacgagagggcctttggggcccaactgctgccccctctgtactccttggtatttgtcattggcctggttggaaacatcctggtggtcctggtccttgtgcaatacaagaggctaaaaaacatgaccagcatctacctcctgaacctggccatttctgacctgctcttcctgttcacgcttcccttctggatcgactacaagttgaaggatgactgggtttttggtgatgccatgtgtaagatcctctctgggttttattacacaggcttgtacagcgagatctttttcatcatcctgctgacgattgacaggtacctggccatcgtccacgccgtgtttgccttgcgggcacggaccgtcacttttggtgtcatcaccagcatcatcatttgggccctggccatcttggcttccatgccaggcttatacttttccaagacccaatgggaattcactcaccacacctgcagccttcactttcctcacgaaagcctacgagagtggaagctgtttcaggctctgaaactgaacctctttgggctggtattgcctttgttggtcatgatcatctgctacacagggattataaagattctgctaagacgaccaaatgagaagaaatccaaagctgtccgtttgatttttgtcatcatgatcatcttttttctcttttggaccccctacaatttgactatacttatttctgttttccaagacttcctgttcacccatgagtgtgagcagagcagacatttggacctggctgtgcaagtgacggaggtgatcgcctacacgcactgctgtgtcaacccagtgatctacgccttcgttggtgagaggttccggaagtacctgcggcagttgttccacaggcgtgtggctgtgcacctggttaaatggctccccttcctctccgtggacaggctggagagggtcagctccacatctccctccacaggggagcatgaactctctgctgggttctgactcagaccataggaggccaacccaaaataagcaggcgtgacctgccaggcacactgagccagcagcctggctctcccagccaggttctgactcttggcacagcatggagtcacagccacttgggatagagagggaatgtaatggtggcctggggcttctgaggcttctggggcttcagtcttttccatgaacttctcccctggtagaaagaagatgaatgagcaaaaccaaatattccagagactgggactaagtgtaccagagaagggcttggactcaagcaagatttcagatttgtgaccattagcatttgtcaacaaagtcacccacttcccactattgcttgcacaaaccaattaaacccagtagtggtgactgtgggctccattcaaagtgagctcctaagccatgggagacactgatgtatgaggaatttctgttcttccatcacctccccccccccgccaccctcccactgccaaagaacttggaaatagtgatttccacagtgactccactctgagtcccagagccaatcagtagccagcatctgcctccccttcactcccaccgcaggatttgggctcttggaatcctggggaacatagaactcatgacggaagagttgagacctaacgagaaatagaaatggggaactactgctggcagtggaactaagaaagcccttaggaagaatttttatatccactaaaatcaaacaattcagggagtgggctaagcacgggccatatgaataacatggtgtgcttcttaaaatagccataaaggggagggactcatcatttccatttacccttcttttctgactatttttcagaatctctcttcttttcaagttgggtgatatgttggtagattctaatggctttattgcagcgattaataacaggcaaaaggaagcagggttggtttcccttctttttgttcttcatctaagccttctggttttatgggtcagagttccgactgccatcttggacttgtcagcaaaaaaaaaaaataataataataataaggcctgctgtgtaagctgacagtatttgtagctgatagggggttgggaggaaagtgtctactaggagggtggggtgagattctgtgttgatgtaggaggccgagaaggcccttaactcaaagtagcttatttatccaaaatgttctggatgcatcatctccaaccaaggaccccttatttatcatgcctttgttctcttttccctcagatgtatatttctttaaaaataattttcctaataacaaaacttatttctaaaacagcttaaaaattcaaagaaaaaccccaaacactgacattacctacacttccactacccaaagacaaaatgtgcccactgtgtgcttttgagtgtattttcttttagtttgttttttgttgggtgcatatttatgataataacaatgatggacttcaattgtactcactgttctattgttggttttaattagcagcaagttgtgatcactttcccaggtgaataaatcatttcaaagcatt

SEQ ID NO: 112419 - DNA, 1068 bp, Artificial Sequence
  derived and/or modified sequence
atggagacccccaacaccaccgaggactacgacaccaccaccgagttcgactacggcgacgccaccccctgccagaaggtgaacgagagagccttcggcgcccagctgctgccccccctgtacagcctggtgttcgtgatcggcctggtgggcaacatcctggtggtgctggtgctggtgcagtacaagagactgaagaacatgaccagcatctacctgctgaacctggccatcagcgacctgctgttcctgttcaccctgcccttctggatcgactacaagctgaaggacgactgggtgttcggcgacgccatgtgcaagatcctgagcggcttctactacaccggcctgtacagcgagatcttcttcatcatcctgctgaccatcgacagatacctggccatcgtgcacgccgtgttcgccctgagagccagaaccgtgaccttcggcgtgatcaccagcatcatcatctgggccctggccatcctggccagcatgcccggcctgtacttcagcaagacccagtgggagttcacccaccacacctgcagcctgcacttcccccacgagagcctgagagagtggaagctgttccaggccctgaagctgaacctgttcggcctggtgctgcccctgctggtgatgatcatctgctacaccggcatcatcaagatcctgctgagaagacccaacgagaagaagagcaaggccgtgagactgatcttcgtgatcatgatcatcttcttcctgttctggaccccctacaacctgaccatcctgatcagcgtgttccaggacttcctgttcacccacgagtgcgagcagagcagacacctggacctggccgtgcaggtgaccgaggtgatcgcctacacccactgctgcgtgaaccccgtgatctacgccttcgtgggcgagagattcagaaagtacctgagacagctgttccacagaagagtggccgtgcacctggtgaagtggctgcccttcctgagcgtggacagactggagagagtgagcagcaccagccccagcaccggcgagcacgagctgagcgccggcttctag

SEQ ID NO: 112420 - protein, 721 aa, Artificial Sequence
  derived and/or modified sequence
MLPRGRPRALGAAALLLLLLLLGFLLFGGDLGCERREPGGRAGAPGCFPGPLMPRVPPDGRLRRAAALDGDPGAGPGDHNRSDCGPQPPPPPKCELLHVAIVCAGHNSSRDVITLVKSMLFYRKNPLHLHLVTDAVARNILETLFHTWMVPAVRVSFYHADQLKPQVSWIPNKHYSGLYGLMKLVLPSALPAELARVIVLDTDVTFASDISELWALFAHFSDTQAIGLVENQSDWYLGNLWKNHRPWPALGRGFNTGVILLRLDRLRQAGWEQMWRLTARRELLSLPATSLADQDIFNAVIKEHPGLVQRLPCVWNVQLSDHTLAERCYSEASDLKVIHWNSPKKLRVKNKHVEFFRNFYLTFLEYDGNLLRRELFVCPSQPPPGAEQLQQALAQLDEEDPCFEFRQQQLTVHRVHVTFLPHEPPPPRPHDVTLVAQLSMDRLQMLEALCRHWPGPMSLALYLTDAEAQQFLHFVEASPVLAARQDVAYHVVYREGPLYPVNQLRNVALAQALTPYVFLSDIDFLPAYSLYDYLRASIEQLGLGSRRKAALVVPAFETLRYRFSFPHSKVELLALLDAGTLYTFRYHEWPRGHAPTDYARWREAQAPYRVQWAANYEPYVVVPRDCPRYDPRFVGFGWNKVAHIVELDAQEYELLVLPEAFTIHLPHAPSLDISRFRSSPTYRDCLQALKDEFHQDLSRHHGAAALKYLPALQQPQSPARG

SEQ ID NO: 112421 - DNA, 2166 bp, Artificial Sequence
  derived and/or modified sequence
atgctaccccgcggccgccctagagctctcggcgccgccgcgctgctcctgctgctactgctcttgggttttctcctcttcggtggagatctgggctgtgagaggagggaaccaggcgggcgggccggcgccccaggctgctttccagggcccctcatgccgcgagtgcccccagatggccgcctcaggcgggccgcggcactggacggcgatcccggcgctggtccaggcgatcataacagaagtgactgtggacctcagcccccacccccacccaagtgtgaactgctccacgtcgccatcgtgtgtgcgggccacaacagctctagagacgttatcaccctggtcaagagcatgctgttctaccgcaagaaccccttacatctgcatctcgtgaccgatgcagtagcccgcaatatccttgaaaccttgttccatacttggatggtccctgccgtccgtgtaagcttttaccacgctgatcaactaaagccccaagtgagttggatcccaaacaagcactacagtgggctttacggactgatgaagttagtgctccctagtgccttgccggctgagctggcccgggtcatcgtcctggatacagacgtgaccttcgcaagcgatatttcagagctgtgggccttgttcgcccattttagcgacactcaggctatcggccttgtggaaaatcagtctgactggtacctcggaaacctgtggaaaaatcacagaccatggcctgcactgggtcgcggcttcaatactggcgtgatcttgctgcgattggaccgtctccgacaggccggctgggaacaaatgtggaggctgacggcccgccgtgaactgctgtcactgcccgcgacaagtctcgctgatcaggatatctttaatgctgttataaaggagcacccaggactggtgcagcgacttccatgtgtttggaatgtacagttgagtgaccacaccttggcagagcggtgttattccgaagcctcagacctaaaggtgattcactggaattctcctaaaaaacttagagtaaagaacaaacacgtcgaattcttcaggaacttttatctgaccttcctggagtatgatgggaatctcctacggcgggaactgtttgtctgcccctcccagccgccccccggggcggaacaactacagcaggccttggcacagctagacgaggaggatccgtgctttgaattccggcaacagcaactgaccgtccacagggtgcacgtgaccttcctgccccatgagccccctccccctcgcccccacgacgtgaccctagtggcacaattatccatggatcggctgcagatgctggaggctctgtgtcgccattggccaggccctatgtccctcgcactgtatcttacggacgccgaggcgcagcagttcctgcattttgtggaggctagccccgtactggcagccaggcaggatgtcgcttaccacgttgtgtacagggaagggcccctgtaccccgttaaccaactgcgcaatgtggccctggcccaggctctgaccccgtacgtgtttctgtctgacatagattttctgcctgcctacagcctctacgactacctgagggcctccatcgaacaactgggccttggatcacgccgcaaggctgctctggttgtccccgcttttgagactctgaggtacagattctcttttccacacagcaaagtcgagcttttggccttactcgacgctggcacgctgtacacatttcggtatcacgaatggccgagaggccatgcgcctactgactatgccaggtggagggaggcacaagccccgtacagggtacagtgggccgcaaattacgagccctatgtcgtcgtcccccgagactgcccacgctacgatccacggttcgtggggtttggttggaacaaggtggctcacatagtcgaactggacgcacaggagtacgaactgcttgtgcttccggaggcctttacaattcacctgcctcacgcacccagtctggatatatctcggtttagaagttctccgacttacagagattgcttacaggcactgaaggatgagtttcaccaggacttatcacgtcaccacggcgccgcagcccttaaatatttacctgccctacaacagccacagtctcctgccagaggatag

SEQ ID NO: 112422 - DNA, 2166 bp, Artificial Sequence
  derived and/or modified sequence
atgttgccaagaggcagaccccgagccctgggtgctgccgcactcctcctgctgcttttgttactggggttcctgttatttggcggtgatttgggttgtgagcgccgcgagcctggcgggcgagcaggagccccagggtgcttcccagggcctctgatgcctagagtgccgccggacgggcggctacggcgagcagcggctctggatggggatcccggcgccggtcctggtgaccacaatcggagcgactgcgggccacagcccccgccccccccaaagtgcgagctgctgcacgtagccatcgtttgtgctggccataattcgtcccgagacgtgattaccctcgtgaaaagtatgctgttttacaggaaaaacccactgcatctccacttagtcaccgacgccgtggcccgcaacattttggagacactctttcacacctggatggtccccgccgtgcgcgtgtcgttttatcacgctgatcagttaaagcctcaggttagctggatcccaaacaaacactacagtggcctctacgggctgatgaagctggtgctgccgtccgcactccctgccgagctggccagagtgatcgtcttggatactgatgtgacgtttgcttcggacattagtgagctgtgggctctatttgcacatttctccgacacacaggcaatcgggttagttgagaatcagagtgactggtatctggggaatctctggaaaaatcatcgaccatggccagcactgggcagggggttcaataccggcgtgattctgctgcgccttgataggttaaggcaggctgggtgggagcaaatgtggagactaacagcccgtagggaactcttgtctcttcccgccacctcgttggctgaccaggacatctttaacgcagtaattaaggagcaccctgggctcgtccagagattaccatgcgtatggaacgtgcagctgtcagatcatactctggctgagcgctgctactccgaagcttccgatctgaaagtcatccactggaatagcccaaaaaagctgcgggtgaaaaacaagcacgttgagttcttccgcaatttttacttgacttttctcgaatacgacggaaatctattacggcgggagttgttcgtttgcccttctcaaccaccacccggggcagagcaattacagcaagccctcgcgcagctagacgaggaagacccatgtttcgaatttcgccaacagcagctgacagttcacagagtccatgttacgttcctacctcacgaaccgccccccccacgaccacacgacgtgacactcgtagcacagttatctatggacaggctacaaatgctggaggcactatgtcgtcattggccaggccctatgagcctagcattgtatctgacggacgccgaggcccagcaatttctgcatttcgtggaggcttcaccggttctggctgcacggcaggacgtggcgtaccacgtggtatacagggaagggcctctgtacccagtgaatcaactgcgcaacgtggccctggcccaggcactaactccctacgtgttcttgtctgacattgactttctgcccgcttacagtctttatgattacctccgcgcatctatcgaacagctggggctcggctctcggaggaaggctgccctcgtcgttcccgcatttgaaaccttgcggtacagatttagtttcccccatagcaaggtcgaactgctggcccttctggacgccggcacactctatacattcaggtatcacgagtggcctcgaggacatgctcccacggactatgcacggtggagggaggcccaggcaccatatagggtacagtgggccgccaattacgagccatatgtggtggttcccagagattgtccaaggtacgacccacggtttgtaggtttcggctggaacaaggtggcccacattgtggagctcgacgctcaggaatatgagctgctagttctcccggaagcctttacaatccacttgccccacgccccaagccttgatattagtcggtttagatcctctcccacctatcgggattgcttgcaagctttgaaagatgagtttcatcaagacctgagtcgccaccacggcgcggccgcactgaagtatctccccgcgctacaacagccacaatcccctgctcggggctag

SEQ ID NO: 112423 - DNA, 2166 bp, Artificial Sequence
  derived and/or modified sequence
atgctgcctaggggccgtcctagagccctgggcgctgccgcgctactgctgttgcttttgctcctggggtttctgcttttcggaggagacctgggatgcgagagacgagagcctggagggagagcgggcgccccggggtgtttccctggaccactgatgccacgtgttcctccagatggtaggctgcggcgcgcagcagcactagacggggatcctggtgccggccccggagatcacaatcggtcggactgtggaccacagccgcctccaccccccaaatgtgagctgctgcatgtcgccattgtctgcgccggtcacaatagtagcagagatgtaataacactggttaagtcaatgctgttctacaggaaaaaccctttgcacctgcacctggtaaccgatgctgtcgctaggaatatcctcgagactctctttcatacatggatggtacctgccgtccgggtgtcattttatcacgcagatcaattaaaacctcaggtgtcttggataccaaataaacattatagcgggttatatggcctcatgaaactagtgttaccatcagccctgcccgcggaactcgctcgggtgatcgtgttagacactgatgtgacattcgcttcagacatatccgaactctgggcgctgttcgcgcacttcagcgacacacaagctatcggtctcgtcgagaatcaatctgactggtacctcggaaatctctggaagaatcaccggccttggccggctttgggtcgaggctttaatactggggtgattttgctgagattagatcgtttacggcaagccggatgggagcagatgtggcgcctgactgctagaagggagctgctgagcctcccagccacgagtctcgctgatcaggatattttcaacgccgtaatcaaggaacacccaggactcgtacaacggctaccctgtgtctggaatgtgcagttgtcggatcacaccctggctgagcggtgctacagtgaggctagcgacctgaaagttatccactggaactccccaaagaaactgcgagtgaagaataaacacgtcgaatttttccgcaacttttacctaacctttctggaatacgatggtaatctgcttagaagggagctttttgtctgcccgtcacagccacctcccggcgccgaacagctgcagcaagcactagcccagctggacgaggaggacccctgtttcgaatttcggcagcagcagctcactgttcaccgagtgcacgtgacatttctgccacatgaacctccacccccaagacctcacgatgtgactctggtggcccagctgagcatggatcgcctgcagatgctggaggccctgtgccgccactggcccggtcccatgtcgctggccctgtaccttactgatgcagaagcccagcagttcctgcacttcgtggaggcatcgcccgttttagccgcccggcaggatgttgcctatcatgttgtctatagggagggccccctgtacccagttaaccaattgcgaaacgtggccctcgctcaagctctgacaccttatgtattcctgtcagatatagatttcctcccagcctactctctgtatgactatcttagagcctcgatagagcaactgggcctaggctctcgacgtaaagccgccctggtggtgcccgccttcgagacacttcggtaccgattcagctttccccacagtaaggtggagctgctggcactcctggatgcagggacattatacaccttccgatatcacgagtggccacgaggacatgctcccacggactacgctcggtggcgcgaggcccaggctccctatcgagtccagtgggccgccaattatgaaccttacgtggtggtgccgagggattgcccacggtatgacccccgctttgtgggatttggttggaacaaagtcgctcacatcgtggagttggatgcccaggaatatgaattacttgtactcccagaagcctttacaatccacctgccccacgctccaagcttggatatttctagattcaggtctagccccacttatcgcgactgcctccaggcgctcaaggacgaatttcaccaggatctcagcagacatcacggcgccgccgccctgaagtacctgcctgccctccaacagccacaatctccagcgaggggttag

SEQ ID NO: 112424 - DNA, 2073 bp, Artificial Sequence
  derived and/or modified sequence
atgctgccacgcgggcgtcccagggccctgggcgcggccgcccttctgctgctgctactacttctgggcttcctgctgttcgatggccgtttgcgtcgcgcagccgccttggatggagacccaggagctggccctggagaccacaacaggtcggattgcgggccacagcctccccctccccctaagtgcgagctgttacatgtcgccatcgtttgcgccgggcacaattcatccagggacgttatcacactcgtgaaatcaatgctgttttaccgcaagaatcctctccacttacatctggttacagacgcagtagccaggaatatcctggagactttgttccatacgtggatggtccctgctgtgcgggtctccttttaccacgcggaccagctgaaaccacaagtgtcttggatcccgaacaagcattactccggtttgtatggcctgatgaaattggtgttgccctctgctctgcctgctgagctggccagggtcatcgtcttggacactgatgtgacatttgcctcagacatcagtgaactgtgggccttatttgctcacttcagcgatactcaagctatcggtcttgtagaaaatcagtctgattggtatctcgggaacttatggaaaaatcataggccttggcccgccctcggacgcgggttcaacaccggcgtgatactgctgagacttgacaggcttagacaggctggatgggagcaaatgtggaggctaaccgcccgtcgggagctcctaagcctgcctgccactagtctggcagatcaggacatctttaatgcggtaatcaaagagcaccccggtctcgtgcagcggctgccttgtgtctggaatgtgcagctgtcagatcataccctggccgagcgctgttatagcgaggctagtgacctgaaagtgatacactggaactccccaaagaaattacgcgtgaagaataaacatgtggagtttttccgaaatttctatctgaccttcttagaatacgatgggaatctcttaaggagagagcttttcgtctgtcccagccagcctcccccaggtgctgagcagcttcaacaggcgttggctcagctggatgaggaggacccttgctttgaatttcgacagcagcagttgacagttcatcgcgtacatgttacattcctgccacatgagcctcccccccctcgaccgcatgatgtgaccctggtggcccagctgagcatggaccgcctccagatgctggaagcgctctgtaggcattggcctggccccatgtccctcgcactgtaccttacagacgctgaggctcaacagtttcttcatttcgtggaagcttcccctgtgcttgccgcaaggcaagatgtggcgtatcacgtggtatacagagagggtcctctctatccggttaaccagctgcgaaatgtggcacttgcacaagccctgacaccgtatgtgtttctatccgatatagactttttgcctgcctacagcctctatgattatttacgggcctctatcgagcagcttggactggggtcccgacggaaagcggccctggtggtgcccgccttcgagacgttgaggtaccggttctcatttccgcactcaaaagtggaactccttgctctactggacgctggcacgctgtatactttcagatatcatgagtggccgcgcggtcacgctccgacagattacgcaaggtggagggaggcacaggctccctaccgcgttcagtgggcagcgaactatgaaccatacgtggttgttccccgggattgcccacgctatgaccctcggtttgtaggctttggatggaacaaagtggctcacatcgtggagctggacgcgcaggaatatgaactgctcgtcctgccggaggccttcaccatccatctcccgcacgccccaagtttagatataagtagattccgctcctctccaacctaccgcgactgcttacaggccttaaaagatgagtttcaccaggacctgagcaggcatcacggagctgcagcactcaaatatctccctgctttgcagcaaccccagtccccagccagagggtag

SEQ ID NO: 112425 - DNA, 2522 bp, Artificial Sequence
  derived and/or modified sequence
gccgcccagggctgagtctcccatctcgcccctcggtccgcagggcctgcgatggagcctgcagccccgggtcgcgtccctccctgagcgcccccgtcggcggccatgctgccccgagggcgcccccgggcgctgggggccgccgcgctgttgctgctgctgctgctgctcggattcctcctgttcggtggggacctggggtgtgagcgccgcgagcctggcgggcgagcgggggccccgggatgcttccccggcccgctcatgccacgtgtccccccagacgggaggctgcggagagccgccgccctcgacggagacccgggggccggccccggggaccacaaccgctccgactgcggcccgcagccgccgccgccgcccaagtgcgagctcttgcatgtggccatcgtgtgtgcggggcataactccagccgagacgtcatcaccctggtgaagtccatgctcttctacaggaaaaatccactgcacctccacttggtgactgacgccgtggccagaaacatcctggagacgctcttccacacatggatggtgcctgctgtccgtgtcagcttttatcatgccgaccagctcaagccccaggtctcctggatccccaacaagcactactccggcctctatgggctaatgaagctggtgctgcccagtgccttgcctgctgagctggcccgcgtcattgtcctggacacggatgtcaccttcgcctctgacatctcggagctctgggccctctttgctcacttttctgacacgcaggcgatcggtcttgtggagaaccagagtgactggtacctgggcaacctctggaagaaccacaggccctggcctgccttgggccggggatttaacacaggtgtgatcctgctgcggctggaccggctccggcaggctggctgggagcagatgtggaggctgacagccaggcgggagctccttagcctgcctgccacctcactggctgaccaggacatcttcaacgctgtgatcaaggagcacccggggctagtgcagcgtctgccttgtgtctggaatgtgcagctgtcagatcacacactggccgagcgctgctactctgaggcgtctgacctcaaggtgatccactggaactcaccaaagaagcttcgggtgaagaacaagcatgtggaattcttccgcaatttctacctgaccttcctggagtacgatgggaacctgctgcggagagagctctttgtgtgccccagccagcccccacctggtgctgagcagttgcagcaggccctggcacaactggacgaggaagacccctgctttgagttccggcagcagcagctcactgtgcaccgtgtgcatgtcactttcctgccccatgaaccgccacccccccggcctcacgatgtcacccttgtggcccagctgtccatggaccggctgcagatgttggaagccctgtgcaggcactggcctggccccatgagcctggccttgtacctgacagacgcagaagctcagcagttcctgcatttcgtcgaggcctcaccagtgcttgctgcccggcaggacgtggcctaccatgtggtgtaccgtgaggggcccctataccccgtcaaccagcttcgcaacgtggccttggcccaggccctcacgccttacgtcttcctcagtgacattgacttcctgcctgcctattctctctacgactacctcagggcctccattgagcagctggggctgggcagccggcgcaaggcagcactggtggtgccggcattcgagaccctgcgctaccgcttcagcttcccccattccaaggtggagctgttggccttgctggatgcgggcactctctacaccttcaggtaccacgagtggccccgaggccacgcacccacagactatgcccgctggcgggaggctcaggccccgtaccgtgtgcaatgggcggccaactatgaaccctacgtggtggtgccacgagactgtccccgctatgatcctcgctttgtgggcttcggctggaacaaagtggcccacattgtggagctggatgcccaggaatatgagctcctggtgctgcccgaggccttcaccatccatctgccccacgctccaagcctggacatctcccgcttccgctccagccccacctatcgtgactgcctccaggccctcaaggacgaattccaccaggacttgtcccgccaccatggggctgctgccctcaaatacctcccagccctgcagcagccccagagccctgcccgaggctgaggctgggccggcgctgcccctcatcttagcattgggcagacaccagggcaacctgccctccgccatccctgctatttaaattatttaaggtctctgggaagggctggggcagagcatctgtggggtggggtcttccccttgctgctattgtatggctggggactggtctctctctgccccagccagtttggggctggttcccccatcttgaattgtttatccctttttcataattaaagttttaaaacatc

SEQ ID NO: 112426 - DNA, 2516 bp, Artificial Sequence
  derived and/or modified sequence
gcgagcgcagggcccagcccgggagccgctggagcagggcctgcgatggagcctgcagccccgggtcgcgtccctccctgagcgcccccgtcggcggccatgctgccccgagggcgcccccgggcgctgggggccgccgcgctgttgctgctgctgctgctgctcggattcctcctgttcggtggggacctggggtgtgagcgccgcgagcctggcgggcgagcgggggccccgggatgcttccccggcccgctcatgccacgtgtccccccagacgggaggctgcggagagccgccgccctcgacggagacccgggggccggccccggggaccacaaccgctccgactgcggcccgcagccgccgccgccgcccaagtgcgagctcttgcatgtggccatcgtgtgtgcggggcataactccagccgagacgtcatcaccctggtgaagtccatgctcttctacaggaaaaatccactgcacctccacttggtgactgacgccgtggccagaaacatcctggagacgctcttccacacatggatggtgcctgctgtccgtgtcagcttttatcatgccgaccagctcaagccccaggtctcctggatccccaacaagcactactccggcctctatgggctaatgaagctggtgctgcccagtgccttgcctgctgagctggcccgcgtcattgtcctggacacggatgtcaccttcgcctctgacatctcggagctctgggccctctttgctcacttttctgacacgcaggcgatcggtcttgtggagaaccagagtgactggtacctgggcaacctctggaagaaccacaggccctggcctgccttgggccggggatttaacacaggtgtgatcctgctgcggctggaccggctccggcaggctggctgggagcagatgtggaggctgacagccaggcgggagctccttagcctgcctgccacctcactggctgaccaggacatcttcaacgctgtgatcaaggagcacccggggctagtgcagcgtctgccttgtgtctggaatgtgcagctgtcagatcacacactggccgagcgctgctactctgaggcgtctgacctcaaggtgatccactggaactcaccaaagaagcttcgggtgaagaacaagcatgtggaattcttccgcaatttctacctgaccttcctggagtacgatgggaacctgctgcggagagagctctttgtgtgccccagccagcccccacctggtgctgagcagttgcagcaggccctggcacaactggacgaggaagacccctgctttgagttccggcagcagcagctcactgtgcaccgtgtgcatgtcactttcctgccccatgaaccgccacccccccggcctcacgatgtcacccttgtggcccagctgtccatggaccggctgcagatgttggaagccctgtgcaggcactggcctggccccatgagcctggccttgtacctgacagacgcagaagctcagcagttcctgcatttcgtcgaggcctcaccagtgcttgctgcccggcaggacgtggcctaccatgtggtgtaccgtgaggggcccctataccccgtcaaccagcttcgcaacgtggccttggcccaggccctcacgccttacgtcttcctcagtgacattgacttcctgcctgcctattctctctacgactacctcagggcctccattgagcagctggggctgggcagccggcgcaaggcagcactggtggtgccggcattcgagaccctgcgctaccgcttcagcttcccccattccaaggtggagctgttggccttgctggatgcgggcactctctacaccttcaggtaccacgagtggccccgaggccacgcacccacagactatgcccgctggcgggaggctcaggccccgtaccgtgtgcaatgggcggccaactatgaaccctacgtggtggtgccacgagactgtccccgctatgatcctcgctttgtgggcttcggctggaacaaagtggcccacattgtggagctggatgcccaggaatatgagctcctggtgctgcccgaggccttcaccatccatctgccccacgctccaagcctggacatctcccgcttccgctccagccccacctatcgtgactgcctccaggccctcaaggacgaattccaccaggacttgtcccgccaccatggggctgctgccctcaaatacctcccagccctgcagcagccccagagccctgcccgaggctgaggctgggccggcgctgcccctcatcttagcattgggcagacaccagggcaacctgccctccgccatccctgctatttaaattatttaaggtctctgggaagggctggggcagagcatctgtggggtggggtcttccccttgctgctattgtatggctggggactggtctctctctgccccagccagtttggggctggttcccccatcttgaattgtttatccctttttcataattaaagttttaaaacatc

SEQ ID NO: 112427 - DNA, 2528 bp, Artificial Sequence
  derived and/or modified sequence
gagtgctagccagccctgggaggctccgctgccagaaggaacgtcaaggggcctgcgatggagcctgcagccccgggtcgcgtccctccctgagcgcccccgtcggcggccatgctgccccgagggcgcccccgggcgctgggggccgccgcgctgttgctgctgctgctgctgctcggattcctcctgttcggtggggacctggggtgtgagcgccgcgagcctggcgggcgagcgggggccccgggatgcttccccggcccgctcatgccacgtgtccccccagacgggaggctgcggagagccgccgccctcgacggagacccgggggccggccccggggaccacaaccgctccgactgcggcccgcagccgccgccgccgcccaagtgcgagctcttgcatgtggccatcgtgtgtgcggggcataactccagccgagacgtcatcaccctggtgaagtccatgctcttctacaggaaaaatccactgcacctccacttggtgactgacgccgtggccagaaacatcctggagacgctcttccacacatggatggtgcctgctgtccgtgtcagcttttatcatgccgaccagctcaagccccaggtctcctggatccccaacaagcactactccggcctctatgggctaatgaagctggtgctgcccagtgccttgcctgctgagctggcccgcgtcattgtcctggacacggatgtcaccttcgcctctgacatctcggagctctgggccctctttgctcacttttctgacacgcaggcgatcggtcttgtggagaaccagagtgactggtacctgggcaacctctggaagaaccacaggccctggcctgccttgggccggggatttaacacaggtgtgatcctgctgcggctggaccggctccggcaggctggctgggagcagatgtggaggctgacagccaggcgggagctccttagcctgcctgccacctcactggctgaccaggacatcttcaacgctgtgatcaaggagcacccggggctagtgcagcgtctgccttgtgtctggaatgtgcagctgtcagatcacacactggccgagcgctgctactctgaggcgtctgacctcaaggtgatccactggaactcaccaaagaagcttcgggtgaagaacaagcatgtggaattcttccgcaatttctacctgaccttcctggagtacgatgggaacctgctgcggagagagctctttgtgtgccccagccagcccccacctggtgctgagcagttgcagcaggccctggcacaactggacgaggaagacccctgctttgagttccggcagcagcagctcactgtgcaccgtgtgcatgtcactttcctgccccatgaaccgccacccccccggcctcacgatgtcacccttgtggcccagctgtccatggaccggctgcagatgttggaagccctgtgcaggcactggcctggccccatgagcctggccttgtacctgacagacgcagaagctcagcagttcctgcatttcgtcgaggcctcaccagtgcttgctgcccggcaggacgtggcctaccatgtggtgtaccgtgaggggcccctataccccgtcaaccagcttcgcaacgtggccttggcccaggccctcacgccttacgtcttcctcagtgacattgacttcctgcctgcctattctctctacgactacctcagggcctccattgagcagctggggctgggcagccggcgcaaggcagcactggtggtgccggcattcgagaccctgcgctaccgcttcagcttcccccattccaaggtggagctgttggccttgctggatgcgggcactctctacaccttcaggtaccacgagtggccccgaggccacgcacccacagactatgcccgctggcgggaggctcaggccccgtaccgtgtgcaatgggcggccaactatgaaccctacgtggtggtgccacgagactgtccccgctatgatcctcgctttgtgggcttcggctggaacaaagtggcccacattgtggagctggatgcccaggaatatgagctcctggtgctgcccgaggccttcaccatccatctgccccacgctccaagcctggacatctcccgcttccgctccagccccacctatcgtgactgcctccaggccctcaaggacgaattccaccaggacttgtcccgccaccatggggctgctgccctcaaatacctcccagccctgcagcagccccagagccctgcccgaggctgaggctgggccggcgctgcccctcatcttagcattgggcagacaccagggcaacctgccctccgccatccctgctatttaaattatttaaggtctctgggaagggctggggcagagcatctgtggggtggggtcttccccttgctgctattgtatggctggggactggtctctctctgccccagccagtttggggctggttcccccatcttgaattgtttatccctttttcataattaaagttttaaaacatc

SEQ ID NO: 112428 - DNA, 2429 bp, Artificial Sequence
  derived and/or modified sequence
gccgcccagggctgagtctcccatctcgcccctcggtccgcagggcctgcgatggagcctgcagccccgggtcgcgtccctccctgagcgcccccgtcggcggccatgctgccccgagggcgcccccgggcgctgggggccgccgcgctgttgctgctgctgctgctgctcggattcctcctgttcgacgggaggctgcggagagccgccgccctcgacggagacccgggggccggccccggggaccacaaccgctccgactgcggcccgcagccgccgccgccgcccaagtgcgagctcttgcatgtggccatcgtgtgtgcggggcataactccagccgagacgtcatcaccctggtgaagtccatgctcttctacaggaaaaatccactgcacctccacttggtgactgacgccgtggccagaaacatcctggagacgctcttccacacatggatggtgcctgctgtccgtgtcagcttttatcatgccgaccagctcaagccccaggtctcctggatccccaacaagcactactccggcctctatgggctaatgaagctggtgctgcccagtgccttgcctgctgagctggcccgcgtcattgtcctggacacggatgtcaccttcgcctctgacatctcggagctctgggccctctttgctcacttttctgacacgcaggcgatcggtcttgtggagaaccagagtgactggtacctgggcaacctctggaagaaccacaggccctggcctgccttgggccggggatttaacacaggtgtgatcctgctgcggctggaccggctccggcaggctggctgggagcagatgtggaggctgacagccaggcgggagctccttagcctgcctgccacctcactggctgaccaggacatcttcaacgctgtgatcaaggagcacccggggctagtgcagcgtctgccttgtgtctggaatgtgcagctgtcagatcacacactggccgagcgctgctactctgaggcgtctgacctcaaggtgatccactggaactcaccaaagaagcttcgggtgaagaacaagcatgtggaattcttccgcaatttctacctgaccttcctggagtacgatgggaacctgctgcggagagagctctttgtgtgccccagccagcccccacctggtgctgagcagttgcagcaggccctggcacaactggacgaggaagacccctgctttgagttccggcagcagcagctcactgtgcaccgtgtgcatgtcactttcctgccccatgaaccgccacccccccggcctcacgatgtcacccttgtggcccagctgtccatggaccggctgcagatgttggaagccctgtgcaggcactggcctggccccatgagcctggccttgtacctgacagacgcagaagctcagcagttcctgcatttcgtcgaggcctcaccagtgcttgctgcccggcaggacgtggcctaccatgtggtgtaccgtgaggggcccctataccccgtcaaccagcttcgcaacgtggccttggcccaggccctcacgccttacgtcttcctcagtgacattgacttcctgcctgcctattctctctacgactacctcagggcctccattgagcagctggggctgggcagccggcgcaaggcagcactggtggtgccggcattcgagaccctgcgctaccgcttcagcttcccccattccaaggtggagctgttggccttgctggatgcgggcactctctacaccttcaggtaccacgagtggccccgaggccacgcacccacagactatgcccgctggcgggaggctcaggccccgtaccgtgtgcaatgggcggccaactatgaaccctacgtggtggtgccacgagactgtccccgctatgatcctcgctttgtgggcttcggctggaacaaagtggcccacattgtggagctggatgcccaggaatatgagctcctggtgctgcccgaggccttcaccatccatctgccccacgctccaagcctggacatctcccgcttccgctccagccccacctatcgtgactgcctccaggccctcaaggacgaattccaccaggacttgtcccgccaccatggggctgctgccctcaaatacctcccagccctgcagcagccccagagccctgcccgaggctgaggctgggccggcgctgcccctcatcttagcattgggcagacaccagggcaacctgccctccgccatccctgctatttaaattatttaaggtctctgggaagggctggggcagagcatctgtggggtggggtcttccccttgctgctattgtatggctggggactggtctctctctgccccagccagtttggggctggttcccccatcttgaattgtttatccctttttcataattaaagttttaaaacatc

SEQ ID NO: 112429 - DNA, 2166 bp, Artificial Sequence
  derived and/or modified sequence
atgctgccccggggccggccccgggccctgggcgctgctgccctgctgctgctgctgctgctgctgggcttcctgctgtttggaggagacctgggctgtgaaagaagagagcccggcggccgggccggggcccctggctgcttccctggccccctgatgccccgggtgcccccagatggccgcctgcggcgggccgccgccctggatggagaccccggggccggccctggggaccacaacagaagtgactgtggcccccagcccccacctccacccaagtgtgagctgctgcacgtggccatcgtgtgtgccggccacaacagcagcagagatgtgatcaccctggtgaagtccatgctgttctacaggaagaaccccctgcacctgcacctggtgacagatgctgtggccaggaacatcctggagaccctcttccacacctggatggtgcctgctgtgcgggtgtccttctaccacgccgaccagctgaagccccaggtgtcctggatccccaacaagcactacagcggcctgtatggcctgatgaagctggtgctgcccagcgccctgcctgctgagctggcccgggtcatcgtgctggacacagatgtgacctttgccagtgacatcagcgagctgtgggccctgtttgcccacttcagtgacacccaggccatcggcctggtggagaaccagagcgactggtacctgggcaacctgtggaagaaccaccggccctggccagccctgggccggggcttcaacacaggagtcatcctgctgcggctggaccggctgcggcaggccggctgggagcagatgtggaggctgacagcccggcgggagctgctgagcctgcctgccaccagcctggccgaccaggacatcttcaatgctgtgatcaaggagcaccctggcctggtgcagaggctgccctgtgtgtggaatgtgcagctgagtgaccacaccctggccgagcgctgctacagcgaggccagtgacctgaaggtgatccactggaacagccccaagaagctgcgggtgaagaacaagcacgtggagttcttcaggaacttctacctgaccttcctggagtatgatggcaacctgctgcggcgggagctgtttgtgtgccccagccagcccccacctggagctgagcagctgcagcaggccctggcccagctggatgaggaggacccctgctttgagttccggcagcagcagctgactgtgcaccgggtgcacgtgaccttcctgccccatgagcccccaccaccccggccccatgatgtgaccctggtggcccagctgtccatggaccggctgcagatgctggaggccctgtgccgccactggccaggccccatgagcctggccctgtacctgacagatgctgaggcccagcagttcctgcactttgtggaggccagccctgtgctggccgcccggcaggatgtggcctaccacgtggtgtaccgggagggccccctgtaccctgtgaaccagctgagaaatgtggccctggcccaggccctgaccccctacgtgttcctgagtgacatcgacttcctgcctgcctacagcctgtatgactacctgcgggccagcattgagcagctgggcctgggcagcaggaggaaggccgccctggtggtgcctgcctttgagaccctgcgctaccgcttctccttcccccacagcaaggtggagctgctggccctgctggatgctggcaccctgtacaccttccgctaccacgagtggccccggggccacgcccccacagattatgcccgctggagggaggcccaggccccctacagagtgcagtgggccgccaactatgagccctacgtggtggtgccccgggactgccccaggtatgaccccaggtttgtgggcttcggctggaacaaggtggcccacatcgtggagctggatgcccaggagtatgagctgctggtgctgcctgaggccttcaccatccacctgccccacgcccccagcctggacatcagccgcttccgcagcagccccacctacagagactgcctgcaggccctgaaggatgagttccaccaggacctgagccgccaccacggggccgccgccctgaagtacctgcctgccctgcagcagccccagagccctgcccggggctag

SEQ ID NO: 112430 - DNA, 2073 bp, Artificial Sequence
  derived and/or modified sequence
atgctgccccggggccggccccgggccctgggcgctgctgccctgctgctgctgctgctgctgctgggcttcctgctgtttgatggccgcctgcggcgggctgctgccctggatggagaccctggagctggccctggggaccacaacagaagtgactgtggcccccagcccccacctccacccaagtgtgagctgctgcacgtggccatcgtgtgtgccggccacaacagcagcagagatgtgatcaccctggtgaagtccatgctgttctacaggaagaaccccctgcacctgcacctggtgacagatgctgtggccaggaacatcctggagaccctcttccacacctggatggtgcctgctgtgcgggtgtccttctaccacgccgaccagctgaagccccaggtgtcctggatccccaacaagcactacagcggcctgtatggcctgatgaagctggtgctgcccagcgccctgcctgctgagctggcccgggtgattgtgctggacacagatgtgacctttgccagtgacatcagcgagctgtgggccctgtttgcccacttcagtgacacccaggccatcggcctggtggagaaccagagcgactggtacctgggcaacctgtggaagaaccaccggccctggccagccctgggccggggcttcaacacaggagtcatcctgctgcggctggaccggctgcggcaggccggctgggagcagatgtggaggctgacagcccggcgggagctgctgagcctgcctgccaccagcctggccgaccaggacatcttcaatgctgtgatcaaggagcaccctggcctggtgcagaggctgccctgtgtgtggaatgtgcagctgagtgaccacaccctggccgagcgctgctacagcgaggccagtgacctgaaggtgatccactggaacagccccaagaagctgcgggtgaagaacaagcacgtggagttcttcaggaacttctacctgaccttcctggagtatgatggcaacctgctgcggcgggagctgtttgtgtgccccagccagcccccacctggagctgagcagctgcagcaggccctggcccagctggatgaggaggacccctgctttgagttccggcagcagcagctgactgtgcaccgggtgcacgtgaccttcctgccccatgagcccccaccaccccggccccatgatgtgaccctggtggcccagctgtccatggaccggctgcagatgctggaggccctgtgccgccactggccaggccccatgagcctggccctgtacctgacagatgctgaggcccagcagttcctgcactttgtggaggccagccctgtgctggccgcccggcaggatgtggcctaccacgtggtgtaccgggagggccccctgtaccctgtgaaccagctgagaaatgtggccctggcccaggccctgaccccctacgtgttcctgagtgacatcgacttcctgcctgcctacagcctgtatgactacctgcgggccagcattgagcagctgggcctgggcagcaggaggaaggccgccctggtggtgcctgcctttgagaccctgcgctaccgcttctccttcccccacagcaaggtggagctgctggccctgctggatgctggcaccctgtacaccttccgctaccacgagtggccccggggccacgcccccacagattatgcccgctggagggaggcccaggccccctacagagtgcagtgggccgccaactatgagccctacgtggtggtgccccgggactgccccaggtatgaccccaggtttgtgggcttcggctggaacaaggtggcccacatcgtggagctggatgcccaggagtatgagctgctggtgctgcctgaggccttcaccatccacctgccccacgcccccagcctggacatcagccgcttccgcagcagccccacctacagagactgcctgcaggccctgaaggatgagttccaccaggacctgagccgccaccacggggctgctgccctgaagtacctgcctgccctgcagcagccccagagccctgcccggggctag

SEQ ID NO: 112431 - DNA, 2166 bp, Artificial Sequence
  derived and/or modified sequence
atgctgccccggggccggccccgggccctgggcgccgccgccctgctcttgttgctgctgttgcttggatttcttctctttggcggtgatttaggatgtgagcggcgcgaacccggagggagggctggcgctcctggttgttttcccggacctctgatgcccagagtgcctccggatggaaggctccgacgagccgctgccctggacggcgatcctggcgctggccctggagaccacaatcggtctgactgcgggccccagcctccaccacctcctaagtgtgagcttctccacgtggctattgtgtgcgccgggcataatagttcacgcgacgttataacgcttgtgaaaagcatgctgttttatcgaaaaaacccccttcatctccacctcgtgaccgatgcagtggcccgcaatatcctggagacactgttccatacatggatggtgccagccgtacgcgtgagcttctaccacgctgatcagttaaagccacaagtttcctggatccccaacaagcactacagcggcctctacggcctcatgaagctggtgctgccatccgctttgcccgctgagctggcacgggtgatcgtgctggataccgacgtaactttcgctagtgatatctcggagctctgggcactgtttgcacattttagcgatacacaggccattgggctcgtcgagaaccagagcgactggtatctcgggaacctgtggaagaaccatcggccttggcccgcactggggcggggattcaacacaggtgtgatcctattgcggcttgatcggctcaggcaggccggttgggaacagatgtggaggttaactgccagacgtgagctactgtctcttcccgcaaccagtctggctgatcaggacatcttcaacgcagtgatcaaagaacaccctggcttagtgcagcgcctcccctgtgtttggaacgttcagctgagcgaccacacacttgctgagcgctgctactctgaggcctcagacctgaaagtgatccactggaactccccaaaaaaactcagggttaagaacaagcatgtagaatttttccgcaacttttatttaactttccttgaatacgacggcaatttgctgcgccgagagctgtttgtctgccctagccagcccccgccaggggccgaacaacttcagcaggcactagcccagttagacgaggaagatccctgcttcgaattcagacagcagcagctgaccgtgcaccgtgtgcatgtcaccttcttgccacacgaaccaccacctccgcggcctcacgacgttactctagtcgctcagctcagtatggaccggcttcaaatgctggaagcactgtgtcgccactggcctggccctatgtctcttgccttgtatcttaccgatgcagaagcacaacaatttctgcactttgtcgaagctagccctgtgctggcagcccgccaggacgtggcctaccacgtagtctatcgcgaaggtcctctgtacccagtgaaccagttaagaaacgttgctctcgcacaggcactaactccatacgtgttcctctcggatatagattttttgccagcttatagtttgtacgactatctgcgggcgtcaatcgagcagctgggactgggatcccgtcgtaaagcagctctggtcgtgccggcatttgaaacccttaggtatcgcttttccttcccccactctaaagttgagctgctggctctgctggatgccggcactctgtatactttccgctatcatgagtggccacgaggccacgcacccaccgattatgcacggtggcgtgaggctcaggcaccttaccgcgtgcaatgggccgccaactacgagccctatgtagtggtgccgcgcgactgtccacgctacgacccaaggttcgttggcttcgggtggaataaggtcgcccatattgtggagcttgacgcccaggaatatgagctactcgtactgcccgaagccttcactatccacttgccacatgcgccatccctggacataagccgtttcaggtcctctccaacttatcgagattgtctgcaggctctgaaggacgagtttcaccaagacctctctcgccaccatggggccgcggcgcttaagtatcttccagctctgcagcaacctcagtcacccgccaggggctag

SEQ ID NO: 112432 - DNA, 2166 bp, Artificial Sequence
  derived and/or modified sequence
atgctgccccggggccggccccgggccctgggcgccgccgccctgttactcctccttttgttactcgggtttcttctgtttggaggggatctaggatgtgagaggcgcgaacccgggggaagagcaggggcgccaggctgttttcccggccccctgatgccacgagttccgcctgacggacgactccgccgtgcggctgctctggatggcgatcctggtgccggccccggtgatcacaacaggagtgactgtggaccacagccacccccaccgccaaagtgtgagctgttgcatgtagctattgtgtgtgccggacataactcctctagggatgttatcactttagtcaagagtatgttgttctacagaaagaatccacttcacctccacctcgtgaccgatgcagtggcccggaatattctggagaccctcttccatacgtggatggtgccagcagtgcgcgtgagcttctatcacgccgatcagctcaagccccaggtgagctggattccgaacaagcactattctggactctacggactcatgaagcttgtgttacctagtgctcttcctgcagagctggctagggtgatcgtgctcgacactgatgttacgttcgcctctgacatcagtgaactgtgggccctgttcgcacatttttcagatacccaagccatcggcctggtggaaaaccagtccgattggtatttgggaaatttatggaagaatcaccggccctggccggctctagggagaggctttaataccggggtgatccttctccgccttgatcgactgcgccaggccggctgggagcagatgtggagattgacagcgcgaagagagctgctgtcattacccgcaacatctctcgccgatcaggatatctttaatgcagtgattaaagagcatccaggcctggtgcaaagactgccctgtgtttggaatgtccagcttagtgatcatacgctcgctgagaggtgctactcagaggctagcgatctgaaagttatacattggaacagtccaaagaagctgcgagtcaagaacaaacatgtagagttcttcaggaacttttatctcaccttccttgaatatgatggcaacctgttgaggcgggaactgttcgtctgtccatcccaaccgcctcctggtgccgaacagctgcagcaagccctggcacagctggacgaagaagacccttgtttcgagtttaggcagcagcagctcaccgttcatagagtgcacgtcactttcctacctcacgagcccccaccccctaggccacacgacgtaaccctcgtcgcacaactgtccatggaccgactgcagatgttagaagccctgtgtcggcactggccgggaccgatgagtctggccctctacctgacagatgcagaggcccagcagttcctgcattttgtggaggcttcaccggtactagcagcccgtcaggatgttgcctaccacgtggtgtatagggaagggcctctctatccggttaaccagctacgcaatgtcgccctagcccaagctctgacgccttatgtgtttctgtccgacatcgacttccttcctgcgtattccctttatgattatctgcgtgcaagtatcgaacaactagggctgggctctagacgcaaagctgcgctcgttgtgccagcgttcgaaacgttaagatacaggttcagcttcccgcactctaaagtcgagctcctggctctcctggatgcaggaacgctatacacgtttagatatcacgaatggccacggggacatgctcccaccgattacgcccgatggcgcgaggcgcaagctccttatcgggtgcagtgggcggctaattatgaaccttacgtggttgtaccccgggactgtccaagatacgatcctcgctttgttgggtttgggtggaacaaggtggcacacatcgtggagctggacgctcaggaatatgagctcctcgtcttaccagaggcttttacaatccacctacctcacgctccttccctggatatatctcgctttcggtcctcaccgacatacagggactgtctgcaagcactaaaggacgagtttcaccaggacctctcacgccatcatggtgcggcagctctgaagtacttaccagctcttcaacagcctcaatcaccagcccggggctag

SEQ ID NO: 112433 - DNA, 2166 bp, Artificial Sequence
  derived and/or modified sequence
atgctgccccggggccggccccgggccctgggcgccgccgccctgctgctgcttctcctcctactgggttttctcctcttcggtggagacctcggatgcgaaagacgcgagccaggcgggagagccggggcaccggggtgcttcccaggccctctgatgccacgtgtgcctcctgacggtcggttacgacgggcggctgctctggacggtgatccaggcgctggaccgggtgaccacaatcggtccgactgtggcccgcagccacctccacctcctaagtgcgagctcctccacgtggctatcgtttgcgctggacataactcatcacgagatgtgatcaccctggtcaaatctatgttgttttatcgaaaaaacccattgcacctgcacctggttacagatgccgtggccaggaacattctcgagacactgtttcacacatggatggtgcccgccgtcagagtgtctttttatcacgcagaccaactcaagcctcaggtaagctggattcccaataagcactattcaggactgtacgggctaatgaaacttgtcttacctagcgcgctgccggctgaactggcgcgcgtcattgtgctggatactgatgtgacttttgcatccgacatcagtgagttgtgggccttgtttgcccatttcagcgacacacaggctattggtttggtggagaaccagagtgactggtacctgggtaatctgtggaagaatcacagaccatggccagcactggggcggggctttaacaccggagtaattctgttgcggctagacaggctcagacaagcaggctgggagcagatgtggcggcttacagctagaagagaactcctgagcctgcctgccacatcgcttgccgatcaggacattttcaacgcggtgatcaaggaacaccctgggttagtgcagcggcttccttgcgtctggaatgttcagctctctgatcataccctggctgagaggtgctactctgaagcctcagatctgaaggtgatccattggaacagtccaaaaaagctccgagtcaagaacaagcacgtcgaatttttccggaatttttacctgacattcctagaatatgacggaaacctgctgaggcgggaacttttcgtatgcccctctcagcccccaccgggggccgagcaactgcagcaagcccttgcccaactagacgaggaagacccgtgtttcgaattccgacagcagcagctgactgtccacagagtgcatgtaactttcttgcctcacgagccacctccacctaggcctcatgacgttacgcttgttgcgcagttgtctatggaccggctgcagatgctggaggcgctctgtcggcactggccaggtcccatgagcctcgcattgtacttgacggacgccgaagcccagcagttcctgcattttgtggaagcctcccccgtgctcgccgcccgacaggacgtcgcctatcacgtggtctacagagaaggtcccctgtacccagtcaatcaactgcgcaacgtggctctggcccaggctttgacgccttacgttttcttatccgacattgattttctgcctgcttactctctatatgactaccttcgtgcatcaatagagcagttgggactcggctcgcgccgcaaggccgcccttgtggtgccagccttcgaaactctcagataccgtttcagtttcccccattcgaaggttgagctactcgcgctattggatgcagggaccctgtatacttttcgataccacgaatggccgcgagggcacgcccccactgattatgccaggtggcgcgaggcgcaggccccttatcgggttcagtgggctgccaactacgagccctacgtggtcgtgccgagggattgtccgcgatacgacccacgctttgttggatttggatggaataaggttgcccacatcgtcgaactcgacgctcaagaatatgaactcctggtcctcccggaggcattcaccatccacctacctcacgcaccgtctctcgatatttcacgctttcggagcagccccacataccgggactgtttacaggcccttaaggatgagttccaccaagacctgagccggcatcacggcgccgcagcgctcaagtacttacctgcactgcaacagcctcaaagccctgctcggggttag

SEQ ID NO: 112434 - DNA, 2073 bp, Artificial Sequence
  derived and/or modified sequence
atgctgccccggggccggccccgggccctgggcgccgccgccctgcttttgctccttctcctcctcgggttccttctgtttgacgggaggctgcgtagggccgccgccctggacggcgaccctggggcaggacccggcgaccacaatcgctcggactgtggaccccagccaccccctcccccgaaatgtgaactcctgcatgtcgcgattgtctgtgccggtcacaattcatcaagagacgtgatcactctcgtgaaaagtatgttgttctatcgcaagaaccccctgcacttacatctggttacggacgcagtagcgagaaatatcttggagaccctgttccatacctggatggtccccgctgtcagagtgtccttctaccatgccgatcaattgaagccccaggtcagttggatccctaacaagcattactctgggttgtacggcttgatgaaattggtgcttccatccgccctgcccgccgaactcgcccgggtgattgtgctggatacagacgtaacattcgccagtgatatctctgagctgtgggcattattcgcgcattttagtgatacgcaggccatcggtcttgtggagaatcagtcagattggtatctcggcaacctgtggaagaaccaccgcccctggcctgccctgggtaggggtttcaacactggggtgattctgctgcgactggatcggttgcgccaggccgggtgggagcagatgtggaggctgaccgctaggagggaactgctctcacttcccgcaacaagtctggccgatcaggatatatttaatgctgtgatcaaggagcacccaggccttgttcagagactgccatgcgtgtggaatgtccagctgagtgaccacactttggccgaacgttgttattccgaagcctccgatttgaaagtgatccactggaactcccccaagaagttaagagttaagaacaagcacgtggaattcttcaggaacttttaccttaccttcctggagtatgatggaaatctgcttagacgtgaattgttcgtgtgcccaagtcaacctccgccgggagctgagcagctgcaacaggccctggcacagctggacgaggaagatccctgttttgaatttagacagcagcagcttaccgtgcacagagttcatgttacatttctgcctcatgaacccccacctcctcgtccccacgacgtaacacttgttgctcagctgagtatggatcgccttcagatgctcgaggccctctgccggcactggcccggcccaatgtctttggctctctacctcactgatgcagaagcgcagcagtttttgcattttgtagaggctagccctgtattggccgcgagacaagatgtagcctatcacgtggtgtaccgtgagggccctctgtaccctgtgaaccagcttcggaatgtagccctggctcaggcactcaccccatatgtgttcttgtccgacatcgactttcttcccgcttactcactgtacgattatctgcgcgccagtatcgaacagctcgggctgggctcccgccggaaggccgccctggtcgtgcccgccttcgagactctgcggtataggttctccttcccacactccaaagtcgagctgctcgctctactggatgcaggcactctgtatacattcagatatcatgagtggcctagaggccatgccccgacagattatgcccggtggcgggaggcacaggcaccctacagggtgcagtgggctgccaattacgaaccgtacgtcgtggtacctagagattgcccccgctacgatcccagatttgtgggattcgggtggaacaaggtcgcacacatcgttgaactcgatgcccaggagtacgagctgcttgtgctccccgaggcttttactattcacctaccccatgcccccagtctggatatctctaggttccgcagcagtcccacttatagagattgtctccaagccctgaaggacgagtttcatcaggatctctcaagacaccacggggctgccgccttgaagtatttgcccgctttgcagcagccccagagtccagcgcgcgggtag

SEQ ID NO: 112435 - DNA, 2166 bp, Artificial Sequence
  derived and/or modified sequence
atgctcccacgcggaagaccccgagctctgggggcagcggcactcctgctcttgttgctgctcctcggctttctgctcttcggcggtgacctcgggtgtgaacggagggagcccggaggcagggcaggagctccgggttgtttcccgggaccactgatgcccagagtgcctcctgacgggaggctccgcagggccgcagccctggatggggaccccggtgcaggcccaggagaccataataggagcgactgtggcccacagcctcccccaccaccaaagtgtgagctccttcacgtagccatagtgtgcgctggtcacaattcatcacgcgacgtgattacgctggttaaatccatgctgttctaccggaagaacccactccacctccaccttgtgacagacgctgtggctcggaacatacttgagactctgttccacacttggatggttccggctgttagagtgagtttctatcacgctgatcaattaaagccccaggtttcctggatccccaacaaacattatagtggtttatatggtttgatgaagcttgtactcccatcggctctgcctgctgagcttgcacgcgtgatcgtgcttgatacagatgtcaccttcgcatcagacatcagcgagctgtgggcacttttcgcccacttctctgatacgcaggccattggccttgttgaaaaccagagtgattggtatctgggcaatctgtggaaaaatcaccgaccctggccggctcttgggaggggcttcaacaccggagtcatactcctccgactggacagattgaggcaagccggatgggagcagatgtggcgattaactgccagacgtgaactcctctccttgccggcaacttctctcgctgaccaagatatatttaacgccgtgatcaaagaacatcccggacttgtacagcgattgccatgtgtgtggaacgttcagctctccgatcacacgctcgctgaacgctgttacagcgaagcttctgacctaaaggttatacactggaacagcccaaaaaaactccgtgtaaaaaataagcatgtggaattttttcggaatttttacctgacctttcttgaatacgacggtaatcttttgaggagagaattgttcgtctgtccgtctcagcccccacccggtgcggagcagctgcaacaggccctggcacaattagatgaagaggatccatgcttcgagttcagacagcagcagttgacagtgcaccgtgtccacgtaactttcctccctcacgagccccctcctccccgaccgcatgacgtcacactggttgcccaactgagtatggatcggcttcagatgctcgaggccctctgcaggcactggccaggccctatgagtctcgccctctacctaactgacgcagaggcccagcagttcctccatttcgtggaagcctctccagtgctagcagcgaggcaagacgtcgcctaccatgtcgtatatagagagggcccactgtatcccgttaaccagcttaggaacgtggctctggctcaggctctcactccttatgtgttcctgtcagatatcgattttttaccagcatatagtttgtacgattacttacgggctagcatcgagcagctaggcctaggcagcagaagaaaggccgcactggtggtgccagcttttgagacacttcgttacaggttcagcttcccccactcaaaagtcgagcttctggctctacttgatgcaggaaccctgtacacatttcgctaccatgaatggcccagggggcacgctccaacagactatgcccgttggcgagaagcacaggccccatacagagtacagtgggccgcaaactacgagccctatgtcgtcgtgcctcgtgattgcccgagatatgaccctcgctttgtaggtttcgggtggaataaagtggcccacatcgtggaactcgacgcacaggaatacgaattgttggtcctgcccgaggcattcacaatccatttaccacatgcacccagcctcgatatctccaggttcaggagttctccaacgtatagagattgcctgcaggcactgaaggatgagttccatcaagatcttagccgacaccatggtgccgcagctctgaaatatctccctgctctccagcagccccaaagtcccgctagggggtag

SEQ ID NO: 112436 - DNA, 2166 bp, Artificial Sequence
  derived and/or modified sequence
atgttgccccgaggccgtcccagagccctgggggcagcagctttgctcttgctgttgctcctgctggggtttttgctcttcgggggagatcttggctgtgagcgtcgggaacctggcggtcgcgcaggtgcgcctggctgctttccaggaccactgatgcctagagtgcctccggatggcagattacgcagagctgccgcattagatggcgacccaggtgcaggtccaggggatcacaatcgttcagattgcggcccacagcctcctccccctcctaaatgtgagcttttgcatgttgcaattgtctgtgctggccacaatagctcacgggatgttatcacgttagtgaagtccatgctgttttaccggaaaaatcccctccacctgcaccttgtaaccgacgccgttgcccgaaatatcttggaaacgctgtttcacacctggatggtccctgctgtgcgcgtctccttctatcatgccgatcagctgaaacctcaggtgtcatggatccctaataagcactatagtggcctgtacggacttatgaagctggtgttgccttctgcccttcccgcagaactagccagggtgatcgtcctggacaccgatgttacattcgccagtgacatcagtgaactctgggctctctttgcacacttctctgacactcaggcgatcggcctggtggaaaaccagtctgactggtaccttggcaacctttggaaaaaccaccggccttggccagccctgggaagggggttcaataccggcgtcatcctgctgcgccttgatcgtttgcgtcaagccggatgggagcagatgtggaggctaacagcacgtagggaacttttgagtcttccggcaacatccctggccgatcaggatattttcaacgccgtcattaaggagcaccccggattggtccagcgtctgccatgtgtgtggaatgtgcagctcagtgaccacactctggcagagagatgctatagcgaggcctccgatttgaaggtgatccactggaattcccccaaaaagctgagagtgaagaacaaacatgtcgaattcttccgtaacttctacctcacatttctagaatatgatggaaatctcctgcgacgggaactgtttgtgtgtccctcgcagccaccccctggcgcagagcagctgcagcaggctctggcccagctggatgaagaagacccttgttttgaatttcggcagcagcagttgacagttcaccgggttcatgtcactttcctcccccatgagccaccccctccgagaccacacgacgtcactctcgttgcacaattatccatggaccgcttacagatgctcgaggctctgtgcagacactggcccggacctatgagcctggcactttacctgaccgatgctgaggcccagcaatttttgcacttcgtggaggcttcgccagtgctggctgctagacaggacgtcgcctaccatgtcgtgtatcgcgaagggcctttatacccagtgaaccagctgcggaacgttgcattagcacaggcacttaccccatacgtttttcttagtgacattgactttctccccgcttacagcctttatgattatctgcgagcctcaatcgaacagctcggtctgggatcgaggcggaaagctgccctcgtggtgccagctttcgaaactcttcgttatagattctcattccctcacagtaaagtagagctgttggccctgctggatgccggtactctctacactttccgttaccatgaatggcctagaggacacgctccgactgattatgccagatggcgcgaggctcaggcaccttacagagtccagtgggctgccaactacgagccatacgtggtggtgcccagggattgcccgagatacgatcctcgttttgtgggattcggctggaataaagtcgctcacatagttgaactggatgcccaggagtacgaattgctggttttaccagaagccttcactatccatcttccgcacgcaccttcgcttgacatatctaggttccgctcctctcctacatacagggattgtcttcaggccctcaaggacgaattccaccaggatttgtcaagacatcacggggctgccgctcttaaatatctgcccgctctgcagcagccccagtccccggcaaggggttag

SEQ ID NO: 112437 - DNA, 2166 bp, Artificial Sequence
  derived and/or modified sequence
atgctgccccgaggccgaccgagggccctaggggcagctgctctcctactgttgctcttgctgctaggattcctcctgttcggaggagatttaggatgcgaacgcagggaacctggtgggcgagctggggctccgggatgtttccccggaccactgatgcctagggtacccccagacggtcgcttgcgacgggctgccgcactggacggcgacccaggggcagggcctggtgatcacaacagaagtgattgcggccctcagccacctcctcccccaaaatgcgagctgttgcacgttgcaatcgtttgtgccggacacaattcctcccgcgacgtgatcacgctcgtgaaatctatgctgttctaccggaaaaatcctcttcacttgcaccttgtgactgacgcggtggctcgtaacatcctggaaacactgtttcacacatggatggtgccagctgtgagagtgagcttctaccacgccgaccaattgaagccacaggtgagctggattccaaataagcattatagcgggctttatggattgatgaaactggttttaccgtctgcgcttcctgctgagctggccagagtcatagtgctggacaccgacgtgacgtttgcctctgacatttctgaactctgggctctcttcgcccacttctccgatacccaggctataggtctggtggagaaccagtcagattggtacctggggaatctttggaaaaaccaccgaccctggcccgcactcggcagaggctttaacacaggtgtgatcctgttgcgcctcgacagactgcggcaggcgggatgggagcaaatgtggcgcctgaccgctaggcgggaactgctatccctaccagcaacttccctggccgaccaggatatttttaatgccgtcattaaggaacatcctgggttagtgcagagattgccctgtgtgtggaacgtgcagttgtcagaccatactcttgccgaacgctgctacagtgaggcaagtgatctcaaagtaatccactggaactcccctaaaaagctgcgagtaaaaaacaagcacgtggaatttttccgcaatttctacttaacgttcctcgaatatgatgggaatctactgcggagagagctgtttgtgtgtccctcgcagccgccacccggagctgaacagctgcagcaggcccttgcccagctcgacgaggaggacccctgcttcgagtttaggcagcagcaactcactgtgcatagagttcacgtgacattcctcccacacgaaccaccacccccacgcccacatgatgttactttagtggcacagttatccatggatcgtctgcaaatgctcgaagccctgtgccgccattggcctgggccaatgagtttggctctgtacttaaccgatgctgaggcccaacagtttctgcatttcgtggaagcaagccccgtactggcagccaggcaggatgtcgcttaccacgtcgtctaccgggagggaccactgtaccccgtgaatcagctgcggaacgtggctttggctcaggctctgactccttatgtgttcctgtcagacatcgacttcctccccgcatactcattatacgactatctccgcgctagcattgaacagttgggcttggggagtagacgaaaggccgctctggtagtccctgcattcgaaaccctccgctatcgcttctcatttccacattccaaggtggagctgttggccttgctggatgccggaacactctatacattcaggtaccatgagtggccgagaggacatgccccaaccgactatgccaggtggcgggaggctcaggctccttaccgcgtacaatgggccgcaaattatgagccgtatgtggtcgtgccacgggattgtcctcgatatgatccacgctttgttggctttgggtggaataaggtggctcacattgtcgagcttgatgctcaagagtatgaactcttggtcttgcccgaagcttttacgattcacctgccacacgccccaagcctagacatatcacggttcaggtcctcacccacctacagggactgtctccaggctctcaaggatgagttccaccaggacctgagtcgacatcatggcgcagccgctttaaaatatttaccagccttacagcagccccaaagtcccgcacgaggatag

SEQ ID NO: 112438 - DNA, 2073 bp, Artificial Sequence
  derived and/or modified sequence
atgctcccaagaggaagaccccgtgctcttggggctgctgctctgcttttactgctcctactcctggggtttctgctgttcgacggacggctacggagggcggctgcacttgatggtgatccaggggcagggccaggcgatcacaatcgctccgactgtggccctcagcctcccccaccaccaaagtgcgagctgctacatgtggctatcgtgtgtgctggtcataatagtagccgggacgttataacgttggtcaagtccatgcttttctacaggaaaaatcctttgcacctgcatttagtcacagatgccgtggcgagaaacattctcgagacgctgtttcatacatggatggttcctgccgtgcgggttagcttctatcatgccgaccaattgaaacctcaggtgtcctggatccccaataagcattactcagggctgtacggactaatgaagttggtgctgccgtcagccctgccagcggaactggcacgggtgatagtgctggatacggatgttacttttgcctccgacatctcagaactctgggccctgttcgcccatttctccgatactcaagctatcggtctagtggagaaccagtctgattggtatctgggaaatctgtggaagaaccatcgaccctggccagctctgggccgaggcttcaatacaggagtgatcctccttaggctggaccgcctacggcaagctggctgggagcagatgtggaggctgaccgctaggagagaactgctgtccctccccgctacatcactggcggaccaagacattttcaatgcagtcattaaagaacaccccggtttagtccagagactgccgtgcgtttggaatgtccaactaagtgatcacacattggctgagcgctgctactctgaagcctcagatcttaaagtcatccattggaacagtcctaagaagctaagagtcaaaaacaagcatgtggagttctttcggaatttttacttgacatttctggagtacgacggaaacttattacggagggagttatttgtgtgcccgtctcagcctcctccgggagcagagcagctccagcaggctctcgcccaactggatgaagaggacccttgcttcgagtttagacagcagcaactgaccgtgcacagagtgcatgtcaccttcctgccacacgaacctccacccccacgaccccatgacgttaccctggtcgcgcagctatcaatggaccgattgcagatgttagaggccttgtgtagacactggcctgggcctatgtctctggccttgtatctgacagatgccgaggcgcagcagtttcttcacttcgtggaggcctccccagtactggctgcaaggcaggacgttgcataccacgttgtttaccgcgagggtccactttatcctgtgaaccaactccggaacgtagccttagcccaagcccttactccatacgtgttcctcagtgatattgactttctgcccgcttatagcctgtacgattatttgagagcctcaatcgagcagctgggactggggtcacgaaggaaagctgcactggtggtgcctgcttttgaaacccttagataccgtttctcttttcctcatagtaaagtcgagctactggccctgctggacgccggaacactatataccttccgctatcacgagtggccaagaggccacgccccaaccgattatgctaggtggagagaggcccaagcaccctatcgggtgcagtgggccgctaactacgagccttacgtcgtcgtgcctcgggattgtccaagatatgatcctaggttcgtggggttcggatggaacaaggtggcccacatcgtcgaactggatgctcaagaatatgagctcctcgtgctccctgaggcgttcactatccatcttcctcacgccccaagtcttgacatctcccgctttcgctcaagccccacctaccgggattgtctgcaagcactgaaggatgagttccatcaggacttgagtcgccaccatggggcagccgctctgaaatatctacccgctctccagcagcctcagagcccagctcgtgggtag

SEQ ID NO: 112439 - DNA, 2166 bp, Artificial Sequence
  derived and/or modified sequence
atgctgcccagaggcagacccagagccctgggcgccgccgccctgctgctgctgctgctgctgctgggcttcctgctgttcggcggcgacctgggctgcgagagaagagagcccggcggcagagccggcgcccccggctgcttccccggccccctgatgcccagagtgccccccgacggcagactgagaagagccgccgccctggacggcgaccccggcgccggccccggcgaccacaacagaagcgactgcggcccccagcccccccccccccccaagtgcgagctgctgcacgtggccatcgtgtgcgccggccacaacagcagcagagacgtgatcaccctggtgaagagcatgctgttctacagaaagaaccccctgcacctgcacctggtgaccgacgccgtggccagaaacatcctggagaccctgttccacacctggatggtgcccgccgtgagagtgagcttctaccacgccgaccagctgaagccccaggtgagctggatccccaacaagcactacagcggcctgtacggcctgatgaagctggtgctgcccagcgccctgcccgccgagctggccagagtgatcgtgctggacaccgacgtgaccttcgccagcgacatcagcgagctgtgggccctgttcgcccacttcagcgacacccaggccatcggcctggtggagaaccagagcgactggtacctgggcaacctgtggaagaaccacagaccctggcccgccctgggcagaggcttcaacaccggcgtgatcctgctgagactggacagactgagacaggccggctgggagcagatgtggagactgaccgccagaagagagctgctgagcctgcccgccaccagcctggccgaccaggacatcttcaacgccgtgatcaaggagcaccccggcctggtgcagagactgccctgcgtgtggaacgtgcagctgagcgaccacaccctggccgagagatgctacagcgaggccagcgacctgaaggtgatccactggaacagccccaagaagctgagagtgaagaacaagcacgtggagttcttcagaaacttctacctgaccttcctggagtacgacggcaacctgctgagaagagagctgttcgtgtgccccagccagcccccccccggcgccgagcagctgcagcaggccctggcccagctggacgaggaggacccctgcttcgagttcagacagcagcagctgaccgtgcacagagtgcacgtgaccttcctgccccacgagccccccccccccagaccccacgacgtgaccctggtggcccagctgagcatggacagactgcagatgctggaggccctgtgcagacactggcccggccccatgagcctggccctgtacctgaccgacgccgaggcccagcagttcctgcacttcgtggaggccagccccgtgctggccgccagacaggacgtggcctaccacgtggtgtacagagagggccccctgtaccccgtgaaccagctgagaaacgtggccctggcccaggccctgaccccctacgtgttcctgagcgacatcgacttcctgcccgcctacagcctgtacgactacctgagagccagcatcgagcagctgggcctgggcagcagaagaaaggccgccctggtggtgcccgccttcgagaccctgagatacagattcagcttcccccacagcaaggtggagctgctggccctgctggacgccggcaccctgtacaccttcagataccacgagtggcccagaggccacgcccccaccgactacgccagatggagagaggcccaggccccctacagagtgcagtgggccgccaactacgagccctacgtggtggtgcccagagactgccccagatacgaccccagattcgtgggcttcggctggaacaaggtggcccacatcgtggagctggacgcccaggagtacgagctgctggtgctgcccgaggccttcaccatccacctgccccacgcccccagcctggacatcagcagattcagaagcagccccacctacagagactgcctgcaggccctgaaggacgagttccaccaggacctgagcagacaccacggcgccgccgccctgaagtacctgcccgccctgcagcagccccagagccccgccagaggctag

SEQ ID NO: 112440 - DNA, 2073 bp, Artificial Sequence
  derived and/or modified sequence
atgctgcccagaggcagacccagagccctgggcgccgccgccctgctgctgctgctgctgctgctgggcttcctgctgttcgacggcagactgagaagagccgccgccctggacggcgaccccggcgccggccccggcgaccacaacagaagcgactgcggcccccagcccccccccccccccaagtgcgagctgctgcacgtggccatcgtgtgcgccggccacaacagcagcagagacgtgatcaccctggtgaagagcatgctgttctacagaaagaaccccctgcacctgcacctggtgaccgacgccgtggccagaaacatcctggagaccctgttccacacctggatggtgcccgccgtgagagtgagcttctaccacgccgaccagctgaagccccaggtgagctggatccccaacaagcactacagcggcctgtacggcctgatgaagctggtgctgcccagcgccctgcccgccgagctggccagagtgatcgtgctggacaccgacgtgaccttcgccagcgacatcagcgagctgtgggccctgttcgcccacttcagcgacacccaggccatcggcctggtggagaaccagagcgactggtacctgggcaacctgtggaagaaccacagaccctggcccgccctgggcagaggcttcaacaccggcgtgatcctgctgagactggacagactgagacaggccggctgggagcagatgtggagactgaccgccagaagagagctgctgagcctgcccgccaccagcctggccgaccaggacatcttcaacgccgtgatcaaggagcaccccggcctggtgcagagactgccctgcgtgtggaacgtgcagctgagcgaccacaccctggccgagagatgctacagcgaggccagcgacctgaaggtgatccactggaacagccccaagaagctgagagtgaagaacaagcacgtggagttcttcagaaacttctacctgaccttcctggagtacgacggcaacctgctgagaagagagctgttcgtgtgccccagccagcccccccccggcgccgagcagctgcagcaggccctggcccagctggacgaggaggacccctgcttcgagttcagacagcagcagctgaccgtgcacagagtgcacgtgaccttcctgccccacgagccccccccccccagaccccacgacgtgaccctggtggcccagctgagcatggacagactgcagatgctggaggccctgtgcagacactggcccggccccatgagcctggccctgtacctgaccgacgccgaggcccagcagttcctgcacttcgtggaggccagccccgtgctggccgccagacaggacgtggcctaccacgtggtgtacagagagggccccctgtaccccgtgaaccagctgagaaacgtggccctggcccaggccctgaccccctacgtgttcctgagcgacatcgacttcctgcccgcctacagcctgtacgactacctgagagccagcatcgagcagctgggcctgggcagcagaagaaaggccgccctggtggtgcccgccttcgagaccctgagatacagattcagcttcccccacagcaaggtggagctgctggccctgctggacgccggcaccctgtacaccttcagataccacgagtggcccagaggccacgcccccaccgactacgccagatggagagaggcccaggccccctacagagtgcagtgggccgccaactacgagccctacgtggtggtgcccagagactgccccagatacgaccccagattcgtgggcttcggctggaacaaggtggcccacatcgtggagctggacgcccaggagtacgagctgctggtgctgcccgaggccttcaccatccacctgccccacgcccccagcctggacatcagcagattcagaagcagccccacctacagagactgcctgcaggccctgaaggacgagttccaccaggacctgagcagacaccacggcgccgccgccctgaagtacctgcccgccctgcagcagccccagagccccgccagaggctag

SEQ ID NO: 112441 - protein, 690 aa, Artificial Sequence
  derived and/or modified sequence
MLPRGRPRALGAAALLLLLLLLGFLLFDGRLRRAAALDGDPGAGPGDHNRSDCGPQPPPPPKCELLHVAIVCAGHNSSRDVITLVKSMLFYRKNPLHLHLVTDAVARNILETLFHTWMVPAVRVSFYHADQLKPQVSWIPNKHYSGLYGLMKLVLPSALPAELARVIVLDTDVTFASDISELWALFAHFSDTQAIGLVENQSDWYLGNLWKNHRPWPALGRGFNTGVILLRLDRLRQAGWEQMWRLTARRELLSLPATSLADQDIFNAVIKEHPGLVQRLPCVWNVQLSDHTLAERCYSEASDLKVIHWNSPKKLRVKNKHVEFFRNFYLTFLEYDGNLLRRELFVCPSQPPPGAEQLQQALAQLDEEDPCFEFRQQQLTVHRVHVTFLPHEPPPPRPHDVTLVAQLSMDRLQMLEALCRHWPGPMSLALYLTDAEAQQFLHFVEASPVLAARQDVAYHVVYREGPLYPVNQLRNVALAQALTPYVFLSDIDFLPAYSLYDYLRASIEQLGLGSRRKAALVVPAFETLRYRFSFPHSKVELLALLDAGTLYTFRYHEWPRGHAPTDYARWREAQAPYRVQWAANYEPYVVVPRDCPRYDPRFVGFGWNKVAHIVELDAQEYELLVLPEAFTIHLPHAPSLDISRFRSSPTYRDCLQALKDEFHQDLSRHHGAAALKYLPALQQPQSPARG

SEQ ID NO: 112442 - protein, 513 aa, Artificial Sequence
  derived and/or modified sequence
MEVGITIQHAYEKQHPWIDLTSIGFSYVIDFNTMGQINRQTQRQRRVRRRLDLIYPMVTGTLPKAQSWPVSPGPATSPPMSPCSCPQCVLVMSVKAAVVNGSTGPLQLPVTRKNMPPPGVVKLPPLPGSGAKPLDSTGTIRGPLKTAPSQVIRRQASSMPTGTTMGSPASPPGPNSKTGRVALATLNRTNLQRLAIAQSRVLIASGVPTVPVKNLNGSSPVNPALAGITGILMSAAGLPVCLTRPPKLVLHPPPVSKSEIKSIPGVSNTSRKTTKKQAKKGKTPEEVLKKYLQKVRHPPDEDCTICMERLTAPSGYKGPQPTVKPDLVGKLSRCGHVYHIYCLVAMYNNGNKDGSLQCPTCKTIYGVKTGTQPPGKMEYHLIPHSLPGHPDCKTIRIIYSIPPGIQGPEHPNPGKSFSARGFPRHCYLPDSEKGRKVLKLLLVAWDRRLIFAIGTSSTTGESDTVIWNEVHHKTEFGSNLTGHGYPDANYLDNVLAELAAQGISEDSTAQEKD

SEQ ID NO: 112443 - DNA, 1542 bp, Artificial Sequence
  derived and/or modified sequence
atggaggtgggcatcaccatccagcacgcctacgagaagcagcacccctggatcgacctgaccagcatcggcttcagctacgtgatcgacttcaacaccatgggccagatcaacagacagacccagagacagagaagagtgagaagaagactggacctgatctaccccatggtgaccggcaccctgcccaaggcccagagctggcccgtgagccccggccccgccaccagcccccccatgagcccctgcagctgcccccagtgcgtgctggtgatgagcgtgaaggccgccgtggtgaacggcagcaccggccccctgcagctgcccgtgaccagaaagaacatgcccccccccggcgtggtgaagctgccccccctgcccggcagcggcgccaagcccctggacagcaccggcaccatcagaggccccctgaagaccgcccccagccaggtgatcagaagacaggccagcagcatgcccaccggcaccaccatgggcagccccgccagcccccccggccccaacagcaagaccggcagagtggccctggccaccctgaacagaaccaacctgcagagactggccatcgcccagagcagagtgctgatcgccagcggcgtgcccaccgtgcccgtgaagaacctgaacggcagcagccccgtgaaccccgccctggccggcatcaccggcatcctgatgagcgccgccggcctgcccgtgtgcctgaccagaccccccaagctggtgctgcaccccccccccgtgagcaagagcgagatcaagagcatccccggcgtgagcaacaccagcagaaagaccaccaagaagcaggccaagaagggcaagacccccgaggaggtgctgaagaagtacctgcagaaggtgagacacccccccgacgaggactgcaccatctgcatggagagactgaccgcccccagcggctacaagggcccccagcccaccgtgaagcccgacctggtgggcaagctgagcagatgcggccacgtgtaccacatctactgcctggtggccatgtacaacaacggcaacaaggacggcagcctgcagtgccccacctgcaagaccatctacggcgtgaagaccggcacccagccccccggcaagatggagtaccacctgatcccccacagcctgcccggccaccccgactgcaagaccatcagaatcatctacagcatcccccccggcatccagggccccgagcaccccaaccccggcaagagcttcagcgccagaggcttccccagacactgctacctgcccgacagcgagaagggcagaaaggtgctgaagctgctgctggtggcctgggacagaagactgatcttcgccatcggcaccagcagcaccaccggcgagagcgacaccgtgatctggaacgaggtgcaccacaagaccgagttcggcagcaacctgaccggccacggctaccccgacgccaactacctggacaacgtgctggccgagctggccgcccagggcatcagcgaggacagcaccgcccaggagaaggactag

SEQ ID NO: 112444 - DNA, 1542 bp, Artificial Sequence
  derived and/or modified sequence
atggaagtcgggatcacgatacagcacgcctatgaaaagcagcacccctggatagatctgacatctattggcttctcatacgtcatagattttaataccatgggccagattaaccgtcaaacccagcgtcagcgcagagttaggcggaggctcgatttgatttatcccatggttactggcactttgcctaaggcccaatcatggccagtgtcaccaggccctgccacctccccgcctatgagcccatgtagttgcccccagtgtgtactggtgatgtctgtgaaagcggcagtggtaaacggaagcaccgggccgctgcagttacccgtgactcgaaaaaatatgcctccccccggggtagttaagctgcctcctctgcccggtagcggagccaaacctctggattcaacaggaactatacgcgggccactgaagaccgcaccctcacaggtgatcagacgccaggcctcttcaatgccaacgggtaccaccatgggaagccccgcctcccccccagggccaaatagtaagacaggacgcgttgccctggcgacgctgaacaggactaacctgcagcgtttggcgatcgcccagtctagagtcttgatcgcttcaggcgttcctacggtgccagtgaagaatctgaacgggtcctcgcccgtaaacccagctctggcaggtataactggcatactgatgagcgccgcaggcctacccgtgtgtttaacgcggccacccaagttagtcctgcaccctccaccggtgtccaagtccgagattaaatccatacccggtgtgtctaacacttctcggaagacgaccaagaaacaggccaaaaagggtaaaacgccagaggaagtgctcaaaaaatatttgcagaaggtcagacaccctccagatgaagactgcacaatttgtatggagagattaacagccccctcaggatataaagggcctcagccaactgtaaagcccgatctggtgggcaagctctcccgctgtggccatgtgtaccatatttattgcctggtagctatgtacaataacggaaataaagatggctcgctacaatgcccgacatgcaagacaatctatggcgtcaagacaggcacacagccaccaggtaagatggagtaccacttaataccccattccctgccaggccaccccgattgtaagacaattcgaattatctattccattcctccggggatccagggaccagagcatccaaatccaggtaagtcattcagcgctcgggggtttcctcggcactgctaccttcccgacagtgaaaaagggcgcaaggtgttgaagctgttacttgtcgcctgggataggcgtctcatcttcgccataggtacttcctcaactaccggcgagtcggatacggtgatctggaacgaggtgcaccataagaccgaattcggatctaacctgacgggacacggatatccagatgctaattacttagataatgtgctggctgaattagccgcccaggggatcagcgaggacagcaccgcccaagagaaagactag

SEQ ID NO: 112445 - DNA, 1542 bp, Artificial Sequence
  derived and/or modified sequence
atggaggtgggcatcaccatccagcacgcctatgagaagcagcacccctggattgacctgaccagcatcggcttctcctatgtgattgacttcaacaccatgggccagatcaaccggcagacccagaggcagaggagagtgagaagaaggctggacctgatctaccccatggtgacaggcaccctgcccaaggcccagagctggcctgtgtccccaggccctgccaccagcccccccatgagcccctgcagctgcccccagtgtgtgctggtgatgtctgtgaaggctgctgtggtgaatggcagcacaggccccctgcagctgcctgtgaccaggaagaacatgcctcctcctggggtggtgaagctgccccccctgcccggcagcggggccaagcccctggacagcacaggcaccatccggggccccctgaagacagcccccagccaggtgatccggcggcaggccagctccatgcccaccggcaccaccatgggcagccctgccagccccccaggccccaacagcaagacaggccgggtggccctggccaccctgaacagaaccaacctgcagaggctggccatcgcccagagccgggtgctgattgccagcggcgtgcccaccgtgcctgtgaagaacctgaatggcagcagccctgtgaacccagccctggccggcatcaccggcatcctgatgtctgctgctggcctgcctgtgtgcctgaccaggcctcccaagctggtgctgcaccccccacctgtgtccaagtctgagatcaagagcatccctggggtgagcaacaccagcaggaagaccaccaagaagcaggccaagaagggcaagaccccagaggaggtgctgaagaagtacctgcagaaggtgcgccaccccccagatgaggactgcaccatctgcatggagcggctgacagcccccagcggctacaagggcccccagcccaccgtgaagccagacctggtgggcaagctgagccgctgtggccacgtgtaccacatctactgcctggtggccatgtacaacaatggaaacaaggatggcagcctgcagtgccccacctgcaagaccatctatggagtgaagacaggcacccagcccccaggcaagatggagtaccacctgatcccccacagcctgcccggccacccagactgcaagaccatccgcatcatctacagcatccccccaggcatccagggccctgagcaccccaaccctgggaagagcttcagcgcccggggcttccccaggcactgctacctgcctgattctgagaagggcaggaaggtgctgaagctgctgctggtggcctgggacagaagactcatctttgccatcggcaccagcagcaccactggagagagtgacaccgtcatctggaatgaggtgcaccacaagacagaatttggcagcaacctgactggacatggctacccagatgccaactacctggacaacgtgctggccgagctggccgcccagggcatcagcgaggacagcacagcccaggagaaggactag

SEQ ID NO: 112446 - DNA, 1542 bp, Artificial Sequence
  derived and/or modified sequence
atggaggtgggcatcaccatccagcacgcctacgagaagcagcacccctggatcgacttaaccagcatagggttctcgtacgtgattgatttcaacaccatgggccagatcaatagacagactcagaggcagcgaagagtccggcgacgactagacctgatataccccatggtgacaggtaccttaccgaaagctcaaagttggcctgtgtctccaggtccagctacctcccctccaatgagtccgtgtagttgcccgcagtgcgtgctcgtaatgagtgtgaaggccgcagttgttaacgggtccaccggaccgctgcaactcccggtaactcggaaaaacatgccccctcccggtgttgttaagctgccaccactccctggcagcggcgccaagccactggattcaacaggcactatcagaggacctctcaagaccgctccctcgcaagttattcgaaggcaggcctcctccatgcccaccggaaccacgatgggaagccctgcatcccctccaggaccaaatagcaagactggaagggtggctctggccactctcaatagaactaacctacaaaggttggctatagctcagagccgggtgctgattgccagcggcgttcctacagtccctgtaaaaaatctgaatgggagctcaccagtgaacccagcactggccggtatcactggtattctgatgagcgccgctggcctcccagtttgcctgacccggcctcctaagctggtactccaccctccacctgtgtcaaagtccgagatcaagagcatccccggtgtaagtaacacttcgcgaaagactaccaaaaagcaggctaaaaaaggcaagacgcccgaggaggtgctgaaaaagtatctgcagaaagttcgccacccacccgatgaggattgcactatctgcatggaaagactgactgctccatcaggatataaagggcctcaacccactgtgaaacctgatctggtgggtaaactctctcgatgcggtcatgtatatcacatctactgcctggtggccatgtataacaacggaaacaaggatgggtccctgcagtgcccaacatgtaaaaccatatacggcgttaaaacagggactcagccccccgggaagatggagtaccacttaattccgcactccctgcccggacatcccgattgcaagaccatcagaatcatctattctattccccccggcatccaaggccctgaacaccccaaccccggcaaatcattctctgccagaggctttcccaggcattgttatctgcccgatagtgagaaaggtcggaaggtcctgaaactattgctagtggcctgggaccgtagactgattttcgcgataggcacgtcctctaccaccggagagtcggacacagtcatctggaacgaagtgcatcataagaccgagttcggcagcaatttaactggccatggctatcccgacgctaactacttggacaatgttctagcggagctggccgcacaggggataagcgaagacagcactgcacaagaaaaagattag

SEQ ID NO: 112447 - DNA, 1542 bp, Artificial Sequence
  derived and/or modified sequence
atggaggtgggcattaccattcagcacgcttacgaaaagcagcatccatggatagatctgacttccatcggattcagttacgtgatcgacttcaacactatgggccagattaacaggcagacacagaggcagcgtcgggtgcggcgacgcttagacctgatttacccaatggtgaccggcacgctgccaaaagcacagtcctggcctgtgtcaccaggacccgcaacatcccctccgatgagcccctgcagctgcccgcagtgcgtgctcgtgatgtccgtaaaggccgcagtggtgaacgggtctacaggacccttacagctgcctgtcacacgaaaaaacatgccaccaccaggcgtggtgaagttacctcctttgccaggaagtggagccaagccactggattccaccgggacgatcagaggcccactgaaaacggccccaagccaagtcatccgcaggcaggctagctccatgcctaccggaacgacgatggggtcacccgcttcccctccgggacccaattctaaaacagggagagtggcccttgcaactctgaacaggaccaatctgcagagactggcgatcgcgcagtcacgggttctaatagcaagcggggttccaacagtgccagtcaaaaatctgaatggtagttccccggttaaccccgctctggctggaatcaccgggattctgatgtcagcagctggcttgcccgtctgcctgactagacccccaaagcttgtattgcatccgcctccagtgtccaagtctgaaattaaatccatccccggtgttagcaatacaagccgtaagacaacaaaaaagcaagccaaaaaggggaagaccccagaagaagtgttgaagaaatacctccagaaagtgagacacccacctgacgaggactgcaccatttgcatggaaaggctcaccgctccgtccggatacaagggacctcagcccacagttaaaccagatctggtcggtaaactgtctagatgtggacacgtgtaccatatctattgtctggtggctatgtataataacggaaataaggatggatctctccagtgtcctacctgtaagacaatttatggagttaagaccggaacgcagccccctgggaagatggagtaccacctgattccacactcactcccaggccaccctgactgcaagaccattcggatcatttacagtatcccccctgggatccagggacctgagcatcctaaccctggaaagtcatttagcgccagaggattcccccgacactgctacctacccgatagtgaaaaaggtcgcaaggtcttgaagttactgctggtggcctgggaccgcaggctgatcttcgctatcggaactagtagcaccaccggcgagtctgacaccgtgatttggaatgaagtgcatcacaaaaccgaattcggaagtaacctcaccggccatggctaccccgacgctaactatcttgataatgttctggcagagttagccgctcagggcatatctgaggattcgacggctcaggagaaggactag

SEQ ID NO: 112448 - protein, 165 aa, Artificial Sequence
  derived and/or modified sequence
MSEEVTYADLQFQNSSEMEKIPEIGKFGEKAPPAPSHVWRPAALFLTLLCLLLLIGLGVLASMFHVTLKIEMKKMNKLQNISEELQRNISLQLMSNMNISNKIRNLSTTLQTIATKLCRELYSKEQEHKCKPCPRRWIWHKDSCYFLSDDVQTWQESKMACAAQN

SEQ ID NO: 112449 - protein, 213 aa, Artificial Sequence
  derived and/or modified sequence
MSEEVTYADLQFQNSSEMEKIPEIGKFGEKAPPAPSHVWRPAALFLTLLCLLLLIGLGVLASMFHVTLKIEMKKMNKLQNISEELQRNISLQLMSNMNISNKIRNLSTTLQTIATKLCRELYSKEQEHKCKPCPRRWIWHKDSCYFLSDDVQTWQESKMACAAQNASLLKINNKNALEFIKSQSRSYDYWLGLSPEEDSTRGMRVDNIINSSA

SEQ ID NO: 112450 - DNA, 264 bp, Artificial Sequence
  derived and/or modified sequence
cataaatgtaagccttgtccgcgcagatggatttggcataaagatagctgctatttcctaagtgacgacgtccaaacgtggcaagaatcaaagatggcatgtgcagcacagaatgcatctctcttgaaaataaacaacaaaaacatcttttcggttatcaaaaagaagaccgagaagttcttctggctgggcttgagttgggacagctccggcaggagctggttttgggaggacgggagcgtaccatcacctagcctatactag

SEQ ID NO: 112451 - DNA, 498 bp, Artificial Sequence
  derived and/or modified sequence
atgtcggaagaggtcacgtacgcagatctacaattccagaactcaagcgagatggaaaaaattcctgaaatcggtaagttcggggaaaaagcccctcctgcacccagtcatgtctggcgacctgcagccctgttcctgacgcttctgtgtctcctgctgttaataggtctgggtgtgctggcctctatgtttcatgtcactctgaagatcgagatgaaaaaaatgaataagctgcaaaacatctccgaggagttacaacggaacatttcactgcaactaatgtctaatatgaacatctcaaacaaaatacgtaacctatcgacaacactgcagaccatcgcgaccaagctatgtcgtgagctgtactctaaggagcaggaacacaagtgtaagccttgccccagacggtggatttggcataaagatagctgctactttctcagcgacgacgtgcaaacatggcaggagtctaagatggcctgcgcggctcagaattag

SEQ ID NO: 112452 - DNA, 642 bp, Artificial Sequence
  derived and/or modified sequence
atgtcagaggaggtaacctatgccgatctccagttccagaatagttctgaaatggagaagatccccgagataggcaaattcggagaaaaagcccctcccgccccatctcacgtgtggcgacccgctgctctattcctgacactgctgtgcctgcttcttctgatcggcctgggagtgttagctagtatgtttcatgttaccctgaagatcgaaatgaagaagatgaataaattacaaaatatatccgaagaactccagcgcaatatatcactccagcttatgtccaacatgaatataagcaataaaatcaggaaccttagcacaacactgcaaacaatagccacgaaactttgccgggagctatactctaaggagcaggagcacaaatgtaagccgtgtccccggcgttggatatggcacaaggacagttgctactttctgtccgacgatgtgcaaacctggcaggagtccaagatggcctgtgccgcccagaacgcttctttactgaagattaacaataagaatgcattggagttcattaaaagccagtcacgatcgtacgactactggttaggcctttccccagaagaggatagtacaaggggcatgagggtggacaacattataaattcttctgcctag

SEQ ID NO: 112453 - DNA, 264 bp, Artificial Sequence
  derived and/or modified sequence
cacaagtgcaagccctgcccccggcgctggatctggcacaaggacagctgctacttcctgagtgatgatgtgcagacctggcaggagagcaagatggcctgtgccgcccagaatgccagcctgctgaagatcaacaacaagaacatcttcagcgtcatcaagaagaagacagagaagttcttctggctgggcctgtcctgggacagcagcggccgctcctggttctgggaggatggctctgtgcccagccccagcctgtactag

SEQ ID NO: 112454 - DNA, 498 bp, Artificial Sequence
  derived and/or modified sequence
atgtctgaggaggtgacctacgccgacctgcagttccagaacagcagcgagatggagaagatccctgagatcggcaagtttggagagaaggcccccccagcccccagccacgtgtggaggcctgctgccctcttcctgaccctgctgtgcctgctgctgctgattggcctgggcgtgctggcctccatgtttcatgtgaccctgaagattgagatgaagaagatgaacaagctgcagaacatcagcgaggagctgcagaggaacatcagcctgcagctgatgagcaacatgaacatcagcaacaagatccggaacctgagcaccaccctgcagaccatcgccaccaagctgtgccgggagctgtacagcaaggagcaggagcacaagtgcaagccctgcccccggcgctggatctggcacaaggacagctgctacttcctgagtgatgatgtgcagacctggcaggagagcaagatggcctgtgccgcccagaactag

SEQ ID NO: 112455 - DNA, 642 bp, Artificial Sequence
  derived and/or modified sequence
atgtctgaggaggtgacctacgccgacctgcagttccagaacagcagcgagatggagaagatccctgagatcggcaagtttggagagaaggcccccccagcccccagccacgtgtggaggcctgctgccctcttcctgaccctgctgtgcctgctgctgctgattggcctgggcgtgctggcctccatgtttcatgtgaccctgaagattgagatgaagaagatgaacaagctgcagaacatcagcgaggagctgcagaggaacatcagcctgcagctgatgagcaacatgaacatcagcaacaagatccggaacctgagcaccaccctgcagaccatcgccaccaagctgtgccgggagctgtacagcaaggagcaggagcacaagtgcaagccctgcccccggcgctggatctggcacaaggacagctgctacttcctgagtgatgatgtgcagacctggcaggagagcaagatggcctgtgccgcccagaatgccagcctgctgaagatcaacaacaagaatgccctggagttcatcaagagccagagccgctcctatgactactggctgggcctgagccctgaggaggacagcacccggggcatgagggtggacaacatcatcaacagcagcgcctag

SEQ ID NO: 112456 - DNA, 264 bp, Artificial Sequence
  derived and/or modified sequence
cacaagtgcaagccctgcccccggcggtggatctggcacaaggacagctgttatttcctgagcgatgatgttcagacatggcaggaaagtaagatggcatgcgcagctcagaacgccagtctgctgaaaatcaataacaagaatatatttagcgttattaagaagaagaccgaaaagtttttctggctggggttaagttgggacagctcaggaaggtcttggttttgggaagacgggtcagtaccctctccaagtctgtattag

SEQ ID NO: 112457 - DNA, 498 bp, Artificial Sequence
  derived and/or modified sequence
atgagcgaggaggtgacctacgccgacctgcagttccagaacagctcagagatggagaaaattccagaaatcggtaagttcggcgagaaggctccccccgctcccagccacgtctggagacccgctgccctcttcctgaccctgttatgtctcctgctgctgatcggacttggagttcttgcttccatgttccatgtgaccctcaaaatagaaatgaaaaagatgaataagcttcagaatatctccgaggagctccaacgcaacatctccttgcagcttatgtctaatatgaacatctcaaacaagattcggaacctcagcaccaccttgcagacaattgctaccaagttatgccgggagttatattccaaggaacaggaacataagtgcaagccctgtcctcggagatggatttggcataaggattcctgctatttcctgtcagacgacgtccagacgtggcaggagagtaagatggcctgcgcagcccagaattag

SEQ ID NO: 112458 - DNA, 642 bp, Artificial Sequence
  derived and/or modified sequence
atgagcgaggaggtgacctacgccgacctgcagttccagaacagcagtgaaatggaaaagatccccgagatcggaaaattcggggagaaagcccctccagctcccagccacgtgtggaggcccgctgctctgttcctgaccctgttgtgcctcttgctgctcattggcctcggtgtgctcgcctctatgtttcatgtcaccctcaagattgaaatgaagaagatgaacaaactgcagaatatctccgaggagttgcaacgtaacatatctctgcaacttatgagcaacatgaatatcagtaacaagatccgtaatctgtcgaccaccctgcagaccatagccacaaagctttgcagggagctttattctaaagaacaggaacacaagtgtaaaccatgtcctaggcgctggatctggcataaggattcttgttatttcctcagcgacgatgtgcaaacctggcaggaaagcaagatggcctgtgcagcacaaaatgcatccctgctgaaaataaacaacaagaatgccctggagtttatcaagtctcaaagtcgaagttatgattactggctcggtctctcccccgaagaagactcgacaagaggcatgcgggtggataatataatcaatagctccgcatag

SEQ ID NO: 112459 - DNA, 264 bp, Artificial Sequence
  derived and/or modified sequence
cacaagtgtaagccgtgccctaggagatggatttggcataaggacagttgttactttctgagtgacgatgtgcaaacctggcaggaatcaaaaatggcttgcgcagctcaaaacgcctccctgctaaagattaataataagaatatctttagcgttatcaagaagaagacagaaaaattcttctggctgggcctttcttgggattcttctggaaggtcatggttttgggaggatgggtccgtgccctctccctcactgtactag

SEQ ID NO: 112460 - DNA, 498 bp, Artificial Sequence
  derived and/or modified sequence
atgagtgaagaagtgacatatgccgacctccagttccagaactcatccgagatggagaagataccagagatcggcaaatttggggaaaaagccccacccgctccgtcccacgtgtggagacctgcagcactattcctgaccttgctgtgtctgctgttactaatcggactaggcgtgttagcctctatgttccacgtaactctaaagatagagatgaagaaaatgaataagctgcagaacataagcgaagagctccaaagaaatatatctttgcagcttatgagcaatatgaatatatccaacaaaatcaggaacctgagtacaactttgcagactattgccaccaaattgtgccgcgagctgtatagcaaggaacaggaacacaaatgtaaaccatgccccagaagatggatttggcataaggattcctgctatttcctttctgatgatgtgcaaacatggcaagaatcaaagatggcctgtgctgctcagaactag

SEQ ID NO: 112461 - DNA, 642 bp, Artificial Sequence
  derived and/or modified sequence
atgtctgaagaggtgacctatgcagatctacagtttcagaatagttccgaaatggagaagattcctgagataggaaagtttggagagaaggccccaccggctccatcgcacgtttggcgccctgctgcactgttcctcacactcctctgtctcctgttactgattggactgggagtcctcgccagtatgttccatgttactctcaagatcgagatgaaaaagatgaacaaactgcagaatataagtgaggagctgcaacgaaacatctcccttcagctgatgagtaacatgaacatctccaacaaaattcgtaacctctccaccactctacagaccatcgctactaaattgtgtagagagctctattcaaaggagcaggaacataaatgcaagccctgtccacggaggtggatctggcataaggatagttgctatttcttgtccgatgacgtgcaaacttggcaggagtcgaaaatggcatgtgccgcacagaacgcctctctgcttaagattaataataagaacgccctggagttcattaagtctcaatctaggtcgtatgattactggctaggcctctcaccagaggaagattccacgaggggcatgcgggtggataacatcatcaattcatcggcatag

SEQ ID NO: 112462 - DNA, 261 bp, Artificial Sequence
  derived and/or modified sequence
cacaaatgtaagccttgtccaaggagatggatttggcataaggacagctgttatttcctaagtgatgatgtccaaacatggcaggagagtaaaatggcctgtgctgctcagaatgccagcctgttgaagataaacaacaaaaatatattttcagttatcaaaaagaaaactgaaaaattcttttggctgggattatcatgggactcctctggcagaagttggttctgggaagatggctctgttccctctccatccttgtac

SEQ ID NO: 112463 - DNA, 264 bp, Artificial Sequence
  derived and/or modified sequence
cacaagtgcaagccctgccccagaagatggatctggcacaaggacagctgctacttcctgagcgacgacgtgcagacctggcaggagagcaagatggcctgcgccgcccagaacgccagcctgctgaagatcaacaacaagaacatcttcagcgtgatcaagaagaagaccgagaagttcttctggctgggcctgagctgggacagcagcggcagaagctggttctgggaggacggcagcgtgcccagccccagcctgtactag

SEQ ID NO: 112464 - DNA, 498 bp, Artificial Sequence
  derived and/or modified sequence
atgagcgaggaggtgacctacgccgacctgcagttccagaacagcagcgagatggagaagatccccgagatcggcaagttcggcgagaaggccccccccgcccccagccacgtgtggagacccgccgccctgttcctgaccctgctgtgcctgctgctgctgatcggcctgggcgtgctggccagcatgttccacgtgaccctgaagatcgagatgaagaagatgaacaagctgcagaacatcagcgaggagctgcagagaaacatcagcctgcagctgatgagcaacatgaacatcagcaacaagatcagaaacctgagcaccaccctgcagaccatcgccaccaagctgtgcagagagctgtacagcaaggagcaggagcacaagtgcaagccctgccccagaagatggatctggcacaaggacagctgctacttcctgagcgacgacgtgcagacctggcaggagagcaagatggcctgcgccgcccagaactag

SEQ ID NO: 112465 - DNA, 642 bp, Artificial Sequence
  derived and/or modified sequence
atgagcgaggaggtgacctacgccgacctgcagttccagaacagcagcgagatggagaagatccccgagatcggcaagttcggcgagaaggccccccccgcccccagccacgtgtggagacccgccgccctgttcctgaccctgctgtgcctgctgctgctgatcggcctgggcgtgctggccagcatgttccacgtgaccctgaagatcgagatgaagaagatgaacaagctgcagaacatcagcgaggagctgcagagaaacatcagcctgcagctgatgagcaacatgaacatcagcaacaagatcagaaacctgagcaccaccctgcagaccatcgccaccaagctgtgcagagagctgtacagcaaggagcaggagcacaagtgcaagccctgccccagaagatggatctggcacaaggacagctgctacttcctgagcgacgacgtgcagacctggcaggagagcaagatggcctgcgccgcccagaacgccagcctgctgaagatcaacaacaagaacgccctggagttcatcaagagccagagcagaagctacgactactggctgggcctgagccccgaggaggacagcaccagaggcatgagagtggacaacatcatcaacagcagcgcctag

SEQ ID NO: 112466 - protein, 1238 aa, Artificial Sequence
  derived and/or modified sequence
MKVVPEKNAVRILWGRERGARAMGAQRLLQELVEDKTRWMKWEGKRVELPDSPRSTFLLAFSPDRTLLASTHVNHNIYITEVKTGKCVHSLIGHRRTPWCVTFHPTISGLIASGCLDGEVRIWDLHGGSESWFTDSNNAIASLAFHPTAQLLLIATANEIHFWDWSRREPFAVVKTASEMERVRLVRFDPLGHYLLTAIVNPSNQQGDDEPEIPIDGTELSHYRQRALLQSQPVRRTPLLHNFLHMLSSRSSGIQVGEQSTVQDSATPSPPPPPPQPSTERPRTSAYIRLRQRVSYPTAECCQHLGILCLCSRCSGTRVPSLLPHQDSVPPASARATTPSFSFVQTEPFHPPEQASSTQQDQGLLNRPSAFSTVQSSTAGNTLRNLSLGPTRRSLGGPLSSHPSRYHREIAPGLTGSEWTRTVLSLNSRSEAESMPPPRTSASSVSLLSVLRQQEGGSQASVYTSATEGRGFPASGLATESDGGNGSSQNNSGSIRHELQCDLRRFFLEYDRLQELDQSLSGEAPQTQQAQEMLNNNIESERPGPSHQPTPHSSENNSNLSRGHLNRCRACHNLLTFNNDTLRWERTTPNYSSGEASSSWQVPSSFESVPSSGSQLPPLERTEGQTPSSSRLELSSSASPQEERTVGVAFNQETGHWERIYTQSSRSGTVSQEALHQDMPEESSEEDSLRRRLLESSLISLSRYDGAGSREHPIYPDPARDNGDRSRHRAPRNARMSAPSLGRFVPRRFLLPEYLPYAGIFHERGQPGLATHSSVNRVLAGAVIGDGQSAVASNIANTTYRLQWWDFTKFDLPEISNASVNVLVQNCKIYNDASCDISADGQLLAAFIPSSQRGFPDEGILAVYSLAPHNLGEMLYTKRFGPNAISVSLSPMGRYVMVGLASRRILLHPSTEHMVAQVFRLQQAHGGETSMRRVFNVLYPMPADQRRHVSINSARWLPEPGLGLAYGTNKGDLVICRPEALNSGVEYYWDQLNETVFTVHSNSRSSERPGTSRATWRTDRDMGLMNAIGLQPRNPATSVTSQGTQTLALQLQNAETQTEREVPEPGTAASGPGEGEGSEYGASGEDALSRIQRLMAEGGMTAVVQREQSTTMASMGGFGNNIIVSHRIHRSSQTGTEPGAAHTSSPQPSTSRGLLPEAGQLAERGLSPRTASWDQPGTPGREPTQPTLPSSSPVPIPVSLPSAEGPTLHCELTNNNHLLDGGSSRGDAAGPRGEPRNR

SEQ ID NO: 112467 - DNA, 3717 bp, Artificial Sequence
  derived and/or modified sequence
atgaaagtcgtcccggaaaagaacgccgtacgtattctgtggggccgtgaacggggggcacgtgctatgggcgcccagcggctgctccaggaattggtagaggacaaaacacgatggatgaaatgggaagggaaacgcgtcgagctgcccgactccccacgcagcacgttcttgcttgcatttagcccagataggactctgctcgcttcaactcacgttaaccataacatctatattacagaggttaagactggtaagtgtgtgcatagcctgatcgggcaccgccggacaccttggtgcgttacattccaccccacaatctccgggctgatcgcctccggctgtctcgatggggaagtgcgcatctgggatctgcacgggggcagtgaatcttggttcaccgactcgaacaacgctatagctagcttagcatttcaccctaccgcacagttattgctgatcgctaccgcaaacgagattcatttctgggactggagcagaagggaaccattcgcagtggtgaagactgcttccgagatggagagggtgcggctggtgaggttcgatcccttaggccattacctgctcacagccatcgtcaacccatccaaccagcagggagatgacgagccagagattcccatcgacggtaccgagttgagtcattataggcaaagggcgctgttacaatcccagccagtgcggcggactcccctcctgcacaattttctgcacatgctgtcctctaggagttccggcatacaggtgggggagcagagcactgtacaggactcggcaactccatctcctcctccccctccacctcagccttctacagagcgcccaaggacatctgcatacatccgccttcgccagagagtctcttaccccactgccgaatgctgccagcacctgggcatcctctgcctgtgctcacggtgctccggaacacgcgtgcccagcctgctgccccatcaggactccgtgcccccagcttctgccagggccaccacaccaagcttttccttcgtgcagaccgagccctttcacccgcccgagcaggccagcagcactcagcaagatcagggccttttgaatagaccttctgcgttttctacggtgcagagctcaaccgccggcaacaccctccggaatcttagcctcggccccacccgacgcagcctcggtggcccactttcttctcacccatctaggtatcatagagagatcgctcccgggctgacaggcagcgaatggacacgaaccgtgctttccctaaactcccgctcagaggcagaaagtatgccgccccctcgcacctctgcctcttcagtgtcacttttaagcgttcttcgacagcaggagggcgggagccaagcatcagtttataccagcgccaccgagggaagaggatttcccgcatccgggctggcaactgagagcgacgggggaaacggctcttctcagaacaatagtggatccatcaggcacgagcttcagtgcgatttgagacggttctttctggagtacgatcgccttcaggaacttgaccaatccttgagcggggaagccccacaaacccagcaggcacaggaaatgcttaacaacaatattgagtccgagcgtcccggcccaagccaccaacctaccccacattcatcagagaacaacagtaatctgtctcgaggacatctgaatcgctgccgggcttgccataacctcctgacctttaataacgatacactaaggtgggagagaaccaccccaaattactcgtccggggaggcttcgtcctcatggcaggtgccaagctcctttgagtccgtccctagctccggctcccagctgccccctctcgagagaaccgaaggacagacaccctcttctagccgcttggaactgagttcaagcgcttcaccccaagaggaacggactgtgggggtagctttcaatcaggaaacaggacattgggaaagaatctacactcagtccagtcgctctggcactgtttcccaggaggccttacatcaggacatgcctgaggaaagttcagaagaggactcgcttcggcgcaggctgctggagagcagcttaatctccctgtcaagatatgatggagctgggagtagggaacaccccatataccccgaccctgcaagagacaacggagacagatctcggcacagagccccgcggaacgcaaggatgtccgcacccagtctcggacgtttcgtgcctagaagatttttattgcccgagtacttaccctacgctgggatcttccatgaacgcggtcagcccggcctcgccacccatagttcggtgaatcgcgttctcgccggcgcagtgattggcgacggccaatcggctgtggcaagcaatattgcgaacacaacctaccgcctgcagtggtgggatttcacaaagttcgatctacctgaaatctctaacgcaagcgtgaacgtgctagtgcaaaactgcaagatctataatgacgcctcttgcgatatatccgccgacggtcaactgttagccgcttttataccgagcagccagcgcggatttccagacgagggcattttggctgtctattctttagccccccacaatctgggcgagatgttatatacaaaaagatttggacctaatgctatttccgtaagcctcagccctatgggcaggtatgtgatggttgggctggcctcacggcgaattctcctgcacccttctacagagcacatggtggcacaggtatttcgccttcagcaagcccatggaggcgagacatcaatgcgacgggtgtttaacgtcttatacccaatgccggctgatcaaagacggcatgtgagcatcaacagcgccagatggctgccggaaccgggactaggactggcatatgggactaataagggcgatctggtaatatgccggccagaagccctcaattccggtgtcgaatattactgggaccagctgaatgaaaccgtatttactgttcactccaattctaggtcatctgagcgccccggaacctcgcgagcaacatggcgcactgatcgcgatatgggcttgatgaacgctattgggctgcagccaagaaaccccgcgacctccgttacctctcaggggacacagaccttagcactgcagttgcagaacgccgaaacacagacggagcgggaggtgcccgaacctggaacggccgcttctggccctggcgagggggagggttccgaatacggagcttcaggggaagatgcactgtctcggatccagaggctgatggcagaaggggggatgacggccgtagtgcagcgcgaacagtctaccactatggcgtccatgggcggctttgggaacaatatcatcgttagtcaccgtatacatcgaagttctcagaccggcaccgaaccgggtgctgctcacacgtcctcgccccaaccctccacctcaaggggtctgttgcccgaggcaggccagctagccgagagaggcttgtccccacgcaccgctagctgggaccagccaggcacaccagggagggaacctactcaacccaccctcccgtcaagtagcccagttcctatccctgtgtcactcccatcagctgaaggcccgactctgcattgcgaacttacaaacaataaccatctgcttgacgggggatcctctaggggtgacgccgctggcccccgcggagaaccccgcaacagatag

SEQ ID NO: 112468 - DNA, 3717 bp, Artificial Sequence
  derived and/or modified sequence
atgaaggtcgtgcctgagaaaaacgccgtgaggattttatgggggcgtgaacggggggcccgcgccatgggagcccagcgcctcctgcaggagttggtggaagacaagactcgctggatgaagtgggagggcaagagggtggagttgccggacagccccaggtccacctttctgctcgccttttctcctgacagaacgctgttagcctctacgcacgtgaaccacaacatatacatcactgaagttaaaactggcaagtgtgtgcactctctaatcggacaccggcggactccttggtgcgtgacgttccacccaactataagcggcctcatagctagtggctgcctcgatggcgaggtgcggatttgggacctgcatggcggcagtgaatcgtggttcacagactcaaataatgccatagctagcctggccttccatcctactgcacagcttttactaatcgccactgctaatgaaatacacttttgggactggagcagacgtgaaccgttcgcggttgtaaaaaccgcgtctgagatggagagagtgcggctcgtgaggtttgatccactgggacactacctgttaaccgcgatcgttaatccctcgaatcagcagggcgacgatgagcctgaaatccctatcgatggaacagagctgtcacactatcgacagagagccctactgcagtcccaaccagtgaggcgaaccccacttctgcataattttcttcatatgctctcatccaggtctagcggaatacaagttggggaacagagcacagtgcaggattctgctactcccagccctcctcctcccccaccccaaccaagtacagagaggccaagaaccagcgcatacatccggctccgccaaagggtgtcgtacccgaccgcagagtgctgtcaacatctgggcatactctgcctttgcagcaggtgttctggtacacgggttccctccctactcccacatcaggacagtgtcccgccagcatctgcacgggccaccactccatctttttcttttgttcagacagaaccctttcacccaccggagcaggcaagcagtacacagcaagatcagggcctgctgaatagacccagcgcctttagcactgttcaatcctcaactgcaggcaacaccttgaggaatttgtctctcgggccaacacggcgcagtctgggcggacccctgtcgagccatcctagtcgctaccaccgcgagattgcaccaggattaaccggtagcgaatggacaagaaccgtcctcagtctcaatagtcggagtgaagcagagtccatgccgcctccccgaacttctgcatcaagtgtttctctattgtccgtcttgaggcagcaagaggggggcagccaggcctccgtttacacctctgcaaccgagggacgtggatttcccgcttccgggttggctactgagtctgacggcggaaacggatcctcccaaaacaacagtggatctattcgacatgagcttcagtgcgatcttcgccggttttttctggaatatgaccgcctacaggaactggaccaatcattgagcggggaagccccccagacccagcaggctcaggagatgttaaacaataacatagaatccgaacgtcccgggccctctcatcagcccacccctcattcctcagagaataattcaaatctcagccgaggtcatctgaataggtgcagagcctgccataacctgttgacattcaataacgacacactacgctgggagcggacaacacccaattatagcagcggcgaggcaagctctagctggcaagtgcccagctctttcgaaagcgtcccgtcctccgggagccagctcccgccccttgagcggaccgagggccagacccctagcagttcccggctagagctgtcttctagtgccagcccccaggaggagagaactgtgggcgtggcttttaaccaagaaacagggcattgggagagaatctatacacagtcctctaggtcaggtactgtgtcccaagaagccctgcatcaagacatgcctgaagaatcttccgaggaagattccttgcgccgccgcctcctggaatcatccctgatcagcctgagtagatacgacggggcaggctcgcgggagcaccctatttaccctgatcctgcaagagataatggcgacaggtcccgacaccgggcaccacgaaacgccagaatgagtgcaccgtccctggggaggttcgtgccacgaaggtttttactacccgaatacctgccttatgctggaatcttccacgaaagagggcagccggggctagccactcattcctccgtgaaccgagtgctcgctggagccgtgatcggtgatggccaatctgcagtcgcctcaaatattgccaataccacatacaggctgcagtggtgggatttcacaaaattcgacctccctgaaatctccaacgccagcgttaacgtgttggtgcagaactgtaagatatataacgacgctagctgcgacatctctgccgacggccaactattggctgccttcatccccagctctcagcggggattccctgacgaggggattctggctgtgtatagcctggctccccacaaccttggcgagatgctgtacactaagcggtttggccctaatgccattagcgtgtctctaagtcccatggggcgctacgttatggtaggtctagcatctagaagaattctcctgcatccaagcactgagcacatggtggcccaagtcttccgactacaacaggcacatgggggagagacatcaatgagacgcgtgttcaacgttctgtatccaatgcccgcagaccaacgaaggcatgtgtctataaattcagcacgctggctgcccgagcccggactggggttagcttacggtaccaataagggagatctggtcatctgtcgaccagaggctctcaactcaggagttgaatactattgggaccaactaaacgaaacagtgtttaccgtgcattcaaacagccgctcttccgagaggccgggtacgtctcgcgccacatggcggactgaccgtgacatgggcctaatgaacgcaatcggacttcagcctcgaaacccagctacctctgtgaccagccaaggaacccagaccctcgctctgcaattgcagaacgccgagacacagaccgagagggaggtccctgaacctggcacggcggcaagcggcccgggcgagggagagggtagcgaatatggcgcctccggggaagatgctctgtctagaatacagaggcttatggcagaaggtgggatgaccgcagtggtgcaacgcgagcaatccacaacaatggcgtccatgggcggattcggcaataacattatcgtatcccacaggatccaccgttccagccaaaccgggactgaacctggcgccgctcatacctcctcaccacagccaagcacgtcacgtggactgctgcctgaggcaggacagttggcagagcggggactgtcccctaggaccgcgagttgggaccagcctggcaccccaggtcgggaacccacgcaacctaccctaccaagctcgagcccagtaccgatacccgtttcgctgccctcagccgaggggccaacccttcattgtgagctcaccaataataaccatctgctggacggcggctccagtaggggggatgcagcaggaccacgcggagagcctcgtaacagatag

SEQ ID NO: 112469 - DNA, 3717 bp, Artificial Sequence
  derived and/or modified sequence
atgaaggtggtgcctgagaagaatgctgtgcgcatcctgtggggccgggagcggggggcccgggccatgggcgcccagaggctgctgcaggagctggtggaggacaagacccgctggatgaagtgggagggcaagagggtggagctgcctgacagccccaggagcaccttcctgctggccttctccccagacaggaccctgctggccagcacccacgtgaaccacaacatctacatcacagaggtgaagacaggaaaatgtgtgcacagcctcatcggccacaggaggaccccctggtgtgtgaccttccaccccaccatcagcggcctgattgccagcggctgcctggatggagaggtgcgcatctgggacctgcacggcggcagcgagagctggttcacagacagcaacaatgccatcgccagcctggccttccaccccacagcccagctgctgctgattgccacagccaatgagatccacttctgggactggagcagaagagagccctttgctgtggtgaagacagccagcgagatggagcgggtgcggctggtgcgctttgaccccctgggccactacctgctgacagccatcgtgaaccccagcaaccagcagggagatgatgagcctgagatccccattgatggaacagagctgagccactaccggcagagggccctgctgcagagccagcctgtgcggaggacccccctgctgcacaacttcctgcacatgctgagcagccgcagcagcggcatccaggtgggggagcagagcacagtgcaggacagcgccacccccagccccccacctcctccaccccagcccagcacagagcggcccaggaccagcgcctacatccggctgcggcagagggtgtcctaccccacagctgagtgctgccagcacctgggcatcctgtgcctgtgcagccgctgcagcggcaccagggtgcccagcctgctgccccaccaggacagcgtgcccccagccagcgcccgggccaccacccccagcttctcctttgtgcagacagagcccttccaccccccagagcaggccagcagcacccagcaggaccagggcctgctgaaccggcccagcgccttcagcacagtgcagagcagcacagctggcaacaccctgaggaacctgagcctgggccccacccggcgcagcctgggcggccccctgagcagccaccccagccgctaccaccgggagatcgcccctggcctgactggaagtgagtggaccaggacagtgctgagcctgaacagccgctctgaggccgagagcatgcccccacccaggaccagcgccagctctgtgtccctgctgtctgtgctgcggcagcaggagggcggcagccaggcctctgtgtacaccagcgccacagagggccggggcttccctgccagcggcctggccacagaaagtgatggcggcaatggcagcagccagaacaacagcggcagcatcagacatgagctgcagtgtgacctgcggcgcttcttcctggagtatgaccggctgcaggagctggaccagagcctgtctggagaggccccccagacccagcaggcccaggagatgctgaacaacaacatcgagagcgagaggcctggccccagccaccagcccaccccccacagcagcgagaacaacagcaacctgagccggggccacctgaaccgctgccgggcctgccacaacctgctgaccttcaacaatgacaccctgcgctgggagaggaccacccccaactacagcagtggagaggccagcagctcctggcaggtgcccagcagctttgagagcgtgcccagcagcggcagccagctgccccccctggagaggacagagggccagacccccagcagcagccggctggagctgagcagcagcgccagcccccaggaggagaggacagtgggcgtggccttcaaccaggagaccggccactgggagcgcatctacacccagagcagccgctctggaacagtgtcccaggaggccctgcaccaggacatgcctgaggagagcagcgaggaggacagcctgcggcggcggctgctggagagcagcctcatcagcctgagccgctatgatggagctggcagccgggagcaccccatctacccagaccctgcccgggacaacggggacaggagccgccaccgggcccccagaaatgccaggatgtctgcccccagcctgggccgctttgtgccccggcgcttcctgctgcctgagtacctgccctatgccggcatcttccacgagcggggccagcccggcctggccacccacagctctgtgaacagagtgctggccggggctgtgattggagatggccagagcgctgtggccagcaacatcgccaacaccacctaccgcctgcagtggtgggacttcaccaagtttgacctgcctgagatcagcaatgcctctgtgaatgtgctggtgcagaactgcaagatctacaatgatgccagctgtgacatctctgcagatggccagctgctggccgccttcatccccagcagccagaggggcttcccagatgagggcatcctggccgtgtacagcctggccccccacaacctgggggagatgctgtacaccaagcgcttcggccccaatgccatctctgtgtccctgagccccatgggccgctacgtgatggtgggcctggccagccgccgcatcctgctgcaccccagcacagagcacatggtggcccaggtgttccggctgcagcaggcccatggaggagagacctccatgagaagagtcttcaacgtgctgtaccccatgcctgctgaccagaggagacatgtgtccatcaacagcgcccgctggctgcctgagcccggcctgggcctggcctacggcaccaacaagggggacctggtgatctgcaggcctgaggccctgaacagcggcgtggagtactactgggaccagctgaatgaaacagtgttcaccgtgcacagcaacagccgcagcagcgagaggcctggcaccagccgggccacctggaggacagaccgggacatgggcctgatgaatgccatcggcctgcagcccagaaatcctgccacctctgtgaccagccagggcacccagaccctggccctgcagctgcagaatgctgagacccagacagagcgggaggtgcctgagcctggaacagctgccagcggccctggagagggggagggctctgaatatggagccagcggagaagatgccctgagccgcatccagaggctgatggccgagggcggcatgacagctgtggtgcagcgggagcagagcaccaccatggcctccatgggcggcttcggcaacaacatcatcgtgagccaccgcatccacaggagcagccagacaggaacagagcccggggccgcccacaccagcagcccccagcccagcaccagccggggcctgctgcctgaggccggccagctggccgagcggggcctgagccccaggacagcctcctgggaccagcccggcaccccaggccgggagcccacccagcccaccctgcccagcagcagccctgtgcccatccctgtgtccctgcccagcgctgagggccccaccctgcactgtgagctgaccaacaacaaccacctgctggatggcggcagcagcagaggagatgctgctggccccagaggagagcccaggaacagatag

SEQ ID NO: 112470 - DNA, 3717 bp, Artificial Sequence
  derived and/or modified sequence
atgaaggtggtgcccgagaagaacgccgtgcggatcctgtggggcagggagaggggggcccgcgctatgggggcccagcggttgctccaagaactggtcgaggacaaaacgcgttggatgaagtgggaaggcaagagagtggagctgcccgactctccaaggtcaacattcctgctcgctttttccccagatagaacattgttggcctcgacgcacgtgaaccataacatttacattactgaagtgaagaccggtaaatgtgtccatagccttatcggtcaccgtcgcaccccttggtgcgtgacatttcatccgacaattagcgggctgattgctagtggctgcctggatggtgaagttagaatttgggatttgcacggtggaagcgagagttggttcaccgactctaataacgccatcgctagcctggccttccatccaactgcacagttgcttctaattgcaaccgccaatgaaatccacttttgggactggagtagacgagagccatttgcggtggtcaagactgcaagcgaaatggagcgggtgaggttagtgcgctttgatcctctcggacactatctcctcacagccattgtgaatccgagcaaccaacaaggtgatgatgaaccagagatccctatagatggtaccgagctgagccattacagacagagagccttactgcagtctcagccagtgcggcgcactcctttgctgcataactttctgcacatgcttagttcccggtccagtggtattcaagtgggtgaacagagcaccgtgcaggatagtgcaacccccagcccacctcccccccccccccaaccctctactgagaggcctaggacctcagcttacatacggctgcggcagagagtcagctaccctacagccgagtgctgtcagcatctgggcatactgtgtctgtgctccaggtgtagcggaaccagggttccctctcttttgccacatcaggacagtgtacctcccgcctcagcacgcgccacaactccaagtttttccttcgtgcaaaccgagccatttcacccgcctgagcaggcatccagtactcagcaggaccaaggtttgttgaaccggccttctgccttttctacagttcagtcctctaccgccggcaacaccctcaggaatctatccttagggcctaccagacgcagtctgggcggacccctctcttcgcatccttcacgataccaccgggagatagccccagggctgacaggcagtgagtggacaaggaccgtgctttcattgaatagtaggagtgaggccgagtcaatgccacctccgagaacatctgctagcagtgtctcccttctgtctgtgctgagacaacaggagggggggagccaggcttccgtgtatactagtgccacggaaggcagaggctttcctgcctccgggcttgcaacagagagtgacggaggcaatggcagctctcaaaacaatagtggctctatcaggcacgagctccagtgtgatctgcgtcgattctttcttgaatatgaccggttacaggagctggatcagagcctgtccggagaggccccccagacccagcaggctcaggagatgcttaacaataatatcgaaagcgaaagaccaggaccgagccatcagcctaccccccattccagcgagaataactcgaatctcagtcgcggccacttgaaccgctgtagggcatgccacaacctgctcaccttcaacaacgatactttgaggtgggagcggaccacaccaaactacagtagcggggaggccagctctagctggcaagtccccagctctttcgagtctgtcccaagcagcggaagccagctcccccccctagaacggactgagggccagaccccttctagcagtcgccttgaattgagtagctccgcaagccctcaggaagagcggaccgttggcgtggcttttaatcaagaaacggggcattgggaaaggatctacactcagtcttcaaggagcggaaccgtctctcaggaggccctccatcaggacatgccggaggaatcaagcgaggaagacagcctccgaagacgccttctcgagtccagtctgatctctctttcacgttacgacggggcagggtcacgcgagcacccaatttaccccgatcctgcccgcgataacggcgacaggtcaagacatcgcgctccccgaaacgccagaatgtctgccccatcactagggaggttcgtgcctagacggtttctattacccgagtacctcccgtacgccggaatttttcatgagcgtggacagcctggcctcgctacacacagtagtgtcaaccgggtgctggccggcgcagtaataggagatggccagtcggctgtcgcgtccaacatcgccaatactacatatcgcctgcagtggtgggactttaccaagtttgacctcccggagattagcaatgcaagcgttaacgtccttgttcagaactgcaagatctataacgatgcctcctgcgacatttctgctgacggtcaactcctcgccgcattcattccaagttcccaaaggggtttcccagatgaagggatcctggctgtttatagcttggcgccccataacctgggagagatgctctatacgaagcgatttggaccaaatgccattagtgtaagtctgtctcctatgggccgctatgtgatggttggtctggcatccaggcgtattctgctccacccatccactgagcatatggtcgctcaggtcttcagactgcagcaggcacatggtggtgagacttcaatgcgaagagtcttcaatgtactgtatccaatgccagccgaccagcgccgacatgtgagcattaactccgcaagatggctgccggagcctggtctgggtttagcctatggaacgaacaagggggacctggtgatttgtaggcctgaggccttgaattctggcgtggagtactattgggaccagctgaatgagaccgtgttcacagtccattcaaatagtaggagttcagagcggcccggtacaagtcgagcaacctggcggaccgaccgggatatgggcctgatgaacgctattggccttcagccacgcaaccctgcaacatcagtgactagtcagggaacacagacactggcattacaactgcagaacgcagaaacgcaaacggagagagaggtccctgaacccggaactgctgcctcaggccctggcgaaggcgaggggtccgaatacggcgcctcaggggaggatgccctatcacgaatccaaaggctgatggccgaaggcgggatgaccgccgtggtccagcgagagcagtctaccactatggcgagtatgggcggatttgggaataacataattgtttcccaccgaatccatagatcctcgcagactggaacagagcctggtgctgcacacaccagttcaccacagcctagcacgagtcgcgggttgctacctgaggccgggcaactggctgagagaggcttgtctccaaggaccgcttcatgggatcagcctggtacccccggtcgagaacctacgcagcccacacttcccagttccagtccagttccgatacccgtgagcctcccgagtgcagagggccccaccttacactgtgagctcacgaacaacaaccatctgcttgacggcggaagtagtaggggggacgctgctgggccacgtggtgagccacgaaatcgctag

SEQ ID NO: 112471 - DNA, 3717 bp, Artificial Sequence
  derived and/or modified sequence
atgaaggtggtgcccgagaagaacgccgtgcggatcctgtggggcagggagcggggcgcaagggcgatgggcgcacagagacttcttcaggagctcgtggaggacaaaaccagatggatgaagtgggagggcaagcgagttgaactgccagattcacccagaagcacctttctgctggcattctcccctgatcgaacattgctcgcatctacccacgtgaatcataacatctacattaccgaagtgaaaaccggtaagtgtgtgcactctttaattgggcatagacggaccccgtggtgtgtcaccttccatcctacaatatcagggctgatcgctagtggttgtctcgacggcgaagtgcgtatctgggacctgcacgggggctctgaatcgtggtttacagactctaacaacgccattgccagtttggcattccatccgactgcacagctgctgctgatcgctacagccaacgaaatccacttctgggactggtcaagaagggagccgttcgcagtggtcaagacagcctccgaaatggagagagtgaggctcgtgcggttcgatccattaggccactatctactgaccgcaatagttaacccttcgaatcaacaaggagatgatgaacctgagattccaatcgatggaaccgaattgagccactaccgccagagagctctcttacaaagccagccagtgaggcggactccgttgctccataactttctgcatatgctcagttcccgttccagcgggattcaggtgggcgagcagtcaactgttcaagactctgccacacccagtcctcctcctcctccacctcaaccttctacggagaggcctcgcacaagtgcttacattcgcctgcggcagagggtcagttaccccacagcagagtgctgccagcacctgggtattctctgcctgtgttcacgttgctccggcacccgagttccctcacttctgccacatcaggacagcgtaccacccgcttcggcccgggcgacaaccccctcttttagttttgtccagactgagcccttccatcccccagaacaggcctccagcactcagcaggatcagggattattgaatagaccttccgcattcagcactgttcaaagtagtaccgccggaaacaccttaagaaatttgagcctcgggcctacaagaagatcacttgggggcccactgtcctctcacccttcccggtaccacagagagatagccccaggcctgaccggctctgagtggacccgcaccgttctctctctgaactctcggagtgaggcagagagcatgccccccccacggacaagcgcaagcagcgtctctttgctgtctgtcctgaggcagcaagagggtggctcccaagctagtgtctacaccagcgcaaccgaagggcgcggattccctgccagcggtctggcgaccgagtccgatggcggcaacgggtcttctcagaataatagtgggtccattagacacgaactccaatgcgacctgcgcaggtttttcctagaatatgaccggctgcaagaactggatcagtccctttcaggtgaagcccctcagacacagcaagcgcaagagatgctgaataacaatattgagagcgagcgaccaggcccgtctcaccagcccaccccccactcatctgaaaataattctaatttgtccagaggccacctgaatcggtgcagagcctgtcataacctccttaccttcaataatgatactctccgatgggaacggaccacgcccaactactcctcaggcgaagcaagttcctcctggcaggtcccaagttccttcgagtccgtgccaagtagcggctctcagctccctcccctcgagagaactgaagggcagaccccctcatctagtcggttggaactctctagttctgcctcgccacaagaggaacgtacagttggagtggcctttaatcaagagaccggtcactgggaaagaatatatacccagtcatccagatctgggacggtttcacaggaagccttgcaccaggatatgcccgaggagagctcggaggaggattccctccgacgccgcctgttagaaagctctctgatcagcctcagcaggtacgacggggccggaagcagggaacaccccatctatcctgaccccgccagagataacggggaccgctctcgccatagagcaccaagaaacgcccggatgagtgcaccttctctcggcagatttgtgccaagacgttttcttctgccagagtacctgccatacgctgggatatttcatgagaggggtcagcctggtctggctactcacagttcagtgaaccgcgttctggctggcgcggtgattggtgacggccaaagcgccgtcgctagcaatatcgccaacacgacgtacaggcttcaatggtgggattttaccaaatttgatctccccgagatcagcaatgcctccgtcaacgtgctggtccagaattgtaagatctacaatgacgcatcttgcgatatcagtgctgatggacagttgctggcagccttcatcccatcttcccagagaggtttccctgacgagggcattctggccgtttacagtctggcacctcacaacctcggggagatgctgtataccaagcgatttggccctaatgccatcagcgtctcattatctccaatggggaggtacgtgatggtggggctggccagtcgcaggattctcctccatccgagcaccgagcatatggttgcacaggtctttcggcttcagcaagcacatggaggtgagacttccatgcgacgggttttcaacgtgctgtatcctatgccagctgatcagaggaggcacgtgagcatcaattccgccagatggctgcctgaacctggcctcggtctcgcgtacggtacgaacaagggagatttggtcatctgtaggccagaggcactgaatagcggagttgagtactattgggaccagcttaatgaaaccgtttttaccgtccatagtaatagcaggtcatctgaacgcccaggaaccagtcgggccacctggagaaccgacagggatatgggtctgatgaatgctattggcctgcagccccggaaccccgccacaagcgtcacttcccagggcacacagaccctcgccctgcaactgcaaaatgctgaaacccaaacagaaagggaagtgccagagccaggaaccgccgcgtccggtccgggggagggagagggaagcgaatacggggcatctggtgaggatgctctgtcacgaatacaacgccttatggcagagggcggaatgaccgccgtcgtgcagcgagagcagagcacaacaatggcctcaatgggcggtttcggcaataacattatcgtttctcataggattcatcgctccagccagaccggcacagagcctggagccgcacacacctcgagcccacagccatcaacatccagagggctgttacctgaggctggccagctggcagaaagagggctgagcccccggacggcatcatgggatcagcctggcactccaggacgagagccaactcagcccacactgccgagttcatctcctgtgccaatccccgtatcgcttccttccgccgagggacccacgctacattgtgagctcaccaataataaccacctattggatgggggctcttcaaggggagacgccgccggtccacgcggtgaacctagaaaccggtag

SEQ ID NO: 112472 - DNA, 3717 bp, Artificial Sequence
  derived and/or modified sequence
atgaaggtggtgcctgagaagaacgccgttcggatcttgtggggccgtgaaaggggggcacgggcaatgggggcacagcgcctgcttcaggagctcgttgaagacaaaactcgttggatgaagtgggagggaaagagagtcgagttacctgactctccaagatccactttcctgcttgcgttttctcccgacaggacgctgcttgcgtctacccatgtgaaccacaatatctatatcaccgaagttaagaccggcaagtgtgtgcactccttaattggccaccggagaaccccatggtgtgtgaccttccatccaacgatctcaggcctgattgccagcgggtgtctggacggagaggtgcgaatctgggacctccacggtggaagtgaatcttggtttaccgatagcaacaacgccatagctagtttagctttccatcccaccgctcagctcttgctgattgcaaccgcaaatgagattcatttctgggactggagccgaagagagcctttcgccgtcgtaaagacagcgagcgaaatggagcgcgtgcgcctggtgcgtttcgacccactgggtcattatctgctaacagccattgtgaacccctccaatcagcaaggtgacgacgagccagagatccccatcgacggcactgagctgagccactacaggcaacgggctctgctgcagagccagccagtacggaggacaccgctactccataattttctgcatatgctgtcctcacgcagttcaggtatccaggtcggcgagcagtccactgtccaggactcggcaacccccagcccccctcctccgcctcctcagcccagtaccgaaaggcctcgtaccagtgcttatattagacttaggcaacgtgtgtcgtatcctactgcggaatgctgtcagcacctgggtattttatgtctgtgttcccggtgttccggcactcgggttccctctttactaccccaccaggattcggtcccgcctgcctccgcgcgagccacgactccttctttttccttcgtgcagacagaaccctttcacccccctgagcaggcctcgtcgacccagcaggatcagggattgctgaacagaccgtccgccttcagtacagtacagtcatcaacagcgggaaacactctgcgcaaccttagcttgggcccaaccaggagatctctggggggaccactgagcagtcatccttctcggtaccaccgcgaaatcgctccgggtttgacaggatcagagtggactaggacggttttatccctgaacagtagatccgaggcagaaagtatgcctccaccaaggacatccgcatccagcgtctctctgctgagtgttcttaggcagcaagaaggcggttctcaggcgagcgtgtatactagcgcaaccgagggacggggattccccgcaagcggactcgcaaccgagtcagacggcggaaatggatcttcgcagaataactccggcagtatccgtcatgaactccagtgtgaccttagacgctttttccttgagtatgaccgcctgcaggagctcgatcagtcactctcgggagaggcgcctcagacccagcaggcacaggagatgctgaacaataatatcgagagtgaacggccaggaccctcacaccagccaactccccatagctcagagaataatagtaacctgagccggggtcatttaaatcgctgtagggcttgtcataatcttttgacttttaacaatgatactctccgttgggagcgaaccacaccaaattatagcagcggtgaggcctcatcttcctggcaggtccccagcagtttcgaaagcgtgccatcctccggatctcagctcccccctcttgaacggactgagggccaaactccttcatcaagcagattggagctgagtagctcagcctccccccaggaggagaggaccgttggcgtggcctttaatcaggaaaccggccactgggagaggatatacacccaatcgagtcgaagtgggactgtgagtcaagaagccttgcaccaagatatgcccgaggagagcagtgaagaggactcgctccgaaggaggttgttagagagttcactgatctcactgtcaaggtatgacggagcaggtagtcgggagcatcccatttacccggaccctgcacgcgacaatggcgataggtcccgtcatagggctccacgtaacgcgcgaatgtcagctccttcgctgggtcgctttgttcctaggcgctttcttcttcctgaatacctgccttacgccggaatatttcatgaacgaggacagcctggtctcgctacccactcctcagtaaatcgggtgctggccggtgccgtcatcggagacggccagtctgctgtggccagtaacatagctaacaccacctatagactgcagtggtgggacttcacaaaatttgatctgccagaaatcagcaatgccagcgtgaatgtgctggtgcaaaactgcaagatctacaacgatgctagttgtgacatatctgcggatggtcagctcctcgcagcatttattcccagctcccagagaggcttcccggatgagggcatcctggcagtgtactccttggctcctcacaatcttggggaaatgctgtatacaaagcggttcgggccaaacgccattagtgtctcgcttagcccaatggggagatacgttatggttggcctcgcctcgcggcgaatacttctccacccttccacggagcatatggtggctcaggtctttcgcctgcagcaggcgcatgggggagagacctcaatgcgacgggtgtttaacgttttataccctatgccagccgatcagaggagacacgtatcgatcaatagtgcccgttggctgcctgagcctggactaggtctcgcctatggtacaaataagggcgatctggtgatatgtcggccagaggcgctcaactccggcgtagaatactactgggaccagctaaacgagaccgtgttcacggtgcactcgaattctcggtcatctgaaagacccggaacctcgcgggctacgtggcgcaccgatcgggacatgggcctgatgaacgccatcggcctacagcccagaaatccagccacctcggtgaccagtcaggggacccaaactcttgccctgcaactacaaaacgctgaaacccaaactgaaagggaagtgccggagcctggcacggcggctagcggtccgggagagggagaaggatcagagtacggtgcctcaggcgaagacgcactgtcacggatacaacgattgatggctgagggtgggatgaccgctgtggtgcaacgggaacaaagcaccacaatggcttctatgggaggctttggaaacaacatcatcgtctcccaccgcattcaccgaagcagccagactgggacagagccaggagctgcacatacatcaagcccacagccctccacaagccgcggactgcttcccgaagccggacaactggctgaaaggggtctgagcccacgaactgcatcttgggaccagcccggaacgcccggtagagagcctactcagcctaccctcccatcaagctcccccgttcccattcccgtaagtttgccatccgccgaaggaccaactctgcactgtgagcttacaaacaacaaccacctcctggatggtgggtcttcccgcggagatgccgctggacccagaggcgagcccaggaatcgttag

SEQ ID NO: 112473 - DNA, 3717 bp, Artificial Sequence
  derived and/or modified sequence
atgaaggttgtccccgagaagaatgcagtgcgcatcctctggggaagggagcgcggagcacgggcaatgggggctcaaaggctcctacaggaattagtcgaagacaaaacacggtggatgaaatgggaagggaagcgagtggagctgccggatagtccacgctccactttcctgctcgcattttcccctgatcggacactgctcgccagtactcacgtgaaccataacatctatattacggaagtgaaaacgggaaagtgcgttcacagtctaatcggtcaccgtagaaccccctggtgcgtcacattccacccaacgatctctgggctaatcgccagcggctgcttggacggagaggttagaatttgggacctccatggaggcagtgagtcatggttcacagacagcaacaatgcgatagccagtctagctttccatccgaccgcccagttgctgcttatcgctaccgcaaacgagatacatttttgggattggtctcggagggaaccgttcgctgtggtgaagactgcttccgaaatggagcgagtccggctagtgcggttcgaccccttaggtcactatctgcttactgccatagtaaatccaagcaatcagcaaggggacgacgaacctgagataccaatcgacgggaccgagctctcccactatagacagcgagccctgctccagtcacaacccgtacgccgaacgccactactccataactttcttcacatgcttagtagtagatctagcggaatccaggtgggcgagcagtccaccgttcaggatagtgcgactccctcgccgcctccgcctccaccacagcccagcaccgagagaccccgtactagcgcatatataagattgcgtcagcgggtgagctaccccaccgccgaatgctgccaacacctgggcatcctgtgtttatgcagtcggtgcagcggcactcgcgtgcccagtttactcccgcaccaggacagtgttcctccagcatccgccagagcaacaaccccttctttcagtttcgtccagaccgaacccttccatccccctgaacaggctagcagtacacaacaggaccagggacttcttaaccggccaagcgctttctctacagtccagagttccactgctgggaacactcttcgcaatctgtccctcggtcccacccgaagatctctcggtggacccctctcttcccacccatctaggtaccaccgcgaaattgctccaggcctcaccggatctgagtggactcgaaccgtcctctccttaaacagcagatctgaagcagaatctatgcctcccccacgaacctccgcctctagtgtctcactgctttccgtgttgaggcagcaggagggcggtagccaggctagtgtgtatacctctgcaacagagggcagaggatttccagccagtggtctggctacggaatcagatgggggaaatggatcgagccaaaacaactctggcagtatccggcatgagctgcaatgcgacctgcgcaggtttttcctggagtacgataggctccaagaactggaccagtctctctcaggcgaagcacctcagacacagcaggctcaggagatgttgaacaacaacatcgagtctgagcgtcccggacccagtcaccagcctacaccccactcctccgaaaataacagtaacctgtcacgcggacacctgaatcgttgtcgcgcttgccataacctcctaaccttcaacaacgacactctgagatgggagcggaccactccgaactactccagcggagaagcgtccagttcctggcaggtgccctctagctttgaatccgtccctagttccggtagtcagctgccgcctcttgagcgcacggagggtcaaacgccctcctcgagcaggctggaactgtcatctagcgcttccccccaggaggaacgaacagtaggcgtcgcgttcaaccaggagacgggccattgggaaaggatttatacccagagtagtcggtcgggaaccgtgagccaagaggcccttcaccaggatatgcccgaggaaagtagtgaagaagatagccttaggaggaggctgctggagtccagtctcatctccctctcacgctacgacggggctggatctagagaacatccaatttaccccgaccctgccagggacaacggcgatcgctcgagacatcgggcaccgaggaatgcgaggatgtctgccccatcgctgggcaggttcgtgcctcggaggtttctgttacccgagtatctgccgtatgccggtatcttccacgaaagggggcaacccggtttggcaactcacagttccgtcaaccgggtgctggcaggagccgtgatcggggatgggcagtctgccgtggctagcaatattgccaacaccacttatcgactgcaatggtgggattttacaaagtttgatctgcccgaaatcagcaatgcaagtgtgaacgtgcttgtgcagaattgcaagatctataatgatgcatcgtgtgacatctccgccgacggtcagttgcttgccgcttttattccatcctctcagcgcggattcccggacgaaggcatactggccgtttattccttggcacctcataacctgggcgagatgctctacacaaaaaggttcgggcctaatgccatttcggttagcctttcacctatgggacggtacgttatggttggcctggctagcaggcgcatcctcttgcaccctagcactgagcacatggtcgcacaggtcttccgattacagcaggctcatggaggcgagacttccatgagaagagtgtttaacgtgctgtaccctatgccggctgaccagaggagacacgtctccatcaactcagccagatggctgcccgagcccggtctcggcttagcatatggcactaataagggggatcttgtgatttgtcggccagaagctctcaactccggtgtcgagtactattgggatcaactgaacgagactgtttttactgttcactcaaacagccgtagttctgaacgcccaggaacttcccgggcaacctggagaactgacagggatatggggctgatgaacgctattggcttgcagccccgaaaccctgctacgtcggtgacctctcaggggacccagacgctcgctcttcagctgcagaatgcagagactcagaccgagagagaggtgcccgaacccggaactgccgcttcaggacctggtgagggtgaaggctccgaatatggtgccagcggcgaggacgccttgtcccgtatccagcgactgatggctgaggggggaatgactgctgtcgttcagcgtgagcagtctactaccatggcatccatgggcggattcgggaacaatattattgtgtcccataggattcacaggagcagccagactgggactgaacccggagccgcacatacttcctctccccagccttcaacgagccgaggactgctgcccgaggcaggccagctagccgagcggggtctgtcccctagaaccgcctcctgggaccaacccggaactcccggtagagaaccgacacaaccaaccttgccctcatctagtcccgttcccatccccgtttctttacccagcgccgaggggcctaccttgcactgcgaactgaccaataataatcacttgttagatggcggtagcagcaggggcgacgctgctggcccaagaggcgagcctcgtaatcgatag

SEQ ID NO: 112474 - DNA, 5113 bp, Artificial Sequence
  derived and/or modified sequence
aggggattaatgaagagccaccagactatctttatggagaatctagattgggaagttaagctaagaatgtgcatttttgaaaaagtttttatggtagaagagaatgtatatcagaggaaagaatgtagagaagaaagcaacattgtccactgggaattgataagttctgcgtagaatttagagttataaggactatctcattggctcctaatgaatgctaaataacaaatggaaattgctatttccatgaggacaacttacaaggacctgtatggcctcattttagctgcttcagtgtgttggagctgttacttgctccttcatttcctgggcctggtgtgacagtggctactgagcgccatgaaggttgtcccagaaaagaatgctgtccggatactctgggggcgagaacggggtgctcgggccatgggagctcagcggcttctgcaggagctggtagaagataaaacccggtggatgaaatgggagggcaagagagtagaactgccggatagtccacgctctaccttcttattggccttcagcccagacaggactctcttagcctccacccatgtgaaccataatatctatattacggaggtgaagactggcaagtgtgttcattccctgattggacaccgccgtactccatggtgtgtcacttttcatcccaccatctcaggccttattgcttctggctgcctagatggggaggttaggatttgggatttacacggtggcagtgaaagctggttcacagatagcaacaatgccattgcctccctggctttccaccctacggctcagctcctgctgattgccactgccaatgagatccacttctgggactggagtcgacgggaaccctttgctgtggtgaagacagctagtgagatggaacgggtccgtctggtgagatttgatccacttggacactacttactcacagcaattgttaacccctctaatcaacagggtgatgacgaaccagagatccccatagatggaacagaattatcccactaccgtcagcgtgccctcctgcaatcacagccagttcgccggacgcctctcctccacaatttcctgcacatgctgtcctcccgctcttctggcatccaggtgggagagcaaagcacagtgcaagattctgctaccccctcacccccaccgcctccccctcagccctccacggagcgccccaggacttccgcttacatcaggctccgacagcgggtcagttaccccacagctgagtgctgccagcaccttgggatcctgtgcctttgcagccgctgctctggcactcgagttccttccctcttgccacaccaggacagtgtcccccctgcttctgccagagctactaccccttccttttcttttgtacagaccgagcccttccatcccccggagcaggcctcgtcaacgcagcaggaccagggcctcctgaaccggccgtctgccttcagtacagtccagagcagcactgccggcaacacgctccgcaacctcagtctgggtcctacccgccgctctttgggagggcctctgtctagccacccttctaggtatcaccgagaaatagctcctgggttgacaggatctgagtggacccggacagtactcagtctgaactcccgctctgaggcggaatccatgcccccgcccagaaccagtgcctcttcggtgagtttgctgtctgtgctgagacagcaggaaggtggctctcaggcatctgtgtacacttcagccacagaagggaggggttttccggcatcagggttggcaactgagtcagatggagggaatggctccagccaaaacaactcgggcagcattcgccatgagcttcagtgtgacctgagacgcttctttctggagtatgaccggcttcaggagctggatcagagcctgagtggggaagctccccagacccaacaggcccaggaaatgctcaacaataacattgaatctgagaggccaggcccttcccaccagcccaccccacacagcagtgagaacaactccaacctgtcccgtggccacctgaatcgctgtcgtgcttgccacaatctcctgaccttcaacaacgataccctgcgctgggaaagaaccacacctaactactcctctggcgaggctagttcctcttggcaggtccccagctcctttgagagtgtgccatcaagtggcagccagttgccacctctcgagcggactgagggccaaacgcccagctccagcaggctggagttgagcagctctgctagtccgcaggaggagaggactgtgggggtggcctttaaccaggagacaggccactgggaaagaatttacacccagtccagcagatctggaactgtgtcacaggaggccttacatcaggatatgcctgaggagagctctgaggaggattcactcaggaggaggctgctggaatcttccctcatttcattatcccgttatgatggagcaggatccagagagcacccaatttacccagacccagcgagggacaatggtgacagatccaggcaccgagctccacgcaatgcccggatgtctgcaccttcgcttggacgctttgtcccaaggcgtttcttgctgcctgagtacttgccttatgctgggatttttcatgaacgtggacagcctggcttggctactcactcttctgttaacagggtcctggcaggggcagtgatcggtgatggacagtctgctgtggccagtaacattgccaatactacctaccggctccagtggtgggacttcactaagtttgacctccctgaaatcagtaatgcttccgtgaatgtgctggtgcagaactgcaagatctacaatgatgccagctgtgacatttctgcagatggccagctcctggcagctttcatccccagcagccagaggggctttcctgatgaaggcatcctggcagtgtactccctggccccccataacctgggcgaaatgctctacaccaagcgatttggtcccaatgccatttcggtgagcctgtccccaatgggcagatatgtaatggtgggcttggcctcacgaaggatcctgctgcacccctccacagagcacatggtggcccaggtcttcaggctgcaacaggcccatggtggagagacctccatgaggagagttttcaacgtcctttatcccatgcctgccgaccagcggagacatgtcagtatcaactctgcccgttggctgcctgagccagggcttggcttggcctatggtactaacaaaggagacctggtgatctgccgaccagaggccttaaactctggtgttgagtactactgggaccagctgaacgagacggtcttcactgtccattccaacagcaggagcagcgagcggcctggaaccagcagagccacatggaggacagacagagacatggggctgatgaatgccattgggcttcagccccggaaccctgccacctcagtgacatctcagggcacccagactctggcccttcagctgcagaatgccgaaacacagactgagagggaggtgccggagccagggacagccgcctcaggtcctggtgaaggtgagggttcagagtatggtgccagtggagaagatgcgctcagcaggatccagaggctgatggcggagggcggcatgacagccgtggtgcagcgggagcagagcaccaccatggcctccatgggcggcttcggcaacaacatcatcgtcagccaccgcattcaccgcagctctcagacgggcactgaacctggtgccgcccacacctcctcaccccagccctccacctctcggggactgctcccagaggccgggcaactggcagagcgaggcctaagcccccggacagcttcctgggaccagcctggtacccctgggcgggagccaacccagccaaccctgccctcttcctcccctgtccccattcctgtttcccttcccagcgctgagggaccaaccctccactgcgagttgaccaataacaaccaccttctggatggtggcagcagcaggggggacgctgcaggccctaggggagaaccacggaacaggtagagacaaacgttgcactggtgcctcccctcgaaccgccaagcagaaaccggacctcacagctgactgggaactggacatgtggaagagctgctggctgcatcagggaacaggaggaggaagagggtcagggtggagaggaagatcagtcagtgggcacaagacagtcaaatgggcaaggcctgcctcggggaactagaaccttccaggatctggagcccgggagagccacactgtgggcttaatgtgaatagaggaacaagtgggtatctctgccaggcaccccactttctcctagtaacatgggctcaggggactcagccctggacagagagcctccagagagtgaacagtcttccagatctgggccaatcatcctggacagaggcccgcgaggcagctttgccctgtccacctgttgggtgggcagagccaccaggaacccagacaccacctccaactctgagccttccagagcttcagcctctcttcgtcgtcttaccccactgaaaccaacagggatcgggccaggctcccagattcttgaggacagggacttcggcatttactaatgggggactactgtggggtaagggggcgcctgcttgcctgatacaggatggggtcaagggacagtgggcaggtcctcactcaggagtggggggtgtaggctggccagcccccagggcttgtccaccagtcttctccccgcaaggccctcagagcagcgcctgtgggtgtcagtattacctgagcctaggccaaagctagcccaaggctggggaaggggaggagactccaggtcagaatgtgaggtctcagtctgtgatttaaggtgttgcatgtggactcttaactgtacgtgtagtttctagtggagaaatcaaggctctgatcattttgtttttagtatgaaaatgtgatttcctttctgtttgtaactcatcatagaaacattgtggtgggaggagaggggatagtctacagctaatgagggaaacaccaaagatcacatcattaaaatgatgacatgcccctc

SEQ ID NO: 112475 - DNA, 5067 bp, Artificial Sequence
  derived and/or modified sequence
tcttgcttgatgtctcctgagcggcggcggcgccgggtcgagggctgagttgtccgcgaggccccgcgctcaagccgccttctcctgccggtcggtagaacggaccccttcctttattcctgtctcctctttctttttccctgtggctcagcccgttcgctggactgcaaaccgagctcccgtctgccttgcagatttccatgaggacaacttacaaggacctgtatggcctcattttagctgcttcagtgtgttggagctgttacttgctccttcatttcctgggcctggtgtgacagtggctactgagcgccatgaaggttgtcccagaaaagaatgctgtccggatactctgggggcgagaacggggtgctcgggccatgggagctcagcggcttctgcaggagctggtagaagataaaacccggtggatgaaatgggagggcaagagagtagaactgccggatagtccacgctctaccttcttattggccttcagcccagacaggactctcttagcctccacccatgtgaaccataatatctatattacggaggtgaagactggcaagtgtgttcattccctgattggacaccgccgtactccatggtgtgtcacttttcatcccaccatctcaggccttattgcttctggctgcctagatggggaggttaggatttgggatttacacggtggcagtgaaagctggttcacagatagcaacaatgccattgcctccctggctttccaccctacggctcagctcctgctgattgccactgccaatgagatccacttctgggactggagtcgacgggaaccctttgctgtggtgaagacagctagtgagatggaacgggtccgtctggtgagatttgatccacttggacactacttactcacagcaattgttaacccctctaatcaacagggtgatgacgaaccagagatccccatagatggaacagaattatcccactaccgtcagcgtgccctcctgcaatcacagccagttcgccggacgcctctcctccacaatttcctgcacatgctgtcctcccgctcttctggcatccaggtgggagagcaaagcacagtgcaagattctgctaccccctcacccccaccgcctccccctcagccctccacggagcgccccaggacttccgcttacatcaggctccgacagcgggtcagttaccccacagctgagtgctgccagcaccttgggatcctgtgcctttgcagccgctgctctggcactcgagttccttccctcttgccacaccaggacagtgtcccccctgcttctgccagagctactaccccttccttttcttttgtacagaccgagcccttccatcccccggagcaggcctcgtcaacgcagcaggaccagggcctcctgaaccggccgtctgccttcagtacagtccagagcagcactgccggcaacacgctccgcaacctcagtctgggtcctacccgccgctctttgggagggcctctgtctagccacccttctaggtatcaccgagaaatagctcctgggttgacaggatctgagtggacccggacagtactcagtctgaactcccgctctgaggcggaatccatgcccccgcccagaaccagtgcctcttcggtgagtttgctgtctgtgctgagacagcaggaaggtggctctcaggcatctgtgtacacttcagccacagaagggaggggttttccggcatcagggttggcaactgagtcagatggagggaatggctccagccaaaacaactcgggcagcattcgccatgagcttcagtgtgacctgagacgcttctttctggagtatgaccggcttcaggagctggatcagagcctgagtggggaagctccccagacccaacaggcccaggaaatgctcaacaataacattgaatctgagaggccaggcccttcccaccagcccaccccacacagcagtgagaacaactccaacctgtcccgtggccacctgaatcgctgtcgtgcttgccacaatctcctgaccttcaacaacgataccctgcgctgggaaagaaccacacctaactactcctctggcgaggctagttcctcttggcaggtccccagctcctttgagagtgtgccatcaagtggcagccagttgccacctctcgagcggactgagggccaaacgcccagctccagcaggctggagttgagcagctctgctagtccgcaggaggagaggactgtgggggtggcctttaaccaggagacaggccactgggaaagaatttacacccagtccagcagatctggaactgtgtcacaggaggccttacatcaggatatgcctgaggagagctctgaggaggattcactcaggaggaggctgctggaatcttccctcatttcattatcccgttatgatggagcaggatccagagagcacccaatttacccagacccagcgagggacaatggtgacagatccaggcaccgagctccacgcaatgcccggatgtctgcaccttcgcttggacgctttgtcccaaggcgtttcttgctgcctgagtacttgccttatgctgggatttttcatgaacgtggacagcctggcttggctactcactcttctgttaacagggtcctggcaggggcagtgatcggtgatggacagtctgctgtggccagtaacattgccaatactacctaccggctccagtggtgggacttcactaagtttgacctccctgaaatcagtaatgcttccgtgaatgtgctggtgcagaactgcaagatctacaatgatgccagctgtgacatttctgcagatggccagctcctggcagctttcatccccagcagccagaggggctttcctgatgaaggcatcctggcagtgtactccctggccccccataacctgggcgaaatgctctacaccaagcgatttggtcccaatgccatttcggtgagcctgtccccaatgggcagatatgtaatggtgggcttggcctcacgaaggatcctgctgcacccctccacagagcacatggtggcccaggtcttcaggctgcaacaggcccatggtggagagacctccatgaggagagttttcaacgtcctttatcccatgcctgccgaccagcggagacatgtcagtatcaactctgcccgttggctgcctgagccagggcttggcttggcctatggtactaacaaaggagacctggtgatctgccgaccagaggccttaaactctggtgttgagtactactgggaccagctgaacgagacggtcttcactgtccattccaacagcaggagcagcgagcggcctggaaccagcagagccacatggaggacagacagagacatggggctgatgaatgccattgggcttcagccccggaaccctgccacctcagtgacatctcagggcacccagactctggcccttcagctgcagaatgccgaaacacagactgagagggaggtgccggagccagggacagccgcctcaggtcctggtgaaggtgagggttcagagtatggtgccagtggagaagatgcgctcagcaggatccagaggctgatggcggagggcggcatgacagccgtggtgcagcgggagcagagcaccaccatggcctccatgggcggcttcggcaacaacatcatcgtcagccaccgcattcaccgcagctctcagacgggcactgaacctggtgccgcccacacctcctcaccccagccctccacctctcggggactgctcccagaggccgggcaactggcagagcgaggcctaagcccccggacagcttcctgggaccagcctggtacccctgggcgggagccaacccagccaaccctgccctcttcctcccctgtccccattcctgtttcccttcccagcgctgagggaccaaccctccactgcgagttgaccaataacaaccaccttctggatggtggcagcagcaggggggacgctgcaggccctaggggagaaccacggaacaggtagagacaaacgttgcactggtgcctcccctcgaaccgccaagcagaaaccggacctcacagctgactgggaactggacatgtggaagagctgctggctgcatcagggaacaggaggaggaagagggtcagggtggagaggaagatcagtcagtgggcacaagacagtcaaatgggcaaggcctgcctcggggaactagaaccttccaggatctggagcccgggagagccacactgtgggcttaatgtgaatagaggaacaagtgggtatctctgccaggcaccccactttctcctagtaacatgggctcaggggactcagccctggacagagagcctccagagagtgaacagtcttccagatctgggccaatcatcctggacagaggcccgcgaggcagctttgccctgtccacctgttgggtgggcagagccaccaggaacccagacaccacctccaactctgagccttccagagcttcagcctctcttcgtcgtcttaccccactgaaaccaacagggatcgggccaggctcccagattcttgaggacagggacttcggcatttactaatgggggactactgtggggtaagggggcgcctgcttgcctgatacaggatggggtcaagggacagtgggcaggtcctcactcaggagtggggggtgtaggctggccagcccccagggcttgtccaccagtcttctccccgcaaggccctcagagcagcgcctgtgggtgtcagtattacctgagcctaggccaaagctagcccaaggctggggaaggggaggagactccaggtcagaatgtgaggtctcagtctgtgatttaaggtgttgcatgtggactcttaactgtacgtgtagtttctagtggagaaatcaaggctctgatcattttgtttttagtatgaaaatgtgatttcctttctgtttgtaactcatcatagaaacattgtggtgggaggagaggggatagtctacagctaatgagggaaacaccaaagatcacatcattaaaatgatgacatgcccctc

SEQ ID NO: 112476 - DNA, 3717 bp, Artificial Sequence
  derived and/or modified sequence
atgaaggtggtgcccgagaagaacgccgtgagaatcctgtggggcagagagagaggcgccagagccatgggcgcccagagactgctgcaggagctggtggaggacaagaccagatggatgaagtgggagggcaagagagtggagctgcccgacagccccagaagcaccttcctgctggccttcagccccgacagaaccctgctggccagcacccacgtgaaccacaacatctacatcaccgaggtgaagaccggcaagtgcgtgcacagcctgatcggccacagaagaaccccctggtgcgtgaccttccaccccaccatcagcggcctgatcgccagcggctgcctggacggcgaggtgagaatctgggacctgcacggcggcagcgagagctggttcaccgacagcaacaacgccatcgccagcctggccttccaccccaccgcccagctgctgctgatcgccaccgccaacgagatccacttctgggactggagcagaagagagcccttcgccgtggtgaagaccgccagcgagatggagagagtgagactggtgagattcgaccccctgggccactacctgctgaccgccatcgtgaaccccagcaaccagcagggcgacgacgagcccgagatccccatcgacggcaccgagctgagccactacagacagagagccctgctgcagagccagcccgtgagaagaacccccctgctgcacaacttcctgcacatgctgagcagcagaagcagcggcatccaggtgggcgagcagagcaccgtgcaggacagcgccacccccagccccccccccccccccccccagcccagcaccgagagacccagaaccagcgcctacatcagactgagacagagagtgagctaccccaccgccgagtgctgccagcacctgggcatcctgtgcctgtgcagcagatgcagcggcaccagagtgcccagcctgctgccccaccaggacagcgtgccccccgccagcgccagagccaccacccccagcttcagcttcgtgcagaccgagcccttccacccccccgagcaggccagcagcacccagcaggaccagggcctgctgaacagacccagcgccttcagcaccgtgcagagcagcaccgccggcaacaccctgagaaacctgagcctgggccccaccagaagaagcctgggcggccccctgagcagccaccccagcagataccacagagagatcgcccccggcctgaccggcagcgagtggaccagaaccgtgctgagcctgaacagcagaagcgaggccgagagcatgcccccccccagaaccagcgccagcagcgtgagcctgctgagcgtgctgagacagcaggagggcggcagccaggccagcgtgtacaccagcgccaccgagggcagaggcttccccgccagcggcctggccaccgagagcgacggcggcaacggcagcagccagaacaacagcggcagcatcagacacgagctgcagtgcgacctgagaagattcttcctggagtacgacagactgcaggagctggaccagagcctgagcggcgaggccccccagacccagcaggcccaggagatgctgaacaacaacatcgagagcgagagacccggccccagccaccagcccaccccccacagcagcgagaacaacagcaacctgagcagaggccacctgaacagatgcagagcctgccacaacctgctgaccttcaacaacgacaccctgagatgggagagaaccacccccaactacagcagcggcgaggccagcagcagctggcaggtgcccagcagcttcgagagcgtgcccagcagcggcagccagctgccccccctggagagaaccgagggccagacccccagcagcagcagactggagctgagcagcagcgccagcccccaggaggagagaaccgtgggcgtggccttcaaccaggagaccggccactgggagagaatctacacccagagcagcagaagcggcaccgtgagccaggaggccctgcaccaggacatgcccgaggagagcagcgaggaggacagcctgagaagaagactgctggagagcagcctgatcagcctgagcagatacgacggcgccggcagcagagagcaccccatctaccccgaccccgccagagacaacggcgacagaagcagacacagagcccccagaaacgccagaatgagcgcccccagcctgggcagattcgtgcccagaagattcctgctgcccgagtacctgccctacgccggcatcttccacgagagaggccagcccggcctggccacccacagcagcgtgaacagagtgctggccggcgccgtgatcggcgacggccagagcgccgtggccagcaacatcgccaacaccacctacagactgcagtggtgggacttcaccaagttcgacctgcccgagatcagcaacgccagcgtgaacgtgctggtgcagaactgcaagatctacaacgacgccagctgcgacatcagcgccgacggccagctgctggccgccttcatccccagcagccagagaggcttccccgacgagggcatcctggccgtgtacagcctggccccccacaacctgggcgagatgctgtacaccaagagattcggccccaacgccatcagcgtgagcctgagccccatgggcagatacgtgatggtgggcctggccagcagaagaatcctgctgcaccccagcaccgagcacatggtggcccaggtgttcagactgcagcaggcccacggcggcgagaccagcatgagaagagtgttcaacgtgctgtaccccatgcccgccgaccagagaagacacgtgagcatcaacagcgccagatggctgcccgagcccggcctgggcctggcctacggcaccaacaagggcgacctggtgatctgcagacccgaggccctgaacagcggcgtggagtactactgggaccagctgaacgagaccgtgttcaccgtgcacagcaacagcagaagcagcgagagacccggcaccagcagagccacctggagaaccgacagagacatgggcctgatgaacgccatcggcctgcagcccagaaaccccgccaccagcgtgaccagccagggcacccagaccctggccctgcagctgcagaacgccgagacccagaccgagagagaggtgcccgagcccggcaccgccgccagcggccccggcgagggcgagggcagcgagtacggcgccagcggcgaggacgccctgagcagaatccagagactgatggccgagggcggcatgaccgccgtggtgcagagagagcagagcaccaccatggccagcatgggcggcttcggcaacaacatcatcgtgagccacagaatccacagaagcagccagaccggcaccgagcccggcgccgcccacaccagcagcccccagcccagcaccagcagaggcctgctgcccgaggccggccagctggccgagagaggcctgagccccagaaccgccagctgggaccagcccggcacccccggcagagagcccacccagcccaccctgcccagcagcagccccgtgcccatccccgtgagcctgcccagcgccgagggccccaccctgcactgcgagctgaccaacaacaaccacctgctggacggcggcagcagcagaggcgacgccgccggccccagaggcgagcccagaaacagatag

SEQ ID NO: 112477 - protein, 233 aa, Artificial Sequence
  derived and/or modified sequence
MAAPVVTAPGRALLRAGAGRLLRGGVQELLRPRHEGNAPDLACNFSLSQNRGTVIVERWWKVPLAGEGRKPRLHRRHRVYKLVEDTKHRPKENLELILTQSVENVGVRGDLVSVKKSLGRNRLLPQGLAVYASPENKKLFEEEKLLRQEGKLEKIQTKAGEALGVVVAPHTLKLPEEPITRWGEYWCEVTVNGLDTVRVPMSVVNFEKPKTKRYKYWLAQQAAKAMAPTSPQI

SEQ ID NO: 112478 - DNA, 261 bp, Artificial Sequence
  derived and/or modified sequence
gcgcctcggcccgggccttactctccaccgactgcgtcaggatgagctccaggttttctttgggccgatgcttcgtgtcctccaccagcttatagacgcgatgtcgccggtgcaggcgcggcttccggccctccccggccagcggtaccttccaccagcgctccacgatgaccgtgccctggcggccaggaaagcgacgcatcacttataaggaagaggaggacttgacactccagccccgttcctgcctccagtgctcct

SEQ ID NO: 112479 - DNA, 702 bp, Artificial Sequence
  derived and/or modified sequence
atggcagcacctgtggtgactgctcccgggcgggccctccttcgcgctggcgcgggacgcttgcttagggggggagtccaggagctcctccggccgaggcatgaggggaacgcccctgacctggcctgtaacttctctctctctcagaacaggggtaccgttatcgtggaaaggtggtggaaggtgccactggcgggcgaggggcggaagccaagattacaccgccgccaccgtgtgtataagttggtagaggacacaaaacacagaccaaaagagaatctcgagctgatcctcacccagagcgtagagaacgtgggtgttcggggtgatctggtgtccgtgaagaaatcccttgggcgcaataggttgctgccccaggggctcgctgtgtacgcgtcccccgaaaataaaaagctgttcgaggaagagaagttgctgagacaggagggcaagctggagaagatccaaacaaaggccggcgaggctctgggtgtggtggtcgccccccacacactgaaactgccagaagagccaattacgcgctggggcgaatattggtgcgaggtaaccgttaatggcctggacacagtgcgagtgcccatgtctgtggtgaacttcgaaaagcctaaaaccaaacgctacaagtactggctggctcagcaagcagccaaggctatggctccaacatcaccacagatatag

SEQ ID NO: 112480 - DNA, 702 bp, Artificial Sequence
  derived and/or modified sequence
atggccgcccctgtggtgacagcccctggccgggccctgctgcgggccggggccggccgcctgctgcggggcggcgtgcaggagctgctgcggcccaggcatgagggcaatgccccagacctggcctgcaacttcagcctgagccagaacagaggaacagtgattgtggagcgctggtggaaggtgcccctggccggggagggcaggaagccccggctgcacagaagacaccgggtgtacaagctggtggaggacaccaagcaccggcccaaggagaacctggagctgatcctgacccagagcgtggagaatgtgggcgtgcggggggacctggtgtctgtgaagaagagcctgggcaggaaccggctgctgccccagggcctggccgtgtatgccagccctgagaacaagaagctgtttgaggaggagaagctgctgcggcaggagggcaagctggagaagatccagaccaaggccggggaggccctgggcgtggtggtggccccccacaccctgaagctgcctgaggagcccatcacccgctggggcgagtactggtgtgaggtgacagtgaatggcctggacacagtgcgggtgcccatgtctgtggtgaactttgagaagcccaagaccaagcgctacaagtactggctggcccagcaggccgccaaggccatggcccccaccagcccccagatctag

SEQ ID NO: 112481 - DNA, 882 bp, Artificial Sequence
  derived and/or modified sequence
tgaacatggcggcgcccgttgtcacggccccgggcagagctctgctgcgggcgggcgctggacggctgcttcggggaggcgtccaggagctactgcggccgcgacatgaagggaacgcccctgacctggcctgcaacttcagcctttctcaaaatcggggcacggtcatcgtggagcgctggtggaaggtaccgctggccggggagggccggaagccgcgcctgcaccggcgacatcgcgtctataagctggtggaggacacgaagcatcggcccaaagaaaacctggagctcatcctgacgcagtcggtggagaatgttggagtccggggtgacctggtctcagtgaagaaatctttaggccggaatcgactccttcctcagggactggctgtatatgcatcccctgaaaacaagaagctgtttgaagaggagaaattgctgagacaagaaggaaaattagagaagatccagaccaaggcaggtgaggcgcttggtgttgtggttgccccacatacattaaagttaccagaagagcctatcacacggtggggcgagtattggtgtgaggtgacggtaaatgggcttgatactgtgagagtgcctatgtctgtcgtgaactttgagaagcccaagaccaaaagatataagtactggttagcccagcaagctgccaaggctatggcccccaccagcccccagatctaaatctactctccctccaaggcagcaaagcagaatcgggagcagtggagcagaaatgtgcaagcaccctgatctcactcccagctctgaccaaatacagaattttagagaacatctgaagacatcagactgcactgcgtatacatgttgaattcttcatttttgccatctttaactg

SEQ ID NO: 112482 - DNA, 702 bp, Artificial Sequence
  derived and/or modified sequence
atggccgcccccgtggtgaccgcccccggccgggccctgctgcgggctggcgccggtagattactacggggaggagtgcaagagctgctgaggcccagacatgagggtaacgcccctgatctcgcctgtaacttctctctgtcacagaaccggggaaccgttattgtggagaggtggtggaaggtccctctcgccggtgaaggacggaaaccaagactgcacagaaggcatcgagtgtataagctggttgaagacactaagcatcgaccaaaagagaacctggagctcatcttgactcagagcgtcgaaaacgtgggagtgcgaggagacctcgtgtcagtgaagaagtctttaggaaggaatcgcctcttaccacaggggctggccgtctacgccagccctgagaataaaaaactgtttgaggaagagaaactgttgcggcaagaaggtaaacttgagaaaattcaaacaaaggcaggagaagctctcggtgtcgtggttgccccacataccctcaagctgcctgaggaacctatcactaggtggggggagtactggtgtgaggtgacggttaacggtttagacacagtgcgggttcccatgtctgtagtcaattttgagaagccaaagacaaaaaggtacaaatactggctggcacaacaagctgctaaagcgatggcaccaacctccccccagatctag

SEQ ID NO: 112483 - DNA, 702 bp, Artificial Sequence
  derived and/or modified sequence
atggctgcgccagtcgttactgccccaggcagagcattgctgcgcgctggtgcaggccgactgcttaggggcggagtacaagaactccttagaccgcgtcacgaggggaacgcgccagacctcgcctgcaatttttctctgagtcagaaccggggaaccgtcatcgtcgagcgctggtggaaagtcccgctggccggtgaaggtaggaaaccaaggctgcatcgacgtcatagagtatacaaactggtggaggataccaagcaccggcctaaagaaaacttagaactcatcctcacacagagcgtcgaaaatgtgggcgtacggggagatctggtgagcgttaaaaagagcctgggcagaaaccggctcctgccccaggggcttgcagtatacgcctcccccgaaaacaagaaactgttcgaagaagagaaacttctgcgacaggaggggaagttggaaaaaatacagaccaaggcgggagaggcgctgggagttgtcgttgctccacacactctgaaacttcctgaggaacccataaccagatggggggaatactggtgtgaggtcactgtaaatggactggacactgttagggtgcccatgagcgtggtcaacttcgagaagccaaaaacaaagcgctacaaatactggctggctcaacaggcagccaaggcgatggcaccaaccagcccccagatctag

SEQ ID NO: 112484 - DNA, 702 bp, Artificial Sequence
  derived and/or modified sequence
atggccgcccccgtggtgaccgcccccggcagagccctgctgagagccggcgccggcagactgctgagaggcggcgtgcaggagctgctgagacccagacacgagggcaacgcccccgacctggcctgcaacttcagcctgagccagaacagaggcaccgtgatcgtggagagatggtggaaggtgcccctggccggcgagggcagaaagcccagactgcacagaagacacagagtgtacaagctggtggaggacaccaagcacagacccaaggagaacctggagctgatcctgacccagagcgtggagaacgtgggcgtgagaggcgacctggtgagcgtgaagaagagcctgggcagaaacagactgctgccccagggcctggccgtgtacgccagccccgagaacaagaagctgttcgaggaggagaagctgctgagacaggagggcaagctggagaagatccagaccaaggccggcgaggccctgggcgtggtggtggccccccacaccctgaagctgcccgaggagcccatcaccagatggggcgagtactggtgcgaggtgaccgtgaacggcctggacaccgtgagagtgcccatgagcgtggtgaacttcgagaagcccaagaccaagagatacaagtactggctggcccagcaggccgccaaggccatggcccccaccagcccccagatctag

SEQ ID NO: 112485 - protein, 238 aa, Artificial Sequence
  derived and/or modified sequence
MAPKKRPETQKTSEIVLRPRNKRSRSPLELEPEAKKLCAKGSGPSRRCDSDCLWVGLAGPQILPPCRSIVRTLHQHKLGRASWPSVQQGLQQSFLHTLDSYRILQKAAPFDRRATSLAWHPTHPSTVAVGSKGGDIMLWNFGIKDKPTFIKGAAWHPRYNLIVVGRYPDPNFKSCTPYELRTIDVFDGNSGKMMCQLYDPESSGISSLNEFNPMGDTLASAMGYHILIWSQEEARTRK

SEQ ID NO: 112486 - DNA, 717 bp, Artificial Sequence
  derived and/or modified sequence
atggcccccaagaagagacccgagacccagaagaccagcgagatcgtgctgagacccagaaacaagagaagcagaagccccctggagctggagcccgaggccaagaagctgtgcgccaagggcagcggccccagcagaagatgcgacagcgactgcctgtgggtgggcctggccggcccccagatcctgcccccctgcagaagcatcgtgagaaccctgcaccagcacaagctgggcagagccagctggcccagcgtgcagcagggcctgcagcagagcttcctgcacaccctggacagctacagaatcctgcagaaggccgcccccttcgacagaagagccaccagcctggcctggcaccccacccaccccagcaccgtggccgtgggcagcaagggcggcgacatcatgctgtggaacttcggcatcaaggacaagcccaccttcatcaagggcgccgcctggcaccccagatacaacctgatcgtggtgggcagataccccgaccccaacttcaagagctgcaccccctacgagctgagaaccatcgacgtgttcgacggcaacagcggcaagatgatgtgccagctgtacgaccccgagagcagcggcatcagcagcctgaacgagttcaaccccatgggcgacaccctggccagcgccatgggctaccacatcctgatctggagccaggaggaggccagaaccagaaagtag

SEQ ID NO: 112487 - DNA, 1279 bp, Artificial Sequence
  derived and/or modified sequence
ctccgagacgggtggggccggagctccaagctggtttgaacaagccctgggcatgtttggcgggaagttggcttagctcggctacctgtggccccgcagttttgtagtccccgccttgtttctccccagaggcctctcaatcctccctccatgatcttcgcatagagcacagtaccccttcacacggaggacgcgatggctcccaagaaacgcccagaaacccagaagacctccgagattgtattacgccccaggaacaagaggagcaggagtcccctggagctggagcccgaggccaagaagctctgtgcgaagggctccggtcctagcagaagatgtgactcagactgcctctgggtggggctggctggcccacagatcctgccaccatgccgcagcatcgtcaggaccctccaccagcataagctgggcagagcttcctggccatctgtccagcaggggctccagcagtcctttttgcacactctggattcttaccggatattacaaaaggctgccccctttgacaggagggctacatccttggcgtggcacccaactcaccccagcactgtggctgtgggttccaaagggggagatatcatgctctggaattttggcatcaaggacaaacccaccttcatcaaaggggcagcctggcatcctcgctacaacctcattgttgtgggccgatacccagatcctaatttcaaaagttgtaccccttatgaattgaggacgatcgacgtgttcgatggaaactcagggaagatgatgtgtcagctctatgacccagaatcttctggcatcagttcgcttaatgaattcaatcccatgggggacacgctggcctctgcaatgggttaccacattctcatctggagccaggaggaagccaggacacggaagtgagagacactaaagaaggtgtgggccagacaaggccttggagcccacacatgggatcaagtcctgcaagcagaggtggcgatttgttaaagggccaaaagtatccaaggttagggttggagcaggggtgctgggacctggggcactgtgggactgggacacttttatgttaatgctctggacttgcctccagagactgctccagagttggtgacacagctgtcccaagggcccctctgtatctagcctggaaccaaggttatcttggaactaaatgacttttctcctctcagtgggtggtagcagagggatcaagcagttatttgatttgtgctcacttttgatatggccaataaaaccataccgactg

SEQ ID NO: 112488 - DNA, 717 bp, Artificial Sequence
  derived and/or modified sequence
atggcccccaagaaaaggcccgagactcagaagacttctgagattgtgctgcgccctaggaataaacggtccaggagcccgctggagctcgagcccgaggccaagaagctgtgcgctaagggcagcggtccttcgagacgatgtgattctgactgtttgtgggtaggtctggccggacctcaaattctgcctccttgtcggagcatcgtgcgtaccctacaccagcataagctgggtagggctagctggccaagcgtgcagcaaggtctgcagcagagcttcttgcacacgctcgattcctatcgtattctgcagaaggccgctccattcgaccgtagagccaccagcctggcttggcaccccactcatcccagtactgtcgcagtcggaagcaaggggggcgatatcatgctgtggaacttcggaataaaggacaaacctacttttataaaaggtgccgcttggcacccaaggtacaatctaattgttgtgggtcggtaccctgatccaaactttaaatcctgtaccccatacgaactcagaaccatagacgtgttcgacggcaatagcggtaaaatgatgtgccaattatacgacccagagagttctgggatctcttctctcaacgaatttaaccctatgggcgatacgctcgcctccgccatgggttatcacattctcatttggagccaggaggaagcaaggactcgcaagtag

SEQ ID NO: 112489 - DNA, 717 bp, Artificial Sequence
  derived and/or modified sequence
atggcccccaagaagaggcctgagacccagaagaccagcgagatcgtgctgcggcccaggaacaagaggagccgcagccccctggagctggagcctgaggccaagaagctgtgtgccaagggcagcggccccagccgccgctgtgacagcgactgcctgtgggtgggcctggccggcccccagatcctgcccccctgccgcagcatcgtgaggaccctgcaccagcacaagctgggccgggcctcctggcccagcgtgcagcagggcctgcagcagagcttcctgcacaccctggacagctaccgcatcctgcagaaggccgccccctttgaccggcgggccaccagcctggcctggcaccccacccaccccagcacagtggccgtgggcagcaagggcggggacatcatgctgtggaactttggcatcaaggacaagcccaccttcatcaagggagctgcctggcacccccgctacaacctgattgtggtgggccgctacccagaccccaacttcaagagctgcaccccctatgagctgcggaccattgatgtgtttgatggcaacagcggcaagatgatgtgccagctgtatgaccctgagagcagcggcatcagcagcctgaatgagttcaaccccatgggagacaccctggccagcgccatgggctaccacatcctgatctggagccaggaggaggcccggaccaggaagtag

SEQ ID NO: 112490 - DNA, 717 bp, Artificial Sequence
  derived and/or modified sequence
atggcccccaagaagcggcccgagacccagaagaccagcgagatcgtgttgaggccgcgaaacaaacggtcacgctccccactggaactcgaacccgaggccaagaagctatgtgctaagggctccggaccatctagaagatgtgatagcgattgcctgtgggtgggtctagcggggccccagatcctgccgccatgtcgctccattgtaaggaccttgcatcagcataaactcgggcgtgcatcttggccctcagtgcagcagggcctgcagcagtcttttttacacaccctggactcgtaccgaatactgcagaaggctgccccatttgaccgacgggctacatcactggcctggcacccgactcatccttccaccgttgccgttggatcaaaagggggcgatattatgctttggaactttggaatcaaggacaaacccacgtttatcaagggggcagcatggcatccgcggtacaatcttatcgtggttggcaggtatcctgatcccaactttaaatcatgcactccttatgaattgcgtaccatcgatgtgttcgacggcaatagtggcaaaatgatgtgccagctttacgaccccgaatcctcgggaattagctcactcaatgagtttaaccccatgggtgatacattggcgtcggccatgggctaccacatcctcatttggagtcaagaggaagcacggaccagaaaatag

SEQ ID NO: 112491 - DNA, 717 bp, Artificial Sequence
  derived and/or modified sequence
atggcaccaaaaaagagacctgaaactcagaaaacttcagagattgttctgagacctcgaaacaaacggtccagaagcccactcgaactcgaacctgaggccaagaagttatgtgcaaaagggtccgggccttccagacggtgtgattcggattgtctttgggttggccttgctgggcctcaaatccttccgccatgtaggtccatcgttcgaaccctgcaccaacataaactggggagggcttcgtggcccagcgtgcagcaggggctgcagcagagtttcttgcacaccctggactcctacaggatcctacagaaggctgctcctttcgatcggagggcaaccagtttagcgtggcaccctactcacccttctacagttgccgtcggaagcaagggaggtgacataatgctctggaactttggcattaaggacaaacccacatttattaaaggcgctgcatggcacccgaggtacaatctgattgtcgtgggtagatatcccgaccccaactttaaatcatgcactccctatgaacttcgcaccattgatgtctttgacggcaatagtggcaagatgatgtgccagctctatgaccctgagagtagcggcatctccagtctcaacgaattcaacccgatgggagataccctggcaagcgcaatggggtatcacatactcatctggagtcaggaggaagccaggactcgcaagtag

SEQ ID NO: 112492 - protein, 207 aa, Artificial Sequence
  derived and/or modified sequence
MGIIRFLLLYCPTNILTVCVLERQIFDFLGYQWAPILANFVHIIIVILGLFGTIQYRPRYITGYAVWLVLWVTWNVFVICFYLEAGDLSKETDLILTFNISMHRSWWMENGPGCTVTSVTPAPDWAPEDHRYITVSGCLLEYQYIEVAHSSLQIVLALAGFIYACYVVKCITEEEDSFDFIGGFDSYGYQGPQKTSHLQLQPMYMSK

SEQ ID NO: 112493 - DNA, 624 bp, Artificial Sequence
  derived and/or modified sequence
atggggatcatccgatttctgcttctttactgccccaccaatatcttgactgtgtgtgttctagaacggcagatctttgacttcctcggctaccagtgggcgccaattctggctaactttgtccacattattattgtgatcctgggcctgtttgggaccatccagtaccggccacgctacatcaccgggtacgccgtttggttagtgctttgggtgacatggaacgtgttcgtgatctgcttttacctagaagccggggacctgtctaaggaaaccgacctcattctgacctttaatatttccatgcatagaagttggtggatggagaacgggcccggctgtactgtgaccagcgtgacccccgctccagactgggcacccgaggaccatagatatattactgtgtctggttgtctactggagtaccagtacattgaggtggcgcacagctctctgcagatcgtccttgcactggcaggcttcatatacgcttgctacgtcgtgaagtgtattaccgaggaggaggacagttttgactttataggggggttcgattcctacggatatcaaggtccacagaagacttcccatctccagcttcagcccatgtatatgagcaagtag

SEQ ID NO: 112494 - DNA, 624 bp, Artificial Sequence
  derived and/or modified sequence
atgggcatcatccgcttcctgctgctgtactgccccaccaacatcctgactgtgtgtgtgctggagcggcagatctttgacttcctgggctaccagtgggcccccatcctggccaactttgtgcacatcatcatcgtcatcctgggcctgtttggcaccatccagtaccggccccgctacatcaccggctatgctgtgtggctggtgctgtgggtgacctggaatgtgtttgtgatctgcttctacctggaggccggggacctgagcaaggagacagacctgatcctgaccttcaacatctccatgcaccgctcctggtggatggagaatggacctggctgcaccgtgacctctgtgaccccagccccagactgggcccctgaggaccaccgctacatcaccgtgtctggctgcctgctggagtaccagtacatcgaggtggcccacagcagcctgcagatcgtgctggccctggccggcttcatctatgcctgctacgtggtgaagtgcatcacagaggaggaggacagctttgacttcatcggcggctttgacagctatggctaccagggcccccagaagaccagccacctgcagctgcagcccatgtacatgagcaagtag

SEQ ID NO: 112495 - DNA, 3052 bp, Artificial Sequence
  derived and/or modified sequence
cttatttgtccctctggtatatttacaggtactgaagatggatggggatcattaggtttctcttattatattgtcccacaaatatcttaaccgtttgtgtgctggagaggcaaatatttgacttccttggatatcagtgggcacctatcctggcaaattttgtacatattattatcgtcattcttggtttgtttggaactattcaatatagacctcgttacataacaggatatgctgtctggctagtcctctgggttacgtggaatgtgtttgttatctgcttctatttggaggctggggacctctcaaaggaaacagaccttatcctgacttttaatatatcaatgcaccgatcttggtggatggagaatggaccaggatgtacggtgacgtcagtgacacctgccccagactgggccccagaagaccatcgctacatcacggtctcagggtgtttgctggagtaccagtacatagaagtggctcatagttccctccagattgtcctcgcactggcaggtttcatctacgcctgttatgttgtgaaatgtataactgaagaagaggacagctttgatttcataggtggctttgactcttatggctatcaagggcctcagaagacatctcatttacaactacagcctatgtacatgtcaaaataatacagatgacttcagtatgtcagcccatggacctttcaaagaacttttttcgcagtggcctcctgcatttcatgaagagcaagaagcaactgagtttaaatacatacacgtattaacaaaacaaatgcaaagcctctacatacaacactgacacacacacacacacacacgtgagcacgcacacaccaattccacttgacctcctctttctaactgaaacagacaaatatgcaggacacgcccatcttggatttcctgaaagcaggcccctttctcccaggccttcggaaagttcagaaggagatgtgttgatgcccaacggttgccggccattgctaactcctctgcagcccagcgggttggcctctgtgagctgggaagtcatccaaggcacattagtttgagagctctgtcttctgcactccatacatcttgacagcaccacggctacttaggcaatgtaattgcaaaaacaaacgaaacatgccatgatgaccttgtacccgaagtccgaaatggcagattgtttgccctaaaggctgtaccgtacatacttgccttaacccacctacattgtgtgcccaagaatcccagtgcagacagccccaagccacttcctttaggctaacacactgctattaattctaaatgagttcaagcctgtgtgtttcatgtcaaggaacaagactgaatagctcagcagctccagtgtgtctgtataagaaaagtgccagctgtcagcaaagtgctttaccatagagcctccatggtggcccaaaagagacaagtaacaataacaatatctgtcatctttataattctaaaatatggtcttctgatggggttgggggtgggacagagtaaaacattaatctactaaactcactaatctactggaagcagaaagcagaaatggcttaactcgctgattttatttattgcactctaggtgcttttataagtatctacaattgtcttttactaacacagaaacagctgtggatttctatcaacagaggccaactgaatatgtattagctatgtttactcttttatatctaattcaaattgaagactctacgtaggtgaacttttttttctaacttcagtgtacaagattatttttgggtgggtggggggagcaatagttaccttggtgaaatatttgagatctttttgtggtatttgggggatctgttgtgtgttagagtgtatttcaaccctcctgtattattgtggcagaaaaactgtgctgttaacgtagttggcaacaagatgcctttggaaacttaatagtaggtcaatgtgtttatggaatattctgaactcctaggaaattttgttctatattttaaagcattatttggttttcattagtggaaaacataattagctcaggcttatcaggaactcagatgagtcatattttttcttggatacacctgagacattaaactcaattttttaaaactaacacaccattctttagtgcagtgaaattcaaaagttataaattggcatggagcaagttttttctttgatttctatgaagtttcagttattggattaaactactttagaccttagcccattcggatctacatacaccagttccattactgtgtttgcatggatgtctgtaatatacacacacatatacatttgaaaatgatagaggaacaaagagttatcattggaacataaactataaaaaaagattccagcactcatgcttgaatttcctcagtgggttgtatgtttgtccatacatacatgtataaaataaacaattgcaaacatgtcagtgaaacctcatatgacgcttttatagtgacatgcatgtttaatgtatgagaaaaatatttaccaatgtattgtcctttgagtcctaaaatataaatactatacatgccagaaactattctaatgtgacttttaatgtgactattaaaaatgaggtttcactgtacattcatgctgtgatgcgatttcaccttatagtacatgtatatgggtacagaaaataaaccctcatattcctgctttaagttacagccaagttttcaccaaatcacaactatcatcaccaccaaaattttaaaaaacagtagttgactactaaaaagtaatcagtggacaggtcatttatgggatcagtaagcacagtagtgtgattatatctgggaaaacatctacagttgtacagctgtatcctcctcaaaatccggtgaagaatgctatttttctaggctgagcttttgttataaacttaatattcagaaggcaagggttatgatcctgatgtgtcctttttttttgcatttgttaattctgaatgtatttttaacagaatgatttttttgacttactagtgtaatttgcatttt

SEQ ID NO: 112496 - DNA, 624 bp, Artificial Sequence
  derived and/or modified sequence
atgggcatcatccggttcctgctgctgtactgccccaccaacatccttaccgtgtgcgtactggagagacagatctttgattttctgggatatcagtgggctcctattcttgctaactttgtgcatatcatcatcgtgatcctaggactattcggtaccattcaataccggccaagatacatcaccgggtatgcagtgtggctggtgctgtgggtgacctggaacgtctttgtgatatgtttctatttagaggcaggagatctttcaaaggagactgacctgattctgacgttcaacatcagcatgcaccgaagctggtggatggaaaacggccccgggtgcaccgtaacaagcgtcacacctgctccagattgggcccccgaagaccaccgctacattaccgtgtccgggtgcctgttagagtatcaatacatcgaagtcgcccacagctctcttcaaatcgtcctggccctggctggcttcatctatgcctgctatgtggttaagtgcatcacagaggaggaggattcttttgattttattgggggcttcgacagttatgggtaccaaggaccgcagaaaacaagccatttacagctacagcccatgtatatgtcaaagtag

SEQ ID NO: 112497 - DNA, 624 bp, Artificial Sequence
  derived and/or modified sequence
atgggtattataagattcttgctgctgtactgccccacaaatatacttaccgtctgtgtcctggagaggcagatcttcgattttttgggctatcagtgggcccctatcctggccaacttcgttcatatcatcatagtcatactggggctgtttggtaccatccagtacagaccaagatacatcactggctacgctgtgtggctggtcctgtgggtgacatggaatgtgtttgtcatttgtttctacttggaagctggggacttatctaaagagaccgacctcattcttactttcaacatttcaatgcacaggtcctggtggatggagaacggtccaggatgcaccgtcacgagcgttacaccagctccagactgggctcccgaggatcaccgctacattaccgtgagcggttgcttgcttgagtatcagtatatcgaggtagcacatagttcgctccaaatcgttttagctctcgccggttttatttacgcatgttacgtggtgaagtgtatcacagaggaggaggactcctttgactttattggcggattcgatagttacggctatcagggccctcaaaagacatctcacctgcagttacagcctatgtacatgagcaagtag

SEQ ID NO: 112498 - DNA, 624 bp, Artificial Sequence
  derived and/or modified sequence
atgggcatcatcagattcctgctgctgtactgccccaccaacatcctgaccgtgtgcgtgctggagagacagatcttcgacttcctgggctaccagtgggcccccatcctggccaacttcgtgcacatcatcatcgtgatcctgggcctgttcggcaccatccagtacagacccagatacatcaccggctacgccgtgtggctggtgctgtgggtgacctggaacgtgttcgtgatctgcttctacctggaggccggcgacctgagcaaggagaccgacctgatcctgaccttcaacatcagcatgcacagaagctggtggatggagaacggccccggctgcaccgtgaccagcgtgacccccgcccccgactgggcccccgaggaccacagatacatcaccgtgagcggctgcctgctggagtaccagtacatcgaggtggcccacagcagcctgcagatcgtgctggccctggccggcttcatctacgcctgctacgtggtgaagtgcatcaccgaggaggaggacagcttcgacttcatcggcggcttcgacagctacggctaccagggcccccagaagaccagccacctgcagctgcagcccatgtacatgagcaagtag

SEQ ID NO: 112499 - protein, 1067 aa, Artificial Sequence
  derived and/or modified sequence
MKLKEVDRTAMQAWSPAQNHPIYLATGTSAQQLDATFSTNASLEIFELDLSDPSLDMKSCATFSSSHRYHKLIWGPYKMDSKGDVSGVLIAGGENGNIILYDPSKIIAGDKEVVIAQNDKHTGPVRALDVNIFQTNLVASGANESEIYIWDLNNFATPMTPGAKTQPPEDISCIAWNRQVQHILASASPSGRATVWDLRKNEPIIKVSDHSNRMHCSGLAWHPDVATQMVLASEDDRLPVIQMWDLRFASSPLRVLENHARGILAIAWSMADPELLLSCGKDAKILCSNPNTGEVLYELPTNTQWCFDIQWCPRNPAVLSAASFDGRISVYSIMGGSTDGLRQKQVDKLSSSFGNLDPFGTGQPLPPLQIPQQTAQHSIVLPLKKPPKWIRRPVGASFSFGGKLVTFENVRMPSHQGAEQQQQQHHVFISQVVTEKEFLSRSDQLQQAVQSQGFINYCQKKIDASQTEFEKNVWSFLKVNFEDDSRGKYLELLGYRKEDLGKKHIKEEKEESEFLPSSGGTFNISVSGDIDGLITQALLTGNFESAVDLCLHDNRMADAIILAIAGGQELLARTQKKYFAKSQSKITRLITAVVMKNWKEIVESCDLKNWREALAAVLTYAKPDEFSALCDLLGTRLENEGDSLLQTQACLCYICAGNVEKLVACWTKAQDGSHPLSLQDLIEKVVILRKAVQLTQAMDTSTVGVLLAAKMSQYANLLAAQGSIAAALAFLPDNTNQPNIMQLRDRLCRAQGEPVAGHESPKIPYEKQQLPKGRPGPVAGHHQMPRVQTQQYYPHGENPPPPGFIMHGNVNPNAAGQLPTSPGHMHTQVPPYPQPQRPQNGWNDPPALNRVPKKKKMPENFMPPVPITSPIMNPLGDPQSQMLQQQPSAPVPLSSQSSFPQPHLPGGQPFHGVQQPLGQTGMPPSFSKPNIEGAPGAPIGNTFQHVQSLPTKKITKKPIPDEHLILKTTFEDLIQRCLSSATDPQTKRKLDDASKRLEFLYDKLREQTLSPTITSGLHNIARSIETRNYSEGLTMHTHIVSTSNFSETSAFMPVLKVVLTQANKLGV

SEQ ID NO: 112500 - DNA, 3204 bp, Artificial Sequence
  derived and/or modified sequence
atgaagctgaaggaggtggacagaaccgccatgcaggcctggagccccgcccagaaccaccccatctacctggccaccggcaccagcgcccagcagctggacgccaccttcagcaccaacgccagcctggagatcttcgagctggacctgagcgaccccagcctggacatgaagagctgcgccaccttcagcagcagccacagataccacaagctgatctggggcccctacaagatggacagcaagggcgacgtgagcggcgtgctgatcgccggcggcgagaacggcaacatcatcctgtacgaccccagcaagatcatcgccggcgacaaggaggtggtgatcgcccagaacgacaagcacaccggccccgtgagagccctggacgtgaacatcttccagaccaacctggtggccagcggcgccaacgagagcgagatctacatctgggacctgaacaacttcgccacccccatgacccccggcgccaagacccagccccccgaggacatcagctgcatcgcctggaacagacaggtgcagcacatcctggccagcgccagccccagcggcagagccaccgtgtgggacctgagaaagaacgagcccatcatcaaggtgagcgaccacagcaacagaatgcactgcagcggcctggcctggcaccccgacgtggccacccagatggtgctggccagcgaggacgacagactgcccgtgatccagatgtgggacctgagattcgccagcagccccctgagagtgctggagaaccacgccagaggcatcctggccatcgcctggagcatggccgaccccgagctgctgctgagctgcggcaaggacgccaagatcctgtgcagcaaccccaacaccggcgaggtgctgtacgagctgcccaccaacacccagtggtgcttcgacatccagtggtgccccagaaaccccgccgtgctgagcgccgccagcttcgacggcagaatcagcgtgtacagcatcatgggcggcagcaccgacggcctgagacagaagcaggtggacaagctgagcagcagcttcggcaacctggaccccttcggcaccggccagcccctgccccccctgcagatcccccagcagaccgcccagcacagcatcgtgctgcccctgaagaagccccccaagtggatcagaagacccgtgggcgccagcttcagcttcggcggcaagctggtgaccttcgagaacgtgagaatgcccagccaccagggcgccgagcagcagcagcagcagcaccacgtgttcatcagccaggtggtgaccgagaaggagttcctgagcagaagcgaccagctgcagcaggccgtgcagagccagggcttcatcaactactgccagaagaagatcgacgccagccagaccgagttcgagaagaacgtgtggagcttcctgaaggtgaacttcgaggacgacagcagaggcaagtacctggagctgctgggctacagaaaggaggacctgggcaagaagcacatcaaggaggagaaggaggagagcgagttcctgcccagcagcggcggcaccttcaacatcagcgtgagcggcgacatcgacggcctgatcacccaggccctgctgaccggcaacttcgagagcgccgtggacctgtgcctgcacgacaacagaatggccgacgccatcatcctggccatcgccggcggccaggagctgctggccagaacccagaagaagtacttcgccaagagccagagcaagatcaccagactgatcaccgccgtggtgatgaagaactggaaggagatcgtggagagctgcgacctgaagaactggagagaggccctggccgccgtgctgacctacgccaagcccgacgagttcagcgccctgtgcgacctgctgggcaccagactggagaacgagggcgacagcctgctgcagacccaggcctgcctgtgctacatctgcgccggcaacgtggagaagctggtggcctgctggaccaaggcccaggacggcagccaccccctgagcctgcaggacctgatcgagaaggtggtgatcctgagaaaggccgtgcagctgacccaggccatggacaccagcaccgtgggcgtgctgctggccgccaagatgagccagtacgccaacctgctggccgcccagggcagcatcgccgccgccctggccttcctgcccgacaacaccaaccagcccaacatcatgcagctgagagacagactgtgcagagcccagggcgagcccgtggccggccacgagagccccaagatcccctacgagaagcagcagctgcccaagggcagacccggccccgtggccggccaccaccagatgcccagagtgcagacccagcagtactacccccacggcgagaacccccccccccccggcttcatcatgcacggcaacgtgaaccccaacgccgccggccagctgcccaccagccccggccacatgcacacccaggtgcccccctacccccagccccagagaccccagaacggctggaacgacccccccgccctgaacagagtgcccaagaagaagaagatgcccgagaacttcatgccccccgtgcccatcaccagccccatcatgaaccccctgggcgacccccagagccagatgctgcagcagcagcccagcgcccccgtgcccctgagcagccagagcagcttcccccagccccacctgcccggcggccagcccttccacggcgtgcagcagcccctgggccagaccggcatgccccccagcttcagcaagcccaacatcgagggcgcccccggcgcccccatcggcaacaccttccagcacgtgcagagcctgcccaccaagaagatcaccaagaagcccatccccgacgagcacctgatcctgaagaccaccttcgaggacctgatccagagatgcctgagcagcgccaccgacccccagaccaagagaaagctggacgacgccagcaagagactggagttcctgtacgacaagctgagagagcagaccctgagccccaccatcaccagcggcctgcacaacatcgccagaagcatcgagaccagaaactacagcgagggcctgaccatgcacacccacatcgtgagcaccagcaacttcagcgagaccagcgccttcatgcccgtgctgaaggtggtgctgacccaggccaacaagctgggcgtgtag

SEQ ID NO: 112501 - DNA, 498 bp, Artificial Sequence
  derived and/or modified sequence
atgaagctgaaggaggtggacagaaccgccatgcaggcctggagccccgcccagaaccaccccatctacctggccaccggcaccagcgcccagcagctggacgccaccttcagcaccaacgccagcctggagatcttcgagctggacctgagcgaccccagcctggacatgaagagctgcgccaccttcagcagcagccacagataccacaagctgatctggggcccctacaagatggacagcaagggcgacgtgagcggcgtgctgatcgccggcggcgagaacggcaacatcatcctgtacgaccccagcaagatcatcgccggcgacaaggaggtggtgatcgcccagaacgacaagcacaccggccccgtgagagccctggacgtgaacatcttccagaccaacctggtggccagcggcgccaacgagagcgagatctacatctgggacctgaacaacttcgccacccccatgacccccggcgccaagacctag

SEQ ID NO: 112502 - DNA, 501 bp, Artificial Sequence
  derived and/or modified sequence
atgaagctgaaggaggtggacagaaccgccatgcaggcctggagccccgcccagaaccaccccatctacctggccaccggcaccagcgcccagcagctggacgccaccttcagcaccaacgccagcctggagatcttcgagctggacctgagcgaccccagcctggacatgaagagctgcgccaccttcagcagcagccacagataccacaagctgatctggggcccctacaagatggacagcaagggcgacgtgagcggcgtgctgatcgccggcggcgagaacggcaacatcatcctgtacgaccccagcaagatcatcgccggcgacaaggaggtggtgatcgcccagaacgacaagcacaccggccccgtgagagccctggacgtgaacatcttccagaccaacctggtggccagcggcgccaacgagagcgagatctacatctgggacctgaacaacttcgccacccccatgacccccggcgccaagacccagtag

SEQ ID NO: 112503 - DNA, 3204 bp, Artificial Sequence
  derived and/or modified sequence
atgaagttgaaggaggtggacagaaccgcaatgcaagcctggagtccagcacagaatcatccaatttacttagcgacaggtacatccgcacaacagctagatgcgactttcagcaccaacgccagcctggagatcttcgagcttgacttaagcgacccgtctttggatatgaagtcctgcgcaacattttcatcatcccacaggtaccacaagttgatctggggtccctacaaaatggactctaaaggcgatgtgagcggtgtgctaatcgctggcggcgaaaatggcaatattattctgtacgacccctccaagattattgcaggggacaaggaagttgtgatcgctcagaacgacaagcataccggccctgtgagggcgctagacgtcaacatttttcagacaaatctggtggcatcaggagccaatgagagtgagatctatatctgggatctgaacaactttgcaaccccaatgaccccgggagctaaaacacagcccccagaggacatcagctgtatcgcgtggaatcgacaggttcagcacatcctagccagtgcttctcccagcggcagagctacggtctgggatctgcgtaagaatgaaccaatcattaaagtgtcagatcattctaacaggatgcattgttctggtctggcttggcacccagacgtagcaacgcaaatggttctggctagtgaggacgaccgcctgcctgtgatacagatgtgggatctcaggtttgcgagcagccctctgagagttctcgagaatcacgcgcgaggtattctcgccattgcttggagcatggctgatcccgagctgctactgtcgtgcgggaaggacgctaaaattttatgctctaaccctaataccggtgaggtactgtatgagcttcctacaaacactcaatggtgctttgacattcagtggtgcccccggaatccagcagtcctctccgcggccagctttgatgggaggatcagcgtgtactccattatgggcggctccacggatgggctccggcagaagcaagtggataaattgtcctctagctttggcaatctggacccgttcggaactggacagccactgccccccttgcagatacctcagcagaccgcacagcactccatcgtgcttcctcttaaaaagccccctaaatggatccgcaggcccgtgggcgcgtccttctccttcgggggaaaactggtgaccttcgagaatgttaggatgcccagccaccaaggggccgagcaacagcagcaacaacaccatgtgtttataagccaggttgtgaccgaaaaggaatttcttagccgcagcgaccagttgcaacaggccgtgcagagccaaggctttatcaattattgccagaaaaagatcgacgcctcacagaccgaatttgagaaaaacgtgtggagcttcctcaaggtcaactttgaagacgactcgcgaggaaaatacctcgagctgctcggctacagaaaggaagacctgggcaagaaacacataaaagaggagaaggaggagtcggagtttctgccaagctcaggagggacatttaacatctcagtctccggagacatcgacgggctgataacccaagctcttcttacaggaaacttcgagagcgcagtggatctatgtctgcacgataataggatggccgacgcaatcatactcgccatagcaggtggccaagagctgcttgctaggacacagaaaaaatactttgctaaaagccagtcaaagatcactcgcctaataacggccgtggtaatgaaaaactggaaagagatcgtcgagtcttgtgacttgaagaattggcgcgaagccttagccgcagtgctcacatatgcgaaaccagatgagttctccgccttgtgtgatttactcggcacccgactggagaacgagggcgactccctgctgcagacccaggcttgcctgtgctacatttgtgcgggcaatgtggagaaactggtggcctgttggaccaaagcccaagacggcagtcatccgctgagcctacaggatcttatcgagaaagtagtaatattgcgaaaagctgtccagctcactcaggccatggataccagcacagttggagttctgctggccgcaaagatgtcccaatatgcaaacctgctggctgctcaggggagtattgccgccgcccttgcctttctgccagacaacacgaatcaacctaacataatgcagctgagagacaggctctgtagggctcaaggtgaacccgtggcgggacatgaatctccaaagataccttacgaaaaacagcaattacccaagggacggcccggacccgtggcaggacaccaccagatgcccagggtacagactcagcagtactacccacacggtgaaaacccacccccccctggtttcataatgcacggcaatgttaatccgaacgcagccgggcagcttcctaccagtcccggccatatgcacacgcaagtcccaccgtacccccaaccgcagcgcccacaaaacggttggaacgatcctcccgctctgaacagggtgcccaaaaagaagaagatgcccgagaactttatgccgccagtgccaatcacaagtcccatcatgaatcccttgggagatccccagtcccagatgctgcagcagcagccgtcagccccagtccctctgtcaagtcagtctagctttccacagcctcacctcccgggtggacagccctttcacggtgtgcagcagccattgggacagaccggcatgcctcccagcttttccaaacctaacatcgagggcgctccaggggcccctatcggcaacactttccagcatgtccagagtctgcctactaaaaagattacaaagaaaccgatccccgacgagcatctgatactcaaaactactttcgaggatctgatccagcggtgtttgtcatcggcaactgacccccagacaaagaggaagctcgatgatgcatccaagcggttggaattcctttacgataagctgagggagcaaaccctctcccctacaataacaagcgggctgcacaacattgcgcgaagtatagaaacccgaaactattctgagggattgacaatgcacacacacatagttagtacgtcaaatttcagcgaaacctcagcctttatgccggttctaaaggtggttctaactcaggcaaacaaacttggcgtgtag

SEQ ID NO: 112504 - DNA, 498 bp, Artificial Sequence
  derived and/or modified sequence
atgaagcttaaggaggtggacaggactgcaatgcaagcctggagtcctgcacagaatcaccctatctacctagccaccggcacatcagctcagcaacttgacgctactttcagtaccaacgcatccttggagatttttgaactggatttatcagatcccagccttgacatgaagagctgcgccacctttagcagtagccacagatatcacaaattaatttgggggccctacaaaatggactccaagggggacgtcagcggtgtgctgatcgccggaggggaaaatggtaatattatcctgtacgacccgagtaaaattattgcaggcgataaggaagtggtcattgcccagaacgacaagcacaccggacctgtcagggcactagatgtgaacatatttcagaccaacctggtggccagtggggccaacgaatccgagatatacatatgggacctcaacaatttcgcgacaccaatgacccccggcgccaaaacgtag

SEQ ID NO: 112505 - DNA, 501 bp, Artificial Sequence
  derived and/or modified sequence
atgaagctcaaggaggtggatcgcacagccatgcaggcctggtccccggcccaaaatcacccgatctatctagcaacggggacgagtgcgcagcagcttgatgccaccttctcaactaatgcttcgctggagatcttcgaactggatctgagtgatcctagtttggatatgaagagctgcgctactttctccagcagccacagatatcacaaattgatctggggtccatacaagatggattccaaaggtgatgtctctggcgtgttgattgccggaggagagaatggtaacataatcttgtatgacccctccaagatcatcgctggggacaaggaagttgtcattgctcaaaacgataagcacaccgggcccgtaagagccctggacgtgaacattttccaaactaatctggtggcctcaggtgcgaacgagtctgagatctatatctgggacttgaacaactttgccacacccatgaccccaggagcgaaaacccagtag

SEQ ID NO: 112506 - DNA, 3204 bp, Artificial Sequence
  derived and/or modified sequence
atgaagctgaaggaggtggacagaacagccatgcaggcctggagccctgcccagaaccaccccatctacctggccaccggcaccagcgcccagcagctggatgccaccttcagcaccaatgccagcctggagatctttgagctggacctgagtgaccccagcctggacatgaagagctgtgccaccttcagcagcagccaccgctaccacaagctgatctggggcccctacaagatggacagcaaaggagatgtgtctggagtgctgattgctggaggagaaaatggaaacatcatcctgtatgaccccagcaagatcatcgccggggacaaggaggtggtgattgcccagaatgacaagcacacaggccctgtgcgggccctggatgtgaacatcttccagaccaacctggtggccagcggggccaatgaaagtgagatctacatctgggacctgaacaactttgccacccccatgacccctggggccaagacccagcccccagaggacatcagctgcatcgcctggaaccggcaggtgcagcacatcctggccagcgccagccccagcggccgggccaccgtgtgggacctgaggaagaatgagcccatcatcaaggtgtctgaccacagcaacaggatgcactgcagcggcctggcctggcacccagatgtggccacccagatggtgctggcctctgaagatgaccggctgcctgtgatccagatgtgggacctgcgctttgccagcagccccctgcgggtgctggagaaccacgcccggggcatcctggccatcgcctggagcatggctgaccctgagctgctgctgagctgtgggaaggatgccaagatcctgtgcagcaaccccaacacaggagaggtgctgtatgagctgcccaccaacacccagtggtgctttgacatccagtggtgccccaggaacccagctgtgctgtctgctgccagctttgatggccgcatctctgtgtacagcatcatgggcggcagcacagatggcctgcggcagaagcaggtggacaagctgagcagcagctttggaaacctggacccctttggaacaggccagcccctgccccccctgcagatcccccagcagacagcccagcacagcatcgtgctgcccctgaagaagccacccaagtggatcagaagacctgtgggcgccagcttctcctttggaggcaagctggtgacctttgaaaatgtgaggatgcccagccaccagggcgctgagcagcagcagcagcagcaccacgtgttcatcagccaggtggtgacagagaaggagttcctgagcagaagtgaccagctgcagcaggccgtgcagagccagggcttcatcaactactgccagaagaagattgatgccagccagacagaatttgagaagaatgtgtggagcttcctgaaggtgaactttgaagatgacagccggggcaagtacctggagctgctgggctacaggaaggaggacctgggcaagaagcacatcaaggaggagaaggaggagagcgagttcctgcccagcagcggcggcaccttcaacatctctgtgtctggggacattgatggcctcatcacccaggccctgctgaccggcaactttgaatctgctgtggacctgtgcctgcatgacaacaggatggctgatgccatcatcctggccatcgccggcggccaggagctgctggcccggacccagaagaagtactttgccaagagccagagcaagatcaccaggctcatcacagctgtggtgatgaagaactggaaggagatcgtggagagctgtgacctgaagaactggagggaggccctggccgctgtgctgacctacgccaagccagatgagttcagcgccctgtgtgacctgctgggcacccggctggagaatgaaggagacagcctgctgcagacccaggcctgcctgtgctacatctgtgctggaaatgtggagaagctggtggcctgctggaccaaggcccaggacggcagccaccccctgagcctgcaggacctgattgagaaggtggtgatcctgaggaaggctgtgcagctgacccaggccatggacaccagcacagtgggcgtgctgctggccgccaagatgagccagtatgccaacctgctggccgcccagggcagcattgctgctgccctggccttcctgcctgacaacaccaaccagcccaacatcatgcagctgcgggaccggctgtgccgggcccagggcgagcctgtggccggccacgagagccccaagatcccctatgagaagcagcagctgcccaagggccggcccggccctgtggccggccaccaccagatgccccgggtgcagacccagcagtactacccccatggagaaaatcctcctcctcctggcttcatcatgcatggaaatgtgaaccccaatgctgctggccagctgcccaccagccctggccacatgcacacccaggtgcccccctacccccagccccagaggccccagaatggctggaatgaccccccagccctgaacagagtgcccaagaagaagaagatgcctgagaacttcatgcctcctgtgcccatcaccagccccatcatgaaccccctgggggacccccagagccagatgctgcagcagcagcccagcgcccctgtgcccctgagcagccagagcagcttcccccagccccacctgcccggcggccagcccttccatggagtgcagcagcccctgggccagacaggcatgcctccttccttcagcaagcccaacattgaaggagcccctggggcccccatcggcaacaccttccagcacgtgcagagcctgcccaccaagaagatcaccaagaagcccatcccagatgagcacctgatcctgaagaccacctttgaagatctcatccagcgctgcctgagcagcgccacagacccccagaccaagaggaagctggatgatgccagcaagaggctggagttcctgtatgacaagctgcgggagcagaccctgagccccaccatcaccagcggcctgcacaacatcgcccggagcattgagaccaggaactacagcgagggcctgaccatgcacacccacatcgtgtccaccagcaacttcagcgagaccagcgccttcatgcctgtgctgaaggtggtgctgacccaggccaacaagctgggcgtgtag

SEQ ID NO: 112507 - DNA, 498 bp, Artificial Sequence
  derived and/or modified sequence
atgaagctgaaggaggtggacagaacagccatgcaggcctggagccctgcccagaaccaccccatctacctggccaccggcaccagcgcccagcagctggatgccaccttcagcaccaatgccagcctggagatctttgagctggacctgagtgaccccagcctggacatgaagagctgtgccaccttcagcagcagccaccgctaccacaagctgatctggggcccctacaagatggacagcaaaggagatgtgtctggagtgctgattgctggaggagaaaatggaaacatcatcctgtatgaccccagcaagatcatcgccggggacaaggaggtggtgattgcccagaatgacaagcacacaggccctgtgcgggccctggatgtgaacatcttccagaccaacctggtggccagcggggccaatgaaagtgagatctacatctgggacctgaacaactttgccacccccatgacccctggggccaagacctag

SEQ ID NO: 112508 - DNA, 501 bp, Artificial Sequence
  derived and/or modified sequence
atgaagctgaaggaggtggacagaacagccatgcaggcctggagccctgcccagaaccaccccatctacctggccaccggcaccagcgcccagcagctggatgccaccttcagcaccaatgccagcctggagatctttgagctggacctgagtgaccccagcctggacatgaagagctgtgccaccttcagcagcagccaccgctaccacaagctgatctggggcccctacaagatggacagcaaaggagatgtgtctggagtgctgattgctggaggagaaaatggaaacatcatcctgtatgaccccagcaagatcatcgccggggacaaggaggtggtgattgcccagaatgacaagcacacaggccctgtgcgggccctggatgtgaacatcttccagaccaacctggtggccagcggggccaatgaaagtgagatctacatctgggacctgaacaactttgccacccccatgacccctggggccaagacccagtag

SEQ ID NO: 112509 - DNA, 3204 bp, Artificial Sequence
  derived and/or modified sequence
atgaagctgaaggaggtggaccggaccgccatgcaggcctggagcccggcccaaaaccatcccatctatctagcgactggcacatctgctcagcagctggacgctaccttctctacaaacgcctcgctggaaatcttcgagttggatctgagcgatcccagccttgacatgaaaagctgcgcaacattcagcagtagtcatcggtaccataaactcatctggggaccctataagatggattctaagggggatgtgagcggagtgctgatcgccggaggcgaaaatgggaacattatcctgtacgatcccagtaagatcatcgcaggggataaggaggtcgtgatcgcccagaatgataaacacaccggaccagtcagagccctggatgttaatatttttcaaactaatctcgtggccagcggggccaacgagtctgagatatacatctgggatttaaacaactttgccactcccatgactccaggcgcaaagacacagcccccagaggatatctcctgcattgcctggaaccggcaggtgcagcacattctcgcgtctgcctcccccagcggccgggctactgtctgggatctcagaaaaaatgagcctattatcaaagtgagcgatcactcaaaccgtatgcactgctccggacttgcttggcacccagacgtcgccacacaaatggttctggcaagcgaggacgatcgactccctgtaatccagatgtgggaccttagatttgccagcagccctctgagggtcctcgaaaatcacgctcgggggattcttgccatcgcctggtcaatggccgatcccgagcttctgctcagctgtggaaaagatgctaagatactctgtagtaatcctaacacaggtgaggtgctgtatgaactgccaacaaacacacagtggtgtttcgatatacagtggtgccccaggaatcccgcagtgttgtcagcagcctctttcgacggcagaatcagtgtgtacagcatcatgggaggctctactgacggactgcggcagaaacaggtggataaactgtccagctcatttgggaatctagatccattcggcactggacagcccctgccacccttacaaattcctcaacaaaccgcacaacactccatagtgctccctctgaagaaaccaccaaagtggattagacgtcccgtgggcgcttccttcagtttcggagggaagctggtgacattcgagaacgtgagaatgccgagtcaccagggcgcagaacaacagcagcagcaacatcatgtgttcatcagccaagtcgtgacagagaaggaattcctcagtaggtcagatcaacttcagcaagcagtccagagccaaggtttcataaactactgtcagaagaagatcgatgccagccaaactgaattcgaaaagaatgtgtggagcttcttgaaggttaacttcgaagacgactcaagaggaaagtacctcgagctgttagggtaccgcaaggaggacctcggaaagaaacacatcaaggaagaaaaagaggaatccgagtttctccccagctcaggtggcacctttaacatcagtgtaagcggagacatagacggactgatcacacaggccctcctgaccggcaattttgagtcggccgtcgacctttgtctgcacgataacaggatggctgacgccatcatacttgcaatcgctggcggccaggagctcctcgcaagaactcagaaaaaatatttcgctaagagtcaaagtaagatcacacgcctgatcactgcagtggtgatgaaaaattggaaagaaatcgtggagtcctgtgatcttaaaaattggcgcgaggctctggctgccgtactcacctatgcaaaacccgacgaatttagcgctttatgtgatctgctgggaactcgcttggagaacgagggcgattctttgctccaaacacaagcctgcctctgctacatatgtgccggaaatgtcgagaagctggtggcttgctggaccaaagcccaggacggaagccatcccctgagcctgcaggacctcatcgagaaagtggtcatactgcgtaaggccgtgcaacttactcaggcgatggacaccagtacagtgggggtgctgctggctgctaagatgtcccagtatgcaaatctgcttgccgctcagggctcaatcgctgcagccctggcattcctgcccgacaacaccaatcagcctaatatcatgcagctgcgcgatcgcttatgtcgggcacaaggcgagcctgtagctggccacgagagccccaaaataccttacgagaagcagcaactacccaaaggtaggccaggacccgtggccggtcaccaccagatgcccagagtacaaacacaacaatactatccacacggcgaaaatcctccccccccaggatttatcatgcatggcaacgtgaacccgaacgccgccggccaactcccaacttcccccgggcacatgcatacacaggttcctccctatccacagccacagaggccccagaatgggtggaatgacccccctgcactgaaccgtgtccctaagaagaaaaagatgcccgagaatttcatgcctcccgtgcccataacctccccgattatgaatccattgggggaccctcaatcccagatgctccaacaacaaccctccgcccctgtgcccctcagcagccaatcatcatttccacaaccccacctccccggcggacagccctttcatggcgtacagcagcctttgggccagaccggcatgcccccatcattctcaaagcctaatatcgagggcgctccgggtgctcctattggaaataccttccaacacgtacagtctcttccgactaagaaaatcaccaaaaaaccaatacccgacgagcatcttatcctgaaaactaccttcgaggatctgattcaaaggtgcctgtccagcgcgaccgaccctcaaacaaagcgcaagctggatgacgcgtctaagcggctggagtttctgtatgataaactgagagagcagaccttaagtcccactataacgtcagggttacataatatcgcgaggtctattgaaactcggaactactctgagggcctgacgatgcacacacacattgttagcacctctaacttctctgaaacttcagcgtttatgcccgtgttaaaggtggtcctgacccaggctaacaaactgggggtgtag

SEQ ID NO: 112510 - DNA, 498 bp, Artificial Sequence
  derived and/or modified sequence
atgaagctgaaggaggtggaccggaccgccatgcaggcctggagccctgcccagaaccaccccatctacttagcaaccggaaccagtgcgcaacagttggacgctactttctctacaaacgcatccctcgaaatctttgagctggacttgagcgatccttcactcgatatgaagtcatgtgcgaccttcagctcctcgcacaggtaccacaagctaatctggggaccgtataaaatggacagcaagggcgatgtgtctggagtattgattgctggcggggagaatggcaatatcattctctacgacccatctaagatcattgccggagataaagaggttgtcattgctcagaacgacaaacacactgggcccgtaagagcactcgatgtgaatatattccaaaccaaccttgtggcatctggagccaacgagagcgaaatttatatatgggatttgaacaacttcgctacccccatgacaccaggagcgaagacttag

SEQ ID NO: 112511 - DNA, 501 bp, Artificial Sequence
  derived and/or modified sequence
atgaagctgaaggaggtggaccggaccgccatgcaggcctggagcccagcacagaaccacccaatctacctggccacagggacctccgcacagcaactcgatgccaccttctccacaaatgcctctctcgaaatttttgagctcgacctcagcgacccaagcctggacatgaagtcttgcgctaccttctctagctcacaccgatatcataagttaatctggggcccatataagatggatagtaagggagacgtcagtggcgtgctgatcgctggcggagagaatgggaacattattctgtacgatccgtccaaaatcatcgccggagacaaggaggtggtcatcgcacagaatgataaacatacaggaccggtgcgtgctttagatgtgaacatctttcaaactaacctcgtggcctccggtgccaacgagtccgaaatctatatctgggatttgaacaacttcgccactcctatgacccccggcgcaaaaacacaatag

SEQ ID NO: 112512 - DNA, 3204 bp, Artificial Sequence
  derived and/or modified sequence
atgaaactgaaagaggtggaccgcactgctatgcaggcctggtcacccgctcagaaccaccctatttacttggccaccggaaccagtgctcagcagctcgacgcaactttcagcaccaacgcttccctggaaattttcgagctcgacctcagtgacccttcattagacatgaaatcctgcgcgactttctcaagttcccaccgctaccataaattgatttggggcccttataagatggattccaaaggtgatgtgtccggagttctaatcgccggaggtgaaaatggtaacatcatcctgtacgatccaagcaaaattatcgccggagacaaggaggtggtgatcgcgcaaaatgacaaacacacgggcccagtgcgggcactggacgtgaatattttccagacaaatctcgttgcgagcggggctaacgagtccgagatctacatctgggacctgaataactttgctactcctatgacccctggggcaaagacccaaccccctgaggatatctcttgcatcgcatggaataggcaggtacagcatattctggcaagcgcttccccaagtggaagagccactgtgtgggacctgaggaagaacgaacccataataaaggtgtcggatcattcaaacagaatgcactgctccggattagcttggcatccggacgttgccactcaaatggtcttggccagtgaagacgacagactcccggtgattcagatgtgggacttgaggttcgctagttctcccctgagggtcttggagaatcacgctcgagggattctggccatcgcctggagtatggctgacccagaactgctacttagctgcggcaaggacgcgaaaattctgtgtagtaaccccaatactggcgaggtgctgtacgaacttcctactaacacccagtggtgttttgatatccaatggtgccctcggaacccagccgtgctgagtgcggcaagcttcgacggacgcattagcgtctatagtataatgggtgggagcactgacggcttacgccaaaaacaagtggataagttgagctcctcatttgggaacctggaccccttcggaactggacagcccctgcctcccctgcaaatcccacagcagactgctcagcatagtatcgtgctccccttaaaaaaaccaccaaagtggatccgccgacctgtcggcgcatccttttcctttggaggcaaactggtaactttcgagaacgtgcggatgcctagtcatcaaggggctgaacagcagcaacagcagcaccacgtttttatttcacaggtagtgactgaaaaagaattcctcagccgatctgaccagctccagcaagccgtgcagtcacaggggttcatcaactactgtcagaaaaaaattgacgcctctcagactgagttcgaaaaaaatgtgtggagcttcttgaaggtgaacttcgaggacgactcccggggaaaatatcttgagctcttgggctacaggaaagaagacctggggaaaaaacatattaaagaagagaaggaagagtccgagttcctgcctagcagcggcggaacatttaacatctctgtcagtggcgatattgacggactgattactcaagctctgctgacagggaacttcgaatcggctgtggatttgtgtttgcatgacaacaggatggctgacgctatcattcttgccatcgcgggtggacaagaactcctggcacggactcagaaaaagtactttgccaaatcccaatccaaaatcacccgcctcatcactgctgtggtgatgaaaaactggaaagagattgttgaaagttgtgacctcaagaactggcgagaggcactggctgcggttttaacctacgctaaaccagatgagttcagtgcactttgtgacctgttgggcacacggctcgagaatgaaggcgacagcctgctccagactcaggcttgcctttgttatatctgcgccggtaacgtcgaaaagctggtcgcatgttggacaaaagcccaggatggctctcatccactcagtctccaggacctgatcgagaaggtggttatcctgaggaaggcagtacaactcacacaggccatggatacctcaaccgtcggtgtgttactcgccgctaaaatgagccaatacgccaacctgcttgccgctcagggctcgatcgctgcggcactggcgttcctcccagataacaccaaccagccaaacatcatgcagttgagagaccgactctgccgtgcccagggagaacctgtggcgggacatgaaagtcctaagataccatacgagaaacagcaattacctaagggcagaccaggcccagtggccggacatcatcaaatgcctcgagtccagacgcagcagtactatccccacggagagaatcccccaccgcctggattcatcatgcatggcaacgttaatcccaatgccgcaggtcagctgccgacatccccaggccatatgcacacgcaggtacctccctacccacagcctcagcgaccccagaacggatggaacgacccgccagccctcaacagggttcccaaaaaaaagaaaatgcctgagaacttcatgccccctgtgccaattactagtcctataatgaacccattgggggacccacagtcacagatgctgcagcagcagccctccgctcctgtcccacttagttcacaatcatctttcccccagccccaccttcctgggggtcagccatttcatggagtgcaacagccccttggccagacagggatgcctccaagtttctcaaaacctaacattgagggagcccctggggctccgatcggcaatacattccagcatgtccaatccttgcccactaagaagatcacaaagaagccaatcccagatgagcatcttatcctcaaaactacgtttgaggacttgatccagagatgtttgtctagtgcaaccgatcctcagacaaagcggaagctggacgatgcctctaaacgacttgagtttttgtacgacaagttaagggaacaaactctgtctcctactatcacatcaggcctgcataacattgcccgaagcatcgagacccgcaattattccgaaggcttaactatgcacacccacattgtatctacctctaatttctcggaaacctccgccttcatgcctgtgctgaaagtggtactgacccaagcaaataaattgggagtctag

SEQ ID NO: 112513 - DNA, 498 bp, Artificial Sequence
  derived and/or modified sequence
atgaaacttaaggaagtggaccgcaccgccatgcaggcttggagccccgctcagaatcatcccatttaccttgctaccgggacatcagcgcaacagctggatgccacattttcgacaaacgccagcctggagattttcgaattagacctgtccgatccctctttggacatgaaatcctgcgccacttttagctcttctcaccggtaccataaattaatttgggggccttacaaaatggactccaagggagatgtttccggggtgctgatcgccggaggtgagaacggaaacattatactatacgaccccagtaagattatagccggagacaaagaggtggtcatcgcccaaaacgataaacatactggcccagttcgcgctctggatgttaatattttccaaaccaacctggtagcgtctggtgctaacgaaagcgaaatctacatctgggacttgaacaacttcgctacacccatgacacctggcgcaaagacatag

SEQ ID NO: 112514 - DNA, 501 bp, Artificial Sequence
  derived and/or modified sequence
atgaagcttaaggaggtcgatagaacagctatgcaggcctggagtccagctcagaatcaccctatttatctcgccactgggacgtccgcgcagcagctggatgctaccttcagtacaaatgccagccttgaaatctttgagctggacctctcagatccctccctggacatgaagtcttgtgctaccttttctagtagccatagataccataagctgatttggggaccctataagatggattcaaaaggtgatgtgagcggcgtgctcatcgctggcggagagaacggcaacattatcttgtatgatccctccaagataatagccggtgataaggaagtggtgattgcgcaaaatgacaagcacactggacctgttcgtgcattagacgtgaacatttttcaaaccaacctcgtagcctccggagccaacgaatctgaaatctacatctgggatctcaataacttcgcgacgcccatgactcccggagccaagacacaatag

SEQ ID NO: 112515 - DNA, 3610 bp, Artificial Sequence
  derived and/or modified sequence
caggatgaagttaaaggaagtagatcgtacagccatgcaggcatggagccctgcccagaatcaccccatttacctagcaacaggaacatctgctcagcaattggatgcaacatttagtacgaatgcttcccttgagatatttgaattagacctctctgatccatccttggatatgaaatcttgtgccacattctcctcttctcacaggtaccacaagttgatttgggggccttataaaatggattccaaaggagatgtctctggagttctgattgcaggtggtgaaaatggaaatattattctctatgatccttctaaaattatagctggagacaaggaagttgtgattgcccagaatgacaagcatactggcccagtgagagccttggatgtgaacattttccagactaatctggtagcttctggtgctaatgaatctgaaatctacatatgggatctaaataattttgcaaccccaatgacaccaggagccaaaacacagccgccagaagatatcagctgcattgcatggaacagacaagttcagcatattttagcatcagccagtcccagtggccgggccactgtatgggatcttagaaaaaatgagccaatcatcaaagtcagtgaccatagtaacagaatgcattgttctgggttggcatggcatcctgatgttgctactcagatggtccttgcctccgaggatgaccggttaccagtgatccagatgtgggatcttcgatttgcttcctctccacttcgtgtcctggaaaaccatgccagggggattttggcaattgcttggagcatggcagatcctgaattgttactgagctgtggaaaagatgctaagattctctgctccaatccaaacacaggagaggtgttatatgaacttcccaccaacacacagtggtgcttcgatattcagtggtgtccccgaaatcctgctgtcttatcagctgcttcgtttgatgggcgtatcagtgtttattctatcatgggaggtagcacagatggtttaagacagaaacaagttgacaagctttcatcatcttttgggaatcttgatccctttggcacaggacagccccttcctccgttacaaattccacagcagactgctcagcatagtatagtgctgcctctgaagaagccgcccaagtggattcgaaggcctgttggtgcttctttttcatttggaggcaaactggttacgtttgagaatgtcagaatgccttctcatcagggagctgagcagcagcagcagcagcaccatgtgttcattagtcaggttgtaacagaaaaggagttcctcagccgatcagaccaacttcagcaggctgtgcagtcacaaggatttatcaattattgccaaaaaaaaattgatgcttctcagactgaatttgagaaaaatgtgtggtcctttttgaaggtaaactttgaggatgattctcgtggaaaataccttgaacttctaggatacagaaaagaagatctaggaaagaagcacattaaagaggaaaaagaagaatctgaatttctaccctcatctggaggaacatttaatatctctgtcagtggggacattgatggtttaattactcaggctttgctgacgggcaattttgagagtgctgttgacctttgtttacatgataaccgcatggccgatgccattatattggccatagcaggtggacaagaactcttggctcgaacccagaaaaaatacttcgcaaaatcccaaagcaaaattaccaggctcatcactgcagtggtgatgaagaactggaaagagattgttgagtcttgtgatcttaaaaattggagagaggctttagctgcagtattgacttatgcaaagccggatgaattttcagccctttgtgatcttttgggaaccaggcttgaaaatgaaggagatagcctcctgcagactcaagcatgtctctgctatatttgtgcagggaatgtagagaaattagttgcatgttggactaaagctcaagatggaagccaccctttgtcacttcaggatctgattgagaaagttgtcatcctgcgaaaagctgtgcaactcactcaagccatggacactagtactgtaggagttctcttggctgcgaagatgagtcagtatgccaatttgttggcagctcagggcagtattgctgcagccttggcttttcttcctgacaacaccaaccagccaaatatcatgcagcttcgtgacagactttgtagagcacaaggagagcctgtagcaggacatgaatcacctaaaattccgtacgagaaacagcagctccccaagggcaggcctggaccagttgctggccaccaccagatgccaagagttcaaactcaacaatattatccccatggagaaaatcctccacctccgggtttcataatgcatggaaatgttaatccaaatgctgctggtcagcttcccacatctccaggtcatatgcacacccaggtaccaccttatccacagccacagcgtcctcagaatggttggaatgaccctccagctttgaacagagtacccaaaaagaagaagatgcctgaaaacttcatgcctcctgttcccatcacatcaccaatcatgaacccgttgggtgacccccagtcacaaatgctgcagcaacagccttcagctccagtaccactgtcaagccagtcttcattcccacagccacatcttccaggtggccagcccttccatggcgtacagcaacctcttggtcaaacaggcatgccaccatctttttcaaagcccaatattgaaggtgccccaggggctcctattggaaataccttccagcatgtgcagtctttgccaacaaaaaaaattaccaagaaacctattccagatgagcacctcattctaaagaccacatttgaggatcttattcagcgctgcctttcttcagcaacagaccctcaaaccaagaggaagctagatgatgccagcaaacgtttggagtttctgtatgataaacttagggaacagacactttcaccaacaatcaccagtggtttacacaacattgcaaggagcattgaaactcgaaactactcagaaggattgaccatgcatacccacatagttagcaccagcaacttcagtgagacctctgctttcatgccagttctcaaagttgttctcacccaggccaataagctgggtgtctaaaaggacagcttctcttccactcaatattgccatttttccaaagaaacatgttaaaaaaaaaaattataagacatggactagtcctcattagcatgtttgcatagcaaccagtcaagagcatttacactatttctgctgatatactcaccttagaactgctcagaaccctggtgctttatttttgttttaatcttttgttgccagtgatgattttcctattctgcaaatagtgtatttcctggattacacatagtatggtttcctgaagtattctgataaatgtgttttttaaaacctcaatatactttttagaaaaggagcatctggttatgcataaagcagagctaaaactaaatttctttcatgtcctccctacttcctcagtgtcaatcagattaaagt

SEQ ID NO: 112516 - DNA, 553 bp, Artificial Sequence
  derived and/or modified sequence
aataagaccatccaattaatggaggactcctttcgcgtaactctccttaaagcggtaggcggtgcgagaaccggctattcagagctctccgatgcggagataatggggaagctcttggcatggttggctgtaggtatgtgataccggaggagcaggagtcaaataggatacgccgacttttaattcaaggaacccttttctgaaacactttgccacaatgaaggaaataaggaattgtactctcagagatgttgagaaaagatacatgggtcttggaagataattactcaaaatatgcagggaagcaggatgaagttaaaggaagtagatcgtacagccatgcaggcatggagccctgcccagaatcaccccatttacctagcaacaggaacatctgctcagcaattggatgcaacatttagtacgaatgcttcccttgagatatttgaattagacctctctgatccatccttggatatgaaatcttgtgccacattctcctcttctcacaggtaccacaagttgatttgggggccttataaaatggattcca

SEQ ID NO: 112517 - DNA, 569 bp, Artificial Sequence
  derived and/or modified sequence
gaaggtcctcgccaggtgcgtccgcccgttgctttttgtcctcttcgccggtccttaagctttgaggtagagcccaggccaaaactgggaccgcagcctgggtctccgctgccccgcaccagcctgaggcccggtctctggtgacggcgcgcccctagtcttggtttcgggcccggcggaacaacgcctggcatctggactccagtgatcgcgcccgtccgcattcgccgacgtctccactgctgagcaaaagccacccgaggctggcgacagtgtcttgccggggagtagtagccgggctggtaactggagtttgagattaggagactttcagacccttgtgcacaaagaggtgcggtccccgaggcaggatgaagttaaaggaagtagatcgtacagccatgcaggcatggagccctgcccagaatcaccccatttacctagcaacaggaacatctgctcagcaattggatgcaacatttagtacgaatgcttcccttgagatatttgaattagacctctctgatccatccttggatatgaaatcttgtgccacattctcctcttct

SEQ ID NO: 112518 - DNA, 541 bp, Artificial Sequence
  derived and/or modified sequence
gcatttgaccgctcctccctccgcgttggaggcggaatagtgggttttgctgcaaccggtttattttccttctgttttcacccattctggcacaatctggcgccatcgtccttcttgtgaggccaagcctgaaaatgcgaagcagagaggcaggaccaaaattgaggcgaatccaggaacctgccaatgggtctccgggtgcggtctctgaaactggaggatatcgggaggaaaggctctccgatgcggagataatggggaagctcttggcatggttggctgtaggtatgtgataccggaggagcaggagtcaaataggatacgccgacttttaattcaaggaacccttttctgaaacactttgccacaatgaaggaaataaggaattgtactctcagagatgttgagaaaagatacatgggtcttggaagataattactcaaaatatgcagggaagcaggatgaagttaaaggaagtagatcgtacagccatgcaggcatggagccctgcccagaatcaccccatttacctagcaacagg

SEQ ID NO: 112519 - DNA, 822 bp, Artificial Sequence
  derived and/or modified sequence
ctgggaccgcagcctgggtctccgctgccccgcaccagcctgaggcccggtctctggtgacggcgcgcccctagtcttggtttcgggcccggcggaacaacgcctggcatctggactccagtgatcgcgcccgtccgcattcgccgacgtctccactgctgagcaaaagccacccgaggctggcgacagtgtcttgccggggagtagtagccgggctggtaactggagtttgagattaggagactttcagacccttgtgcacaaagaggtgcggtccccgagggtgaggagaggaaaaaaaatctcaggattactttggctttgcaggatgaagttaaaggaagtagatcgtacagccatgcaggcatggagccctgcccagaatcaccccatttacctagcaacaggaacatctgctcagcaattggatgcaacatttagtacgaatgcttcccttgagatatttgaattagacctctctgatccatccttggatatgaaatcttgtgccacattctcctcttctcacaggtaccacaagttgatttgggggccttataaaatggattccaaaggagatgtctctggagttctgattgcaggtggtgaaaatggaaatattattctctatgatccttctaaaattatagctggagacaaggaagttgtgattgcccagaatgacaagcatactggcccagtgagagccttggatgtgaacattttccagactaatctggtagcttctggtgctaatgaatctgaaatctacatatgggatctaaataattttgcaaccccaatgacaccaggagccaaaac

SEQ ID NO: 112520 - DNA, 847 bp, Artificial Sequence
  derived and/or modified sequence
ctcgccaggtgcgtccgcccgttgctttttgtcctcttcgccggtccttaagctttgaggtagagcccaggccaaaactgggaccgcagcctgggtctccgctgccccgcaccagcctgaggcccggtctctggtgacggcgcgcccctagtcttggtttcgggcccggcggaacaacgcctggcatctggactccagtgatcgcgcccgtccgcattcgccgacgtctccactgctgagcaaaagccacccgaggctggcgacagtgtcttgccggggagtagtagccgggctggtaactggagtttgagattaggagactttcagacccttgtgcacaaagagcaggatgaagttaaaggaagtagatcgtacagccatgcaggcatggagccctgcccagaatcaccccatttacctagcaacaggaacatctgctcagcaattggatgcaacatttagtacgaatgcttcccttgagatatttgaattagacctctctgatccatccttggatatgaaatcttgtgccacattctcctcttctcacaggtaccacaagttgatttgggggccttataaaatggattccaaaggagatgtctctggagttctgattgcaggtggtgaaaatggaaatattattctctatgatccttctaaaattatagctggagacaaggaagttgtgattgcccagaatgacaagcatactggcccagtgagagccttggatgtgaacattttccagactaatctggtagcttctggtgctaatgaatctgaaatctacatatgggatctaaataattttgcaaccccaatgacaccaggagccaaaacacag

SEQ ID NO: 112521 - protein, 1166 aa, Artificial Sequence
  derived and/or modified sequence
MKLKEVDRTAMQAWSPAQNHPIYLATGTSAQQLDATFSTNASLEIFELDLSDPSLDMKSCATFSSSHRYHKLIWGPYKMDSKGDVSGVLIAGGENGNIILYDPSKIIAGDKEVVIAQNDKHTGPVRALDVNIFQTNLVASGANESEIYIWDLNNFATPMTPGAKTQPPEDISCIAWNRQVQHILASASPSGRATVWDLRKNEPIIKVSDHSNRMHCSGLAWHPDVATQMVLASEDDRLPVIQMWDLRFASSPLRVLENHARGILAIAWSMADPELLLSCGKDAKILCSNPNTGEVLYELPTNTQWCFDIQWCPRNPAVLSAASFDGRISVYSIMGGSTDGLRQKQVDKLSSSFGNLDPFGTGQPLPPLQIPQQTAQHSIVLPLKKPPKWIRRPVGASFSFGGKLVTFENVRMPSHQGAEQQQQQHHVFISQVVTEKEFLSRSDQLQQAVQSQGFINYCQKKIDASQTEFEKNVWSFLKVNFEDDSRGKYLELLGYRKEDLGKKHIKEEKEESEFLPSSGGTFNISVSGDIDGLITQALLTGNFESAVDLCLHDNRMADAIILAIAGGQELLARTQKKYFAKSQSKITRLITAVVMKNWKEIVESCDLKNWREALAAVLTYAKPDEFSALCDLLGTRLENEGDSLLQTQACLCYICAGNVEKLVACWTKAQDGSHPLSLQDLIEKVVILRKAVQLTQAMDTSTVGVLLAAKMSQYANLLAAQGSIAAALAFLPDNTNQPNIMQLRDRLCRAQGEPVAGHESPKIPYEKQQLPKGRPGPVAGHHQMPRVQTQQYYPHGENPPPPGFIMHGNVNPNAAGQLPTSPGHMHTQVPPYPQPQPYQPAQPYPFGTGGSAMYRPQQPVAPPTSNAYPNTPYISSASSYTGQSQLYAAQHQASSPTSSPATSFPPPPSSGASFQHGGPGAPPSSSAYALPPGTTGPQNGWNDPPALNRVPKKKKMPENFMPPVPITSPIMNPLGDPQSQMLQQQPSAPVPLSSQSSFPQPHLPGGQPFHGVQQPLGQTGMPPSFSKPNIEGAPGAPIGNTFQHVQSLPTKKITKKPIPDEHLILKTTFEDLIQRCLSSATDPQTKRKLDDASKRLEFLYDKLREQTLSPTITSGLHNIARSIETRNYSEGLTMHTHIVSTSNFSETSAFMPVLKVVLTQANKLGV

SEQ ID NO: 112522 - DNA, 3501 bp, Artificial Sequence
  derived and/or modified sequence
atgaagctgaaggaggtggacagaaccgccatgcaggcctggagccccgcccagaaccaccccatctacctggccaccggcaccagcgcccagcagctggacgccaccttcagcaccaacgccagcctggagatcttcgagctggacctgagcgaccccagcctggacatgaagagctgcgccaccttcagcagcagccacagataccacaagctgatctggggcccctacaagatggacagcaagggcgacgtgagcggcgtgctgatcgccggcggcgagaacggcaacatcatcctgtacgaccccagcaagatcatcgccggcgacaaggaggtggtgatcgcccagaacgacaagcacaccggccccgtgagagccctggacgtgaacatcttccagaccaacctggtggccagcggcgccaacgagagcgagatctacatctgggacctgaacaacttcgccacccccatgacccccggcgccaagacccagccccccgaggacatcagctgcatcgcctggaacagacaggtgcagcacatcctggccagcgccagccccagcggcagagccaccgtgtgggacctgagaaagaacgagcccatcatcaaggtgagcgaccacagcaacagaatgcactgcagcggcctggcctggcaccccgacgtggccacccagatggtgctggccagcgaggacgacagactgcccgtgatccagatgtgggacctgagattcgccagcagccccctgagagtgctggagaaccacgccagaggcatcctggccatcgcctggagcatggccgaccccgagctgctgctgagctgcggcaaggacgccaagatcctgtgcagcaaccccaacaccggcgaggtgctgtacgagctgcccaccaacacccagtggtgcttcgacatccagtggtgccccagaaaccccgccgtgctgagcgccgccagcttcgacggcagaatcagcgtgtacagcatcatgggcggcagcaccgacggcctgagacagaagcaggtggacaagctgagcagcagcttcggcaacctggaccccttcggcaccggccagcccctgccccccctgcagatcccccagcagaccgcccagcacagcatcgtgctgcccctgaagaagccccccaagtggatcagaagacccgtgggcgccagcttcagcttcggcggcaagctggtgaccttcgagaacgtgagaatgcccagccaccagggcgccgagcagcagcagcagcagcaccacgtgttcatcagccaggtggtgaccgagaaggagttcctgagcagaagcgaccagctgcagcaggccgtgcagagccagggcttcatcaactactgccagaagaagatcgacgccagccagaccgagttcgagaagaacgtgtggagcttcctgaaggtgaacttcgaggacgacagcagaggcaagtacctggagctgctgggctacagaaaggaggacctgggcaagaagcacatcaaggaggagaaggaggagagcgagttcctgcccagcagcggcggcaccttcaacatcagcgtgagcggcgacatcgacggcctgatcacccaggccctgctgaccggcaacttcgagagcgccgtggacctgtgcctgcacgacaacagaatggccgacgccatcatcctggccatcgccggcggccaggagctgctggccagaacccagaagaagtacttcgccaagagccagagcaagatcaccagactgatcaccgccgtggtgatgaagaactggaaggagatcgtggagagctgcgacctgaagaactggagagaggccctggccgccgtgctgacctacgccaagcccgacgagttcagcgccctgtgcgacctgctgggcaccagactggagaacgagggcgacagcctgctgcagacccaggcctgcctgtgctacatctgcgccggcaacgtggagaagctggtggcctgctggaccaaggcccaggacggcagccaccccctgagcctgcaggacctgatcgagaaggtggtgatcctgagaaaggccgtgcagctgacccaggccatggacaccagcaccgtgggcgtgctgctggccgccaagatgagccagtacgccaacctgctggccgcccagggcagcatcgccgccgccctggccttcctgcccgacaacaccaaccagcccaacatcatgcagctgagagacagactgtgcagagcccagggcgagcccgtggccggccacgagagccccaagatcccctacgagaagcagcagctgcccaagggcagacccggccccgtggccggccaccaccagatgcccagagtgcagacccagcagtactacccccacggcgagaacccccccccccccggcttcatcatgcacggcaacgtgaaccccaacgccgccggccagctgcccaccagccccggccacatgcacacccaggtgcccccctacccccagccccagccctaccagcccgcccagccctaccccttcggcaccggcggcagcgccatgtacagaccccagcagcccgtggccccccccaccagcaacgcctaccccaacaccccctacatcagcagcgccagcagctacaccggccagagccagctgtacgccgcccagcaccaggccagcagccccaccagcagccccgccaccagcttcccccccccccccagcagcggcgccagcttccagcacggcggccccggcgccccccccagcagcagcgcctacgccctgccccccggcaccaccggcccccagaacggctggaacgacccccccgccctgaacagagtgcccaagaagaagaagatgcccgagaacttcatgccccccgtgcccatcaccagccccatcatgaaccccctgggcgacccccagagccagatgctgcagcagcagcccagcgcccccgtgcccctgagcagccagagcagcttcccccagccccacctgcccggcggccagcccttccacggcgtgcagcagcccctgggccagaccggcatgccccccagcttcagcaagcccaacatcgagggcgcccccggcgcccccatcggcaacaccttccagcacgtgcagagcctgcccaccaagaagatcaccaagaagcccatccccgacgagcacctgatcctgaagaccaccttcgaggacctgatccagagatgcctgagcagcgccaccgacccccagaccaagagaaagctggacgacgccagcaagagactggagttcctgtacgacaagctgagagagcagaccctgagccccaccatcaccagcggcctgcacaacatcgccagaagcatcgagaccagaaactacagcgagggcctgaccatgcacacccacatcgtgagcaccagcaacttcagcgagaccagcgccttcatgcccgtgctgaaggtggtgctgacccaggccaacaagctgggcgtgtag

SEQ ID NO: 112523 - DNA, 3501 bp, Artificial Sequence
  derived and/or modified sequence
atgaaactcaaagaggtcgatcggaccgcgatgcaggcttggagccctgcacaaaaccatcctatctatctagccacaggtacgagcgcacagcagctggatgcaaccttctcgaccaatgcatccttagagatttttgaactggatctgagtgaccctagcctcgacatgaagagttgcgccactttttccagtagtcataggtatcacaagctcatatggggcccctacaagatggatagtaaaggtgacgtgagcggggtgctgattgccgggggtgaaaatgggaacattattctttacgaccccagcaaaatcattgccggggacaaggaggtggtgattgcccagaatgataaacataccggaccagtacgggccttggacgtcaatatcttccagacaaatttagtggcaagcggggcaaatgagtcagagatttacatctgggatctcaacaactttgccactccaatgacccccggtgctaagacccagccaccagaggatatcagctgcatcgcctggaacaggcaggtgcagcacatccttgcttccgcctctccatctggccgcgcaaccgtgtgggatctgcgaaagaacgaaccaatcattaaagtaagcgaccatagtaaccgcatgcattgttctggattagcctggcacccggacgtggctactcagatggtcctcgcttccgaagacgacagactgccagtgattcaaatgtgggacttgaggttcgcctcttctcccctcagggttctagagaatcacgctagggggatcttggcaatagcctggtctatggctgacccagagctacttctgagttgcgggaaagacgccaagattctctgttctaaccctaacactggggaggttctgtacgagctgcctacgaatacccaatggtgctttgatatccaatggtgccccagaaaccctgctgtgctgtctgctgcctctttcgacggaaggatttctgtatactccattatgggagggtcaactgacggcctcagacaaaagcaggttgataaactatcaagtagctttggaaacctggaccccttcggcacagggcagcccctgccccctctgcagattccacaacagacagcccaacactccatcgtactgccactcaagaagccccccaaatggattaggcgcccggtgggggccagcttttcctttggcggaaagctcgtgacattcgagaatgtgagaatgccatcacaccagggcgccgagcagcaacagcaacagcaccatgtttttattagtcaggttgtgaccgagaaggagttcctctcccgcagtgaccagcttcagcaggctgtgcaatcgcaggggttcattaattactgtcagaaaaagatcgacgcctcgcagacagaatttgaaaagaacgtgtggtcgtttcttaaagtgaacttcgaggatgatagccgcgggaagtacttggaactcctgggttaccgtaaggaggatttaggaaaaaagcatatcaaggaggagaaggaggagagcgagttcctcccctcttccggtggaacatttaacatctcagtgtccggcgacatagatgggctcatcacccaagcacttctgacaggaaacttcgaatccgccgtggatttgtgcttgcatgataatcgaatggcagacgccatcattcttgcaatcgccggggggcaggaactcttggcaaggactcagaaaaagtatttcgcaaagagccaatcgaagatcacgagactgattacagctgttgtcatgaagaactggaaggagattgtcgagagctgcgatttgaagaattggcgtgaggcactggcggccgtgctgacctatgcaaaaccagatgagttctcagctctctgtgatcttctgggcacccgcctggaaaacgagggcgatagtttgctgcagactcaggcttgtctgtgttacatctgcgccggaaatgtggaaaaactcgtagcctgttggaccaaagcccaggacggatctcacccactatcattacaagatctgattgagaaggtggtcattctgcggaaggcagtgcagctgacacaggcaatggatacatccactgtgggtgtcctgcttgccgcaaaaatgtctcagtatgctaatttactggccgcccagggtagcatcgctgccgctctggctttcctgcctgacaacactaatcagccaaatattatgcagctcagagatagactgtgccgggcccagggcgagcctgtggcgggtcatgaatcacctaagattccatacgaaaaacagcagttacccaaaggtagaccaggccccgtggcagggcaccatcagatgccccgagtgcagacccaacagtattatccgcatggcgagaaccctcctcctcctggcttcattatgcatggtaacgttaaccccaatgcagctggacagctgcctacgtcgcctggccacatgcacacacaggtgccaccgtaccctcagccccagccttatcagcccgctcagccttaccccttcggtacggggggctcagccatgtatcgcccacagcagccagtggcacctcctacctcaaacgcctacccaaacaccccttatatttccagcgcctcatcctataccggccagtctcagctctacgccgctcagcatcaggcttcaagccctacatcaagcccggcaaccagctttcctccgcccccttcctctggtgcctcttttcaacatgggggccccggcgcccccccttcatctagtgcgtacgctctcccaccagggaccaccgggcctcagaacggctggaacgatcccccagccctaaaccgggtgccaaaaaagaagaaaatgcctgagaactttatgccaccagttcccatcacatcaccaatcatgaacccactcggtgatccgcagagtcaaatgttacagcagcagccaagtgctcccgtgcccttgtctagtcaatcctcttttccgcagccccacctaccaggcggccagccgttccacggcgtccagcaacctttggggcagaccggtatgcctccttcatttagcaagcctaacatcgaaggagctcctggcgcccctataggtaacaccttccaacacgtgcagagcctacccacaaaaaaaatcacaaagaagcctatcccggacgaacaccttattttgaaaactacattcgaagacttgattcagaggtgcctgtcgtctgcgacagacccccagactaagcggaagctggacgacgcaagtaagagactggagttcctgtatgataaactgagagagcagaccctgtctcccactataacaagcgggcttcacaatatcgccaggtcaatcgagacacgcaattattctgagggactcaccatgcacactcacatagtgagcacaagcaatttctcagaaacatctgctttcatgccagtccttaaagttgtcctaacacaagccaacaagctgggtgtgtag

SEQ ID NO: 112524 - DNA, 3501 bp, Artificial Sequence
  derived and/or modified sequence
atgaagctgaaggaggtggacagaacagccatgcaggcctggagccctgcccagaaccaccccatctacctggccaccggcaccagcgcccagcagctggatgccaccttcagcaccaatgccagcctggagatctttgagctggacctgagtgaccccagcctggacatgaagagctgtgccaccttcagcagcagccaccgctaccacaagctgatctggggcccctacaagatggacagcaaaggagatgtgtctggagtgctgattgctggaggagaaaatggaaacatcatcctgtatgaccccagcaagatcatcgccggggacaaggaggtggtgattgcccagaatgacaagcacacaggccctgtgcgggccctggatgtgaacatcttccagaccaacctggtggccagcggggccaatgaaagtgagatctacatctgggacctgaacaactttgccacccccatgacccctggggccaagacccagcccccagaggacatcagctgcatcgcctggaaccggcaggtgcagcacatcctggccagcgccagccccagcggccgggccaccgtgtgggacctgaggaagaatgagcccatcatcaaggtgtctgaccacagcaacaggatgcactgcagcggcctggcctggcacccagatgtggccacccagatggtgctggcctctgaagatgaccggctgcctgtgatccagatgtgggacctgcgctttgccagcagccccctgcgggtgctggagaaccacgcccggggcatcctggccatcgcctggagcatggctgaccctgagctgctgctgagctgtgggaaggatgccaagatcctgtgcagcaaccccaacacaggagaggtgctgtatgagctgcccaccaacacccagtggtgctttgacatccagtggtgccccaggaacccagctgtgctgtctgctgccagctttgatggccgcatctctgtgtacagcatcatgggcggcagcacagatggcctgcggcagaagcaggtggacaagctgagcagcagctttggaaacctggacccctttggaacaggccagcccctgccccccctgcagatcccccagcagacagcccagcacagcatcgtgctgcccctgaagaagccacccaagtggatcagaagacctgtgggcgccagcttctcctttggaggcaagctggtgacctttgaaaatgtgaggatgcccagccaccagggcgctgagcagcagcagcagcagcaccacgtgttcatcagccaggtggtgacagagaaggagttcctgagcagaagtgaccagctgcagcaggccgtgcagagccagggcttcatcaactactgccagaagaagattgatgccagccagacagaatttgagaagaatgtgtggagcttcctgaaggtgaactttgaagatgacagccggggcaagtacctggagctgctgggctacaggaaggaggacctgggcaagaagcacatcaaggaggagaaggaggagagcgagttcctgcccagcagcggcggcaccttcaacatctctgtgtctggggacattgatggcctcatcacccaggccctgctgaccggcaactttgaatctgctgtggacctgtgcctgcatgacaacaggatggctgatgccatcatcctggccatcgccggcggccaggagctgctggcccggacccagaagaagtactttgccaagagccagagcaagatcaccaggctcatcacagctgtggtgatgaagaactggaaggagatcgtggagagctgtgacctgaagaactggagggaggccctggccgctgtgctgacctacgccaagccagatgagttcagcgccctgtgtgacctgctgggcacccggctggagaatgaaggagacagcctgctgcagacccaggcctgcctgtgctacatctgtgctggaaatgtggagaagctggtggcctgctggaccaaggcccaggacggcagccaccccctgagcctgcaggacctgattgagaaggtggtgatcctgaggaaggctgtgcagctgacccaggccatggacaccagcacagtgggcgtgctgctggccgccaagatgagccagtatgccaacctgctggccgcccagggcagcattgctgctgccctggccttcctgcctgacaacaccaaccagcccaacatcatgcagctgcgggaccggctgtgccgggcccagggcgagcctgtggccggccacgagagccccaagatcccctatgagaagcagcagctgcccaagggccggcccggccctgtggccggccaccaccagatgccccgggtgcagacccagcagtactacccccatggagaaaatcctcctcctcctggcttcatcatgcatggaaatgtgaaccccaatgctgctggccagctgcccaccagccctggccacatgcacacccaggtgcccccctacccccagccccagccctaccagcctgcccagccctaccccttcggcaccggcggcagcgccatgtaccggccccagcagcctgtggccccacccaccagcaatgcctaccccaacaccccctacatcagcagcgccagcagctacacaggccagagccagctgtatgctgcccagcaccaggccagcagccccaccagcagccctgccaccagcttccccccaccacccagcagcggggccagcttccagcacggcggccctggggccccacccagcagcagcgcctatgccctgcccccaggcaccaccggcccccagaatggctggaatgaccccccagccctgaacagagtgcccaagaagaagaagatgcctgagaacttcatgcctcctgtgcccatcaccagccccatcatgaaccccctgggggacccccagagccagatgctgcagcagcagcccagcgcccctgtgcccctgagcagccagagcagcttcccccagccccacctgcccggcggccagcccttccacggcgtgcagcagcccctgggccagacaggcatgccacccagcttcagcaagcccaacatcgagggcgcccctggggcccccatcggcaacaccttccagcacgtgcagagcctgcccaccaagaagatcaccaagaagcccatcccagatgagcacctgatcctgaagaccacctttgaggacctgatccagcgctgcctgagcagcgccacagacccccagaccaagaggaagctggatgatgccagcaagaggctggagttcctgtatgacaagctgcgggagcagaccctgagccccaccatcaccagcggcctgcacaacatcgcccggagcattgagaccaggaactacagcgagggcctgaccatgcacacccacatcgtgtccaccagcaacttcagcgagaccagcgccttcatgcctgtgctgaaggtggtgctgacccaggccaacaagctgggcgtgtag

SEQ ID NO: 112525 - DNA, 3501 bp, Artificial Sequence
  derived and/or modified sequence
atgaagctgaaggaggtggaccggaccgccatgcaggcctggagcccagctcaaaatcacccaatctacctggcaacaggcacttcggcacaacagttggacgccacgttctccaccaacgccagcttggagatttttgaacttgatctgagcgacccgtcactggacatgaaaagctgtgccacgttttcttcatcacataggtaccataaacttatctgggggccatataagatggattccaaaggagatgtcagtggagtgctgatcgctggtggggagaatggcaacataattctctatgatcctagtaaaatcattgccggagataaagaagttgttatagcccagaatgacaaacatacggggccagtgagagccttggatgtgaatatatttcaaaccaatcttgtagcttcaggggccaacgaatccgagatttatatttgggacttgaataactttgctaccccaatgactccgggcgccaagacacaacctccagaggatattagttgtattgcatggaatcgtcaagtgcagcacatcctggcaagtgcctccccgtctggtagggccacagtatgggatcttaggaagaacgagcctattattaaagtgtccgatcatagcaatcgaatgcattgcagtggtctggcctggcatccggatgtggcaacccagatggttctcgcgtccgaggacgatagactcccagtcatccagatgtgggatctgcgtttcgctagctctcccctgcgagtccttgaaaaccatgcgcgcgggattctggccatcgcctggtcgatggcagacccagagctgctgctgagttgtggcaaggacgccaaaatcctgtgtagtaaccccaatactggagaggtactgtacgagctgcctactaatacccagtggtgctttgatattcaatggtgccctagaaatcccgcggtgttgtcagcagcgtctttcgatggaagaatctccgtgtactctatcatgggggggtcaaccgacgggcttcggcagaagcaagtcgataagctttcgagtagctttgggaacctcgacccgtttggtacaggacaacctcttccccctctgcaaatcccccagcagacagcccagcatagtatcgtgctgccgctgaagaagcctcccaaatggatcaggcgtcctgtgggtgctagcttttccttcggtgggaagttagtgactttcgagaacgtgaggatgccctcccaccaaggcgcagaacagcagcagcagcagcaccatgtgtttatcagtcaggtcgtcactgaaaaagagtttctgtcacgttctgaccaactgcagcaggctgtccagtctcaagggtttataaattactgccagaaaaagatcgatgcctcacagactgaattcgaaaaaaacgtgtggagcttcctgaaagtgaacttcgaggatgatagcaggggcaagtaccttgagttgctgggatatagaaaggaagaccttgggaagaagcatatcaaagaagagaaggaagagagcgaattcctgcccagctctgggggcaccttcaacatctcagtgtcaggggacatagatgggcttatcacccaggctctactgacaggaaacttcgagagcgctgtcgacttgtgcctgcatgacaatcggatggccgacgcgattattctggctattgccggaggtcaagagctgctggcgagaacccaaaagaagtacttcgccaagtctcagtcaaaaattacgcgcctgatcacagctgtggtgatgaagaactggaaagagatcgtcgagtcctgtgatctcaagaattggcgtgaggctctagccgcagttctcacttatgcaaagccggatgagttctccgccctctgcgacttgttaggcaccagactggaaaatgagggcgatagtttgctgcaaacccaagcttgtctttgttatatttgcgcaggcaacgtggaaaagcttgttgcttgctggactaaggcacaagacggctcccaccccctgagcctgcaagacctgatagagaaagtcgttatattgcggaaggccgttcagttaacccaagccatggacacctctacagttggcgtgttactggcagctaagatgtcacagtacgcaaatctgcttgctgcccaaggctctatcgcagcagccctcgctttcctgcccgataacacaaatcagccaaacataatgcagttgagggataggctgtgtagggctcagggagaaccagtggcaggacatgaaagccctaaaatcccatatgaaaaacagcagttacccaagggaaggccagggcccgtggctgggcaccatcagatgccccgcgtgcagacccagcagtactatcctcatggcgaaaatccccccccccctggatttataatgcatggcaacgtgaaccccaacgcagctggccagcttcctacctctcccgggcatatgcatacccaagtccccccttacccccagcctcagccgtaccaaccggcccaaccttatccattcggcacaggaggctccgctatgtatcggcctcagcagcctgtagctccccccacaagcaacgcctaccccaatacgccttacatttcatctgccagctcctataccgggcaaagtcagctgtacgcagctcagcatcaagcatcatctcctacctccagccccgccacctcttttccccccccaccaagcagcggtgcaagctttcagcacgggggaccaggtgcacccccctcatccagcgcctacgctctgccccctggcactactggtcctcaaaacgggtggaatgacccaccggctctcaatagggtgcctaagaagaaaaagatgcccgaaaacttcatgcctccagtcccaataacctcaccaataatgaatcctttgggcgatccccagtctcagatgctgcaacaacagccatccgccccagtccccctctcctctcagtcctcctttccccagcctcacctccccggagggcagccgtttcatggggtgcagcagccattaggtcagactggcatgcctcccagcttttccaagccaaacatcgaaggtgcgcctggggctccaatcggcaacaccttccagcatgtgcagagcctcccaacaaagaaaattaccaagaaacctattccagatgagcaccttattctgaagaccactttcgaggatcttatacagcgatgcctctcttcagccaccgacccccagacgaaaaggaagctggatgatgcgtcaaagcgcctggagttcctttacgataagctcagagaacagacattgagccctactatcacatcagggttgcacaatatcgcgaggagtatcgagaccagaaattactcggaaggactgactatgcatacacatatcgtctctacctcaaactttagtgagacgagcgcctttatgcctgtgctgaaagtggtgctgacacaggccaacaagcttggggtgtag

SEQ ID NO: 112526 - DNA, 3501 bp, Artificial Sequence
  derived and/or modified sequence
atgaagctgaaagaagtggaccggactgccatgcaggcatggagccccgcacaaaaccaccccatctacctcgccaccggcacaagcgctcagcagctggacgccaccttctcaaccaatgcctcacttgaaatcttcgaactggacttgtcagacccttctcttgatatgaagagctgcgcaactttcagtagcagtcaccgctatcacaaattaatctgggggccatacaaaatggactccaaaggagacgtgtccggggttttaatagctgggggagagaatggaaatattatactgtacgatccaagcaaaatcatagctggagataaggaggtagtgattgctcagaacgacaagcacacaggacccgtgcgcgcacttgatgtgaacatctttcagacaaacctggtggcttccggggctaatgaatcagaaatctatatttgggacctgaataacttcgcgacccccatgacgccaggagctaagactcaacctcctgaggatatttcctgtatagcgtggaatagacaggtgcagcatattctggcgtcagcctccccttcaggcagagctactgtttgggatctgaggaaaaatgagcccatcatcaaggtctcagaccactctaatcgaatgcattgcagcgggttggcttggcatcccgacgtagcaacccaaatggtcctagcatccgaggatgaccggctacctgtgatccagatgtgggaccttcgatttgctagcagcccactgagagtcctggagaaccatgcaagggggattctggcaatcgcttggtccatggccgaccctgagttattgctgtcatgtgggaaagacgcgaaaatcttgtgcagtaatcctaacactggggaagtgctgtacgagctgcccaccaatacacagtggtgcttcgacatacagtggtgcccacgcaacccagccgtgctgagcgcggcttctttcgacggacgcattagcgtgtatagcataatgggtggatctactgacgggttgcgccagaaacaggtggataaactatcgtcgtctttcggaaatttagacccatttgggaccgggcagcctttgcccccactccagattccgcagcagactgctcagcactccattgtacttcctctgaaaaagccaccaaagtggatccgacgccctgtcggagcctcctttagcttcggaggtaaactggtgacttttgaaaatgtgcgtatgccttctcatcaaggtgccgaacagcagcagcagcagcatcacgtgttcatctcccaagtagtgacggagaaagagtttctcagccgcagtgaccagcttcagcaggccgttcagagtcaaggcttcattaactactgtcagaagaaaattgacgccagccagacagaattcgagaaaaatgtgtggtctttcttaaaagtgaatttcgaagacgactcgagaggcaagtacctcgaattgctgggataccgtaaggaagatcttggaaagaaacatatcaaagaggaaaaggaagagtcagagtttctgccgtctagtggcggaacgtttaacatcagtgtatctggcgatatcgatgggctgatcacccaagctctcctgaccggaaacttcgaaagcgcagtagatctatgcctccacgacaatcgcatggcggatgcaataattctggctattgctgggggacaggagctcctggcaaggacgcagaagaaatacttcgccaagagtcagtctaaaatcacacggttaatcacggccgtggtgatgaagaattggaaggaaatagtggaaagttgcgacctgaaaaactggagagaggcccttgctgccgtcctcacatatgccaaacccgacgagttcagtgccctgtgcgacctactgggtacccgtcttgaaaatgaaggagactctctgctacagacccaggcttgcttgtgctatatctgtgctgggaacgtggagaagctcgtcgcatgctggaccaaagcacaggacgggagccacccactctccctccaggatctgatagagaaggtggttatcctgcgtaaggcagtccagctgacacaggctatggacacctcaaccgtaggggtgttacttgctgcgaagatgtcccagtatgccaatttgctagctgctcagggatctattgcagcagcacttgcatttctacccgacaacaccaaccagcctaacattatgcagctgcgggatcgcctctgccgtgcccaaggggagccggtcgcgggacacgagagtccaaagatcccctacgagaaacagcaattgcccaaggggcgaccaggcccagtggctgggcatcatcaaatgcccagggtgcagacccaacagtactacccccacggggagaatccacctcccccaggcttcatcatgcatggaaacgtgaaccccaacgccgctggccagctcccaacctcccctggacacatgcatacccaggtacccccatatccccagccccagccttaccagcccgctcaaccctatccatttggcacaggcggttctgcaatgtatagacctcaacaaccagtggccccacccactagcaacgcctacccaaacaccccctatatttcttccgcctcgagctacactggacaaagccaactgtatgcagctcagcaccaggccagttctccaacatcatcccctgccaccagcttcccgcctccaccatcttcaggcgcttctttccagcacggtgggcctggagccccaccatccagtagcgcctacgctctccccccaggtacgactggacctcaaaacggctggaacgacccccctgctctcaacagggtgcccaaaaagaagaagatgccagagaactttatgcctccagtccctattacatcacccatcatgaacccacttggagaccctcaatcccagatgctgcagcagcagccctcagctcccgtgccactgtcatctcagtcatcctttccacagccccatctgcctggtggacagccatttcacggcgtacagcagccactgggtcagactggcatgcccccatcattctccaagccaaacatcgagggagcacccggtgccccaatcggaaacacctttcagcatgttcaatctttgcctacaaagaaaataaccaagaagccaatccctgatgaacatctgattttgaaaaccaccttcgaagatctgatccagcgctgtctctccagtgccacagacccccagaccaagagaaaactggatgatgcttccaagcgactggagttcctgtacgacaaattgcgagagcagaccctctctcctaccatcacaagcgggttgcataatatcgcgagaagcatcgagaccagaaattactctgagggcctgacgatgcacacccacatagtgagcacaagcaatttttccgaaacctccgcttttatgccagtgctcaaagtggtcctgacacaggcaaataagctgggcgtttag

SEQ ID NO: 112527 - DNA, 3596 bp, Artificial Sequence
  derived and/or modified sequence
ctgggagagtccgacgagcgctgcactaacgcaggatccggctgccgaaggtcctcgccagcaggatgaagttaaaggaagtagatcgtacagccatgcaggcatggagccctgcccagaatcaccccatttacctagcaacaggaacatctgctcagcaattggatgcaacatttagtacgaatgcttcccttgagatatttgaattagacctctctgatccatccttggatatgaaatcttgtgccacattctcctcttctcacaggtaccacaagttgatttgggggccttataaaatggattccaaaggagatgtctctggagttctgattgcaggtggtgaaaatggaaatattattctctatgatccttctaaaattatagctggagacaaggaagttgtgattgcccagaatgacaagcatactggcccagtgagagccttggatgtgaacattttccagactaatctggtagcttctggtgctaatgaatctgaaatctacatatgggatctaaataattttgcaaccccaatgacaccaggagccaaaacacagccgccagaagatatcagctgcattgcatggaacagacaagttcagcatattttagcatcagccagtcccagtggccgggccactgtatgggatcttagaaaaaatgagccaatcatcaaagtcagtgaccatagtaacagaatgcattgttctgggttggcatggcatcctgatgttgctactcagatggtccttgcctccgaggatgaccggttaccagtgatccagatgtgggatcttcgatttgcttcctctccacttcgtgtcctggaaaaccatgccagggggattttggcaattgcttggagcatggcagatcctgaattgttactgagctgtggaaaagatgctaagattctctgctccaatccaaacacaggagaggtgttatatgaacttcccaccaacacacagtggtgcttcgatattcagtggtgtccccgaaatcctgctgtcttatcagctgcttcgtttgatgggcgtatcagtgtttattctatcatgggaggtagcacagatggtttaagacagaaacaagttgacaagctttcatcatcttttgggaatcttgatccctttggcacaggacagccccttcctccgttacaaattccacagcagactgctcagcatagtatagtgctgcctctgaagaagccgcccaagtggattcgaaggcctgttggtgcttctttttcatttggaggcaaactggttacgtttgagaatgtcagaatgccttctcatcagggagctgagcagcagcagcagcagcaccatgtgttcattagtcaggttgtaacagaaaaggagttcctcagccgatcagaccaacttcagcaggctgtgcagtcacaaggatttatcaattattgccaaaaaaaaattgatgcttctcagactgaatttgagaaaaatgtgtggtcctttttgaaggtaaactttgaggatgattctcgtggaaaataccttgaacttctaggatacagaaaagaagatctaggaaagaagcacattaaagaggaaaaagaagaatctgaatttctaccctcatctggaggaacatttaatatctctgtcagtggggacattgatggtttaattactcaggctttgctgacgggcaattttgagagtgctgttgacctttgtttacatgataaccgcatggccgatgccattatattggccatagcaggtggacaagaactcttggctcgaacccagaaaaaatacttcgcaaaatcccaaagcaaaattaccaggctcatcactgcagtggtgatgaagaactggaaagagattgttgagtcttgtgatcttaaaaattggagagaggctttagctgcagtattgacttatgcaaagccggatgaattttcagccctttgtgatcttttgggaaccaggcttgaaaatgaaggagatagcctcctgcagactcaagcatgtctctgctatatttgtgcagggaatgtagagaaattagttgcatgttggactaaagctcaagatggaagccaccctttgtcacttcaggatctgattgagaaagttgtcatcctgcgaaaagctgtgcaactcactcaagccatggacactagtactgtaggagttctcttggctgcgaagatgagtcagtatgccaatttgttggcagctcagggcagtattgctgcagccttggcttttcttcctgacaacaccaaccagccaaatatcatgcagcttcgtgacagactttgtagagcacaaggagagcctgtagcaggacatgaatcacctaaaattccgtacgagaaacagcagctccccaagggcaggcctggaccagttgctggccaccaccagatgccaagagttcaaactcaacaatattatccccatggagaaaatcctccacctccgggtttcataatgcatggaaatgttaatccaaatgctgctggtcagcttcccacatctccaggtcatatgcacacccaggtaccaccttatccacagccacagccttatcaaccagcccagccgtatcccttcggaacaggggggtcagcaatgtatcgacctcagcagcctgttgctcctcctacttcaaacgcttaccctaacaccccttacatatcttctgcttcttcctatactgggcagtctcagctgtacgcagcacagcaccaggcctcttcacctacctccagccctgctacttctttccctcctcccccttcctctggagcatccttccagcatggcggaccaggagctccaccatcatcttcagcttatgcactgcctcctggaacaacaggtcctcagaatggttggaatgaccctccagctttgaacagagtacccaaaaagaagaagatgcctgaaaacttcatgcctcctgttcccatcacatcaccaatcatgaacccgttgggtgacccccagtcacaaatgctgcagcaacagccttcagctccagtaccactgtcaagccagtcttcattcccacagccacatcttccaggtggccagcccttccatggcgtacagcaacctcttggtcaaacaggcatgccaccatctttttcaaagcccaatattgaaggtgccccaggggctcctattggaaataccttccagcatgtgcagtctttgccaacaaaaaaaattaccaagaaacctattccagatgagcacctcattctaaagaccacatttgaggatcttattcagcgctgcctttcttcagcaacagaccctcaaaccaagaggaagctagatgatgccagcaaacgtttggagtttctgtatgataaacttagggaacagacactttcaccaacaatcaccagtggtttacacaacattgcaaggagcattgaaactcgaaactactcagaaggattgaccatgcatacccacatagttagcaccagcaacttcagtgagacctctgctttcatgccagttctcaaagttgttctcacccaggccaataagctgggtgtctaaaaggacagcttctcttccactcaatattgc

SEQ ID NO: 112528 - protein, 337 aa, Artificial Sequence
  derived and/or modified sequence
MGPRARPALLLLMLLQTAVLQGRLLRSHSLHYLFMGASEQDLGLSLFEALGYVDDQLFVFYDHESRRVEPRTPWVSSRISSQMWLQLSQSLKGWDHMFTVDFWTIMENHNHSKESHTLQVILGCEMQEDNSTEGYWKYGYDGQDHLEFCPDTLDWRAAEPRAWPTKLEWERHKIRARQNRAYLERDCPAQLQQLLELGRGVLDQQVPPLVKVTHHVTSSVTTLRCRALNYYPQNITMKWLKDKQPMDAKEFEPKDVLPNGDGTYQGWITLAVPPGEEQRYTCQVEHPGLDQPLIVIWEPSPSGTLVIGVISGIAVFVVILFIGILFIILRKRQGSSF

SEQ ID NO: 112529 - protein, 161 aa, Artificial Sequence
  derived and/or modified sequence
MGPRARPALLLLMLLQTAVLQGRLLRSHSLHYLFMGASEQDLGLSLFEALGYVDDQLFVFYDHESRRVEPRTPWVSSRISSQMWLQLSQSLKGWDHMFTVDFWTIMENHNHSKESHTLQVILGCEMQEDNSTEGYWKYGYDGQVLQDTIYSSEVSSLGIKF

SEQ ID NO: 112530 - DNA, 1014 bp, Artificial Sequence
  derived and/or modified sequence
atgggccccagagccagacccgccctgctgctgctgatgctgctgcagaccgccgtgctgcagggcagactgctgagaagccacagcctgcactacctgttcatgggcgccagcgagcaggacctgggcctgagcctgttcgaggccctgggctacgtggacgaccagctgttcgtgttctacgaccacgagagcagaagagtggagcccagaaccccctgggtgagcagcagaatcagcagccagatgtggctgcagctgagccagagcctgaagggctgggaccacatgttcaccgtggacttctggaccatcatggagaaccacaaccacagcaaggagagccacaccctgcaggtgatcctgggctgcgagatgcaggaggacaacagcaccgagggctactggaagtacggctacgacggccaggaccacctggagttctgccccgacaccctggactggagagccgccgagcccagagcctggcccaccaagctggagtgggagagacacaagatcagagccagacagaacagagcctacctggagagagactgccccgcccagctgcagcagctgctggagctgggcagaggcgtgctggaccagcaggtgccccccctggtgaaggtgacccaccacgtgaccagcagcgtgaccaccctgagatgcagagccctgaactactacccccagaacatcaccatgaagtggctgaaggacaagcagcccatggacgccaaggagttcgagcccaaggacgtgctgcccaacggcgacggcacctaccagggctggatcaccctggccgtgccccccggcgaggagcagagatacacctgccaggtggagcaccccggcctggaccagcccctgatcgtgatctgggagcccagccccagcggcaccctggtgatcggcgtgatcagcggcatcgccgtgttcgtggtgatcctgttcatcggcatcctgttcatcatcctgagaaagagacagggcagcagcttctag

SEQ ID NO: 112531 - DNA, 1014 bp, Artificial Sequence
  derived and/or modified sequence
atgggcccccgcgcccgtcccgctctgctgctcctaatgctcctgcagaccgcggtgctccagggtcggctccttcgtagtcactcactgcactacctattcatgggcgcttctgaacaggaccttggtctaagtttgtttgaagccctgggatacgtggatgatcagttgtttgtcttttacgaccacgaatcgagacgtgttgagccaaggactccatgggtctcttctcgaataagcagtcagatgtggctgcagcttagccagtcacttaaaggatgggaccacatgttcactgtggacttctggactatcatggagaatcacaatcacagtaaagagtctcacactctgcaggtgatcctggggtgtgagatgcaggaagataactctaccgagggctactggaagtatgggtacgatgggcaagaccacttagagttttgtccagacacgcttgattggagggctgcggaaccacgagcttggccaaccaaactcgaatgggagaggcacaaaatacgggctcgacagaatcgcgcctacttggagagagactgtcctgctcagcttcagcagctgctcgaactcggaagaggcgttttggatcagcaggtgcctcccctggtgaaagtgacccaccacgtgactagctccgtaactaccctgagatgtagagcacttaactactatccccagaacatcacaatgaagtggctaaaggataagcagccgatggacgccaaggagtttgaacccaaagacgtgctccctaatggcgacggaacctatcagggatggatcacactggctgtgccaccaggggaggaacagcggtatacctgtcaggtggaacatccgggcctcgatcagccgctgatcgtgatatgggagcctagcccaagcggaacgctggtgattggagtcatctcaggtatcgctgtgttcgtggtcatcctatttatcgggatattgtttatcattttgagaaaaagacagggttcctcgttctag

SEQ ID NO: 112532 - DNA, 1014 bp, Artificial Sequence
  derived and/or modified sequence
atgggcccccgggcccggcctgccctgctgctgctgatgctgctgcagacagctgtgctgcagggccgcctgctgcggagccacagcctgcactacctgttcatgggcgccagcgagcaggacctgggcctgagcctgtttgaggccctgggctacgtggatgaccagctgtttgtgttctatgaccacgagagccggcgggtggagcccaggaccccctgggtgagcagccgcatcagcagccagatgtggctgcagctgagccagagcctgaagggctgggaccacatgttcaccgtggacttctggaccatcatggagaaccacaaccacagcaaggagagccacaccctgcaggtgatcctgggctgtgagatgcaggaggacaacagcacagagggctactggaagtatggctatgatggccaggaccacctggagttctgcccagacaccctggactggagggctgctgagccccgggcctggcccaccaagctggagtgggagcggcacaagatccgggcccggcagaacagagcctacctggagcgggactgcccagcccagctgcagcagctgctggagctgggccggggcgtgctggaccagcaggtgccccccctggtgaaggtgacccaccacgtgaccagctctgtgaccaccctgcgctgccgggccctgaactactacccccagaacatcaccatgaagtggctgaaggacaagcagcccatggatgccaaggagtttgagcccaaggatgtgctgcccaatggagatggcacctaccagggctggatcaccctggccgtgcccccaggagaggagcagcgctacacctgccaggtggagcaccctggcctggaccagcccctcatcgtcatctgggagcccagccccagcggcaccctggtgattggagtcatctctggaattgctgtgtttgtggtgatcctcttcatcggcatcctcttcatcatcctgaggaagaggcagggcagcagcttctag

SEQ ID NO: 112533 - DNA, 1014 bp, Artificial Sequence
  derived and/or modified sequence
atgggcccccgggcccggcccgccctgctgctgctgatgctgctgcagacagcagtacttcagggcaggcttttgcgtagccactctcttcactatctgttcatgggtgcatccgaacaggaccttggcctaagcctcttcgaggcattagggtacgtggacgaccaactgtttgtattctacgatcacgagtctcggcgtgtggaaccacggactccatgggtgagttccagaatcagttcccaaatgtggctgcagctatcccagtcactgaaaggctgggatcacatgttcacggtagatttctggaccattatggagaaccataaccactcaaaggaatcacacactctccaggtcatcctgggttgtgagatgcaggaggataatagcaccgaaggctactggaagtatggctacgacggacaggatcatctcgagttttgcccagataccctcgactggcgggctgctgagccacgagcctggcctacaaagttagagtgggagcggcataagattcgagcccgtcagaacagggcatacctggagagggattgtcccgctcagttacagcagctcctcgagctagggcgaggcgttttggaccagcaggtgcctccccttgttaaagtgacgcaccatgtcacctcttcagtgacaacactgcgatgtagagccctcaactattaccctcagaatatcaccatgaaatggctaaaggataagcaacctatggatgctaaggagttcgagcctaaagacgtgctgcccaacggtgacggcacttaccaaggttggatcactctggctgtgccaccaggagaggaacaaagatacacttgtcaagtcgaacaccccggtctggatcagcccttaatcgtcatatgggaaccctctccgagcggtactctggtgattggagtgatctctggcattgccgtcttcgtggtcattctgtttatcggtattctgtttatcatcttacggaagcgccaaggatcctcattctag

SEQ ID NO: 112534 - DNA, 1158 bp, Artificial Sequence
  derived and/or modified sequence
aaatgggcccgcgagccaggccggcgcttctcctcctgatgcttttgcagaccgcggtcctgcaggggcgcttgctgcgttcacactctctgcactacctcttcatgggtgcctcagagcaggaccttggtctttccttgtttgaagctttgggctacgtggatgaccagctgttcgtgttctatgatcatgagagtcgccgtgtggagccccgaactccatgggtttccagtagaatttcaagccagatgtggctgcagctgagtcagagtctgaaagggtgggatcacatgttcactgttgacttctggactattatggaaaatcacaaccacagcaaggagtcccacaccctgcaggtcatcctgggctgtgaaatgcaagaagacaacagtaccgagggctactggaagtacgggtatgatgggcaggaccaccttgaattctgccctgacacactggattggagagcagcagaacccagggcctggcccaccaagctggagtgggaaaggcacaagattcgggccaggcagaacagggcctacctggagagggactgccctgcacagctgcagcagttgctggagctggggagaggtgttttggaccaacaagtgcctcctttggtgaaggtgacacatcatgtgacctcttcagtgaccactctacggtgtcgggccttgaactactacccccagaacatcaccatgaagtggctgaaggataagcagccaatggatgccaaggagttcgaacctaaagacgtattgcccaatggggatgggacctaccagggctggataaccttggctgtaccccctggggaagagcagagatatacgtgccaggtggagcacccaggcctggatcagcccctcattgtgatctgggagccctcaccgtctggcaccctagtcattggagtcatcagtggaattgctgtttttgtcgtcatcttgttcattggaattttgttcataatattaaggaagaggcagggttcaagtttctgagttcctgcatgccggtgatccctagctgtgacctctcccctggaactgtctctcatgaacctcaagctgcatctagaggcttccttcatttcctccgtcacctcagagacatacacctatgtcatttcatttcctatttttg

SEQ ID NO: 112535 - DNA, 841 bp, Artificial Sequence
  derived and/or modified sequence
ctaaagttctgaaagacctgttgcttttcaccaggaagttttactgggcatctcctgagcctaggcaatagctgtagggtgacttctggagccatccccgtttccccgccccccaaaagaagcggagatttaacggggacgtgcggccagagctggggaaatgggcccgcgagccaggccggcgcttctcctcctgatgcttttgcagaccgcggtcctgcaggggcgcttgctgcgttcacactctctgcactacctcttcatgggtgcctcagagcaggaccttggtctttccttgtttgaagctttgggctacgtggatgaccagctgttcgtgttctatgatcatgagagtcgccgtgtggagccccgaactccatgggtttccagtagaatttcaagccagatgtggctgcagctgagtcagagtctgaaagggtgggatcacatgttcactgttgacttctggactattatggaaaatcacaaccacagcaaggagtcccacaccctgcaggtcatcctgggctgtgaaatgcaagaagacaacagtaccgagggctactggaagtacgggtatgatgggcaggaccaccttgaattctgccctgacacactggattggagagcagcagaacccagggcctggcccaccaagctggagtgggaaaggcacaagattcgggccaggcagaacagggcctacctggagagggactgccctgcacagctgcagcagttgctggagctggggagaggtgttttggaccaacaagtgcctcctttggtgaaggtgacacatcatgtgagccaccctgcccagccgtcaaaagagtcttaa

SEQ ID NO: 112536 - DNA, 1014 bp, Artificial Sequence
  derived and/or modified sequence
atgggcccaagggccaggccagctctccttctgctgatgcttctgcagactgccgtcctccagggccgtctcttaagatcacattcacttcattacctgttcatgggcgcatctgaacaagatttagggctgtcgctgttcgaggccctgggctacgtggatgatcagctctttgttttctatgatcatgaaagccgaagagtcgaaccgcgaacaccttgggtctcaagtcgaatttcatctcaaatgtggctacagttatcacagtctctgaagggttgggaccatatgttcactgtggacttttggaccataatggagaatcataatcatagtaaagagagccacacacttcaggtaatcctgggatgcgaaatgcaagaagacaattcaacagaggggtactggaaatacgggtacgacgggcaggatcacttagagttttgtccggacactctggactggagagccgctgaaccacgggcttggccaaccaaactggagtgggagaggcacaaaatccgcgctagacaaaatagggcatacttggagcgggactgccccgcacagctccagcaactgctggagctcggcaggggcgtgttggaccagcaggtccctcccctcgtcaaggtgactcaccacgtgacctcatcagtcaccaccctcaggtgtcgcgcacttaactattatccacagaatatcactatgaaatggctcaaggacaagcaaccaatggatgctaaggagttcgaaccaaaggatgtactcccaaacggggatggaacctaccagggatggataactcttgctgtgccccctggcgaggagcagcgttatacctgccaggtcgaacatcccggtctcgatcaacccttgattgtgatttgggaacccagtccatccggcaccttggtcatcggagtcatctcgggaatcgctgtgttcgttgtcatcctcttcatcggcattctttttatcatcctgcgcaagcgccaggggtcctctttctag

SEQ ID NO: 112537 - protein, 417 aa, Artificial Sequence
  derived and/or modified sequence
MGDEDKRITYEDSEPSTGMNYTPSMHQEAQEETVMKLKGIDANEPTEGSILLKSSEKKLQETPTEANHVQRLRQMLACPPHGLLDRVITNGMLLAGFLIRNIPVINDNVQIKHKWSSSLRSIALSIILVRAGLGLDSKALKKLKGVCVRLSMGPCIVEACTSALLAHYLLGLPWQWGFILGFVLGAVSPAVVVPSMLLLQGGGYGVEKGVPTLLMAAGSFDDILAITGFNTCLGIAFSTGSTVFNVLRGVLEVVIGVATGSVLGFFIQYFPSRDQDKLVCKRTFLVLGLSVLAVFSSVHFGFPGSGGLCTLVMAFLAGMGWTSEKAEVEKIIAVAWDIFQPLLFGLIGAEVSIASLRPETVGCNRICGFGHSKVTWRETIRRLWNGCVDSGIFVHPHHSPNWKSAYWFTGPQASAES

SEQ ID NO: 112538 - DNA, 1254 bp, Artificial Sequence
  derived and/or modified sequence
atgggcgacgaggacaagagaatcacctacgaggacagcgagcccagcaccggcatgaactacacccccagcatgcaccaggaggcccaggaggagaccgtgatgaagctgaagggcatcgacgccaacgagcccaccgagggcagcatcctgctgaagagcagcgagaagaagctgcaggagacccccaccgaggccaaccacgtgcagagactgagacagatgctggcctgccccccccacggcctgctggacagagtgatcaccaacggcatgctgctggccggcttcctgatcagaaacatccccgtgatcaacgacaacgtgcagatcaagcacaagtggagcagcagcctgagaagcatcgccctgagcatcatcctggtgagagccggcctgggcctggacagcaaggccctgaagaagctgaagggcgtgtgcgtgagactgagcatgggcccctgcatcgtggaggcctgcaccagcgccctgctggcccactacctgctgggcctgccctggcagtggggcttcatcctgggcttcgtgctgggcgccgtgagccccgccgtggtggtgcccagcatgctgctgctgcagggcggcggctacggcgtggagaagggcgtgcccaccctgctgatggccgccggcagcttcgacgacatcctggccatcaccggcttcaacacctgcctgggcatcgccttcagcaccggcagcaccgtgttcaacgtgctgagaggcgtgctggaggtggtgatcggcgtggccaccggcagcgtgctgggcttcttcatccagtacttccccagcagagaccaggacaagctggtgtgcaagagaaccttcctggtgctgggcctgagcgtgctggccgtgttcagcagcgtgcacttcggcttccccggcagcggcggcctgtgcaccctggtgatggccttcctggccggcatgggctggaccagcgagaaggccgaggtggagaagatcatcgccgtggcctgggacatcttccagcccctgctgttcggcctgatcggcgccgaggtgagcatcgccagcctgagacccgagaccgtgggctgcaacagaatctgcggcttcggccacagcaaggtgacctggagagagaccatcagaagactgtggaacggctgcgtggacagcggcatcttcgtgcacccccaccacagccccaactggaagagcgcctactggttcaccggcccccaggccagcgccgagagctag

SEQ ID NO: 112539 - DNA, 1254 bp, Artificial Sequence
  derived and/or modified sequence
atgggtgatgaggataagagaattacgtacgaagactccgaaccatctactgggatgaactacaccccgagtatgcaccaggaggcccaggaggagactgtgatgaagctgaaaggcatcgatgcgaatgagccgacagagggatccattctgttgaaaagctctgagaaaaaactgcaggaaactcccacagaggctaatcatgtgcaaaggttgaggcaaatgctagcctgtcctccgcacggtctgttagatcgggtgattacaaacgggatgctgctggccggattcctaattcgcaacatccctgtcattaatgacaacgtacagattaagcacaagtggtctagctcccttcggtctattgccctaagtattattctggtcagggcggggctcgggctcgacagcaaagccctcaaaaagctgaaaggggtgtgtgttcgcttgtctatggggccctgtattgtagaagcgtgcacctccgcactgcttgctcattatttgctaggcctgccatggcaatggggattcatactgggattcgtactcggggctgtatctcctgccgtcgtcgttcccagtatgttgctgcttcagggtggtggttatggggtcgaaaaaggcgtcccgactctgcttatggccgccggtagtttcgatgatatcctggccatcaccggcttcaacacatgtctgggtatcgctttttccactggatccaccgtttttaacgtactgcgcggcgtgctcgaagtggtcatcggggtggctaccgggtctgtcttgggcttcttcatccagtactttcctagtcgtgaccaggacaagctcgtgtgtaagcggacctttctggtactgggcctgagtgtcttagcggttttctcttcagtgcacttcgggtttccgggcagtgggggattgtgcaccttggtgatggcctttttagccggtatgggttggactagcgaaaaggccgaagtggagaaaatcattgccgtggcctgggatatcttccagcccctcctattcgggttaatcggagccgaggttagcatcgcgtccttgcggccagagactgtcggatgcaatcgtatttgtgggttcgggcatagtaaggtcacttggcgcgaaactatacgaagattatggaacggctgcgttgattcagggatatttgtgcacccacatcactcccccaactggaagtccgcgtattggtttaccggcccccaggccagcgccgagagttag

SEQ ID NO: 112540 - DNA, 1254 bp, Artificial Sequence
  derived and/or modified sequence
atgggagatgaggacaagaggatcacctatgaagattctgagcccagcacaggcatgaactacacccccagcatgcaccaggaggcccaggaggagaccgtgatgaagctgaagggcattgatgccaatgagcccacagagggcagcatcctgctgaagagcagcgagaagaagctgcaggagacccccacagaggccaaccacgtgcagaggctgcggcagatgctggcctgcccccctcatggcctgctggacagagtcatcaccaacggcatgctgctggccggcttcctgatccggaacatccctgtgatcaatgacaacgtgcagatcaagcacaagtggagcagcagcctgcggagcatcgccctgagcatcatcctggtgcgggccggcctgggcctggacagcaaggccctgaagaagctgaagggcgtgtgtgtgcggctgtccatgggcccctgcatcgtggaggcctgcaccagcgccctgctggcccactacctgctgggcctgccctggcagtggggcttcatcctgggctttgtgctgggcgctgtgtccccagctgtggtggtgcccagcatgctgctgctgcagggcggcggctacggcgtggagaagggcgtgcccaccctgctgatggctgctggcagctttgatgacatcctggccatcaccggcttcaacacctgcctgggcatcgccttcagcacaggcagcaccgtcttcaacgtgctgcggggcgtgctggaggtggtgattggagtggccactggatctgtgctgggcttcttcatccagtacttccccagccgggaccaggacaagctggtgtgcaagaggaccttcctggtgctgggcctgtctgtgctggccgtgttcagctctgtgcacttcggcttccctggcagcggcggcctgtgcaccctggtgatggccttcctggccggcatgggctggaccagcgagaaggccgaggtggagaagatcatcgctgtggcctgggacatcttccagcccctgctgtttggcctgattggagctgaggtgtccatcgccagcctgcggcctgagaccgtgggctgcaaccgcatctgtggcttcggccacagcaaggtgacctggagggagaccatccggcggctgtggaatggctgtgtggacagcggcatctttgtgcacccccaccacagccccaactggaagagcgcctactggttcaccggcccccaggccagcgctgagagctag

SEQ ID NO: 112541 - DNA, 1254 bp, Artificial Sequence
  derived and/or modified sequence
atgggcgacgaggacaagcggatcacctacgaggacagcgagccctccactgggatgaattatacaccttccatgcatcaggaggctcaggaagagaccgtcatgaagctcaagggcatcgatgcaaacgagcccaccgaaggaagtatcctcttgaagtctagcgagaaaaagctgcaggaaacaccaacggaggctaatcatgtacaacgactacggcagatgttggcctgcccacctcatggtctcctcgaccgcgttattaccaatggaatgctgctcgctggatttttaatccgcaacattccagtgatcaacgataatgtccagatcaagcacaaatggagttcttccctgcgtagcatcgctctaagtataatccttgttagagctggactgggacttgactcaaaagccctgaaaaagctgaaaggcgtatgcgtacgcttatctatgggaccctgcatcgtagaagcgtgtacgtctgcactgttagcccactatcttctgggccttccctggcaatgggggttcatattgggcttcgtgcttggcgctgtcagcccagccgttgttgtgccctcaatgctgctactacagggaggaggttacggggtggaaaaaggagtgcccacactcctcatggctgcgggcagtttcgacgatatacttgccattaccggattcaatacttgtttaggaattgctttttctacaggatctactgtgttcaacgttctgcgcggagtgcttgaggtggtcattggagttgctaccgggtctgttcttggtttttttatccagtacttcccatcccgcgaccaggataaacttgtgtgtaaaagaacattcttggtgctcgggctaagcgtgctcgccgtgttttcctccgtgcacttcgggtttcctggctccggaggcttgtgtaccctggtgatggcctttttagccggtatggggtggacctccgagaaggccgaggtggagaagattatcgccgtcgcatgggacatctttcagccacttctcttcggcctcatcggcgcagaggtctccattgccagcctgagacctgaaacagtgggctgcaatcgcatttgcggcttcggccattccaaagttacgtggcgtgagactattaggaggctgtggaatggttgtgtggattccgggatcttcgtgcacccccaccattcccctaactggaagagcgcttattggttcactggtcctcaagctagtgcagagagttag

SEQ ID NO: 112542 - DNA, 1254 bp, Artificial Sequence
  derived and/or modified sequence
atgggcgatgaggacaagagaatcacatatgaggacagcgaaccctccaccgggatgaactataccccctctatgcatcaagaagcccaagaggaaaccgtcatgaagctcaaggggatcgacgccaatgagcccaccgaaggatccattttattaaaaagttccgagaagaagcttcaagagacaccaacagaagcaaatcacgtacagcgcctgcgtcagatgctggcttgtccccctcacgggttactagatcgcgtgatcacaaacggcatgctgcttgccggattcctcattcgtaacatccctgtcatcaatgacaatgtacagatcaagcataagtggtctagctccctccgatccattgccttgtctatcatactggttcgcgctggactgggccttgattccaaagcacttaagaaactgaaaggagtgtgcgtcaggctgtctatggggccatgtatcgtcgaagcatgtactagcgccctcctagctcactacctgctgggcctgccctggcaatggggctttattctggggttcgttcttggggctgtgtcccccgcagtggtggtaccctccatgctgctcttgcagggaggtggctatggtgttgagaagggagtcccaacccttttgatggccgctggttcctttgatgatatacttgcgataacagggtttaatacttgtctgggcattgcctttagcaccgggtccactgtgttcaacgtattgcgcggagtgctggaggtcgttataggcgtggccaccggttcagtgttaggatttttcatccagtacttcccgtcccgggatcaggataagctcgtctgtaaacgtacttttctggtgctcggccttagcgtcctggcagtctttagcagcgtgcattttggattcccgggatcaggcggtctgtgtacactcgtgatggcgttcttggctggcatgggctggacatctgagaaagccgaggttgagaaaatcatcgccgtagcctgggacatctttcagcctctcctgttcggactgatcggggcagaggtgtccatcgccagtctccgtcccgagactgtcggatgtaaccgaatctgcgggttcggccattccaaggttacttggcgcgagaccatacggcgtctctggaacggatgtgtcgacagtgggatattcgtccacccccaccacagccccaattggaaatccgcctactggttcacagggccacaggcctccgctgagtcttag

SEQ ID NO: 112543 - DNA, 1911 bp, Artificial Sequence
  derived and/or modified sequence
agtcaacgcagcctcccggctcagcctgggaagatgcgcgaatcgggaaccccagagcgcggtggctagaccgggctccgccgcctcccccacagcccctttcctaatcgttcagacggagcctggtcgacttcgccggagactgccagatctcgttcctcttccctgtgtcatcttcttaattataaataatgggggatgaagataaaagaattacatatgaagattcagaaccatccacaggaatgaattacacgccctccatgcatcaagaagcacaggaggagacagttatgaagctcaaaggtatagatgcaaatgaaccaacagaaggaagtattcttttgaaaagcagtgaaaaaaagctacaagaaacaccaactgaagcaaatcacgtacaaagactgagacaaatgctggcttgccctccacatggtttactggacagggtcataacaaatggcatgctgcttgcagggtttctcatcagaaatatcccagtcatcaacgataatgtgcagatcaagcacaagtggtcttcctctttgagaagcatagccctgtctatcattctggttcgtgctggccttggtctggattcaaaggccctgaagaagttaaagggcgtttgtgtaagactgtccatgggtccctgtattgtggaggcgtgcacatctgctcttcttgcccattacctgctgggtttaccatggcaatggggatttatactgggttttgttttaggtgctgtatctccagctgttgtggtgccttcaatgctccttttgcagggaggaggctatggtgttgagaagggtgtcccaaccttgctcatggcagctggcagcttcgatgacattctggccatcactggcttcaacacatgcttgggcatagccttttccacaggctctactgtctttaatgtcctcagaggagttttggaggtggtaattggtgtggcaactggatctgttcttggatttttcattcagtactttccaagccgtgaccaggacaaacttgtgtgtaagagaacattccttgtgttggggttgtctgtgctagctgtgttcagcagtgtgcattttggtttccctggatcaggaggactgtgcacgttggtcatggctttccttgcaggcatgggatggaccagcgaaaaggcagaggttgaaaagataattgcagttgcctgggacatttttcagccccttctttttggactaattggagcagaggtatctattgcatctctcagaccagaaactgtaggctgcaataggatctgtggctttggacacagcaaggtcacatggagagaaacaattagaagactatggaatggatgtgttgacagtggcatttttgtccatcctcatcacagccccaattggaagtctgcttattggtttactgggccccaggcttctgcagaaagttgaacatcaaaataaagatgaagaagttcaaggagagacttctgtgcaagtttagaggtgaaaagagagagtgctgaacataatgtttagaaagctgctacttttttcaagatgcatattgaaatatgtaatgtttaagcttaaaatgtaatagaaccaaaagtgtagctgtttctttaaacagcatttttagcccttgctctttccatgtgggtggtaatgatctatatcaccaaccttaatctctctgccttttttttcaaacaccccttcatcatccatcttaatttgcataaggacatatctactttaatgtactaccacagtttacagttaatgtgggaaagaccagcttcagtatcctcttcagctaggattgccctaacttttaactttcacagtttcctgattcatatttgcccaggctctgatgccttgaattggttttggctctcttttttggatctgt

SEQ ID NO: 112544 - protein, 475 aa, Artificial Sequence
  derived and/or modified sequence
MTTLPPLPMTRPKLTALARQKLPCSSRKIPRSQLIKEKDDIDHYLEVNFKGLSKEEVAAYRNSYKKNICVDMLRDGYHKSFTELFALMERWDALREAARVRSLFWLQKPLEEQPDKLDYLYHYLTRAEDAERKESFEDVHNNLYALACYFNNSEDKWVRNHFYERCFKIAQLIKIDCGKKEAEAHMHMGLLYEEDGQLLEAAEHYEAFHQLTQGRIWKDETGRSLNLLACESLLRTYRLLSDKMLENKEYKQAIKILIKASEIAKEGSDKKMEAEASYYLGLAHLAAEEYETALTVLDTYCKISTDLDDDLSLGRGYEAIAKVLQSQGEMTEAIKYLKKFVKIARNNFQSLDLVRASTMLGDIYNEKGYYNKASECFQQAFDTTVELMSMPLMDETKVHYGIAKAHQMMLTVNNYIESADLTSLNYLLSWKESRGNIEPDPVTEEFRGSTVEAVSQNSERLEELSRFPGDQKNET

SEQ ID NO: 112545 - protein, 319 aa, Artificial Sequence
  derived and/or modified sequence
MTTLPPLPMTRPKLTALARQKLPCSSRKIPRSQLIKEKDDIDHYLEVNFKGLSKEEVAAYRNSYKKNICVDMLRDGYHKSFTELFALMERWDALREAARVRSLFWLQKPLEEQPDKLDYLYHYLTRAEDAERKESFEDVHNNLYALACYFNNSEDKWVRNHFYERCFKIAQLIKIDCGKKEAEAHMHMGLLYEEDGQLLEAAEHYEAFHQLTQGRIWKDETGRSLNLLACESLLRTYRLLSDKMLENKEYKQAIKILIKASEIAKEGSDKKMEAEASYYLGLAHLAAEEYETALTVLDTYCKSPQTWMMISVWGEAMKP

SEQ ID NO: 112546 - protein, 501 aa, Artificial Sequence
  derived and/or modified sequence
MIPMFTVTLEDSGTLWKSLHSSSESEMTTLPPLPMTRPKLTALARQKLPCSSRKIPRSQLIKEKDDIDHYLEVNFKGLSKEEVAAYRNSYKKNICVDMLRDGYHKSFTELFALMERWDALREAARVRSLFWLQKPLEEQPDKLDYLYHYLTRAEDAERKESFEDVHNNLYALACYFNNSEDKWVRNHFYERCFKIAQLIKIDCGKKEAEAHMHMGLLYEEDGQLLEAAEHYEAFHQLTQGRIWKDETGRSLNLLACESLLRTYRLLSDKMLENKEYKQAIKILIKASEIAKEGSDKKMEAEASYYLGLAHLAAEEYETALTVLDTYCKISTDLDDDLSLGRGYEAIAKVLQSQGEMTEAIKYLKKFVKIARNNFQSLDLVRASTMLGDIYNEKGYYNKASECFQQAFDTTVELMSMPLMDETKVHYGIAKAHQMMLTVNNYIESADLTSLNYLLSWKESRGNIEPDPVTEEFRGSTVEAVSQNSERLEELSRFPGDQKNET

SEQ ID NO: 112547 - DNA, 1428 bp, Artificial Sequence
  derived and/or modified sequence
atgaccaccctgccccccctgcccatgaccagacccaagctgaccgccctggccagacagaagctgccctgcagcagcagaaagatccccagaagccagctgatcaaggagaaggacgacatcgaccactacctggaggtgaacttcaagggcctgagcaaggaggaggtggccgcctacagaaacagctacaagaagaacatctgcgtggacatgctgagagacggctaccacaagagcttcaccgagctgttcgccctgatggagagatgggacgccctgagagaggccgccagagtgagaagcctgttctggctgcagaagcccctggaggagcagcccgacaagctggactacctgtaccactacctgaccagagccgaggacgccgagagaaaggagagcttcgaggacgtgcacaacaacctgtacgccctggcctgctacttcaacaacagcgaggacaagtgggtgagaaaccacttctacgagagatgcttcaagatcgcccagctgatcaagatcgactgcggcaagaaggaggccgaggcccacatgcacatgggcctgctgtacgaggaggacggccagctgctggaggccgccgagcactacgaggccttccaccagctgacccagggcagaatctggaaggacgagaccggcagaagcctgaacctgctggcctgcgagagcctgctgagaacctacagactgctgagcgacaagatgctggagaacaaggagtacaagcaggccatcaagatcctgatcaaggccagcgagatcgccaaggagggcagcgacaagaagatggaggccgaggccagctactacctgggcctggcccacctggccgccgaggagtacgagaccgccctgaccgtgctggacacctactgcaagatcagcaccgacctggacgacgacctgagcctgggcagaggctacgaggccatcgccaaggtgctgcagagccagggcgagatgaccgaggccatcaagtacctgaagaagttcgtgaagatcgccagaaacaacttccagagcctggacctggtgagagccagcaccatgctgggcgacatctacaacgagaagggctactacaacaaggccagcgagtgcttccagcaggccttcgacaccaccgtggagctgatgagcatgcccctgatggacgagaccaaggtgcactacggcatcgccaaggcccaccagatgatgctgaccgtgaacaactacatcgagagcgccgacctgaccagcctgaactacctgctgagctggaaggagagcagaggcaacatcgagcccgaccccgtgaccgaggagttcagaggcagcaccgtggaggccgtgagccagaacagcgagagactggaggagctgagcagattccccggcgaccagaagaacgagacctag

SEQ ID NO: 112548 - DNA, 1506 bp, Artificial Sequence
  derived and/or modified sequence
atgatccccatgttcaccgtgaccctggaggacagcggcaccctgtggaagagcctgcacagcagcagcgagagcgagatgaccaccctgccccccctgcccatgaccagacccaagctgaccgccctggccagacagaagctgccctgcagcagcagaaagatccccagaagccagctgatcaaggagaaggacgacatcgaccactacctggaggtgaacttcaagggcctgagcaaggaggaggtggccgcctacagaaacagctacaagaagaacatctgcgtggacatgctgagagacggctaccacaagagcttcaccgagctgttcgccctgatggagagatgggacgccctgagagaggccgccagagtgagaagcctgttctggctgcagaagcccctggaggagcagcccgacaagctggactacctgtaccactacctgaccagagccgaggacgccgagagaaaggagagcttcgaggacgtgcacaacaacctgtacgccctggcctgctacttcaacaacagcgaggacaagtgggtgagaaaccacttctacgagagatgcttcaagatcgcccagctgatcaagatcgactgcggcaagaaggaggccgaggcccacatgcacatgggcctgctgtacgaggaggacggccagctgctggaggccgccgagcactacgaggccttccaccagctgacccagggcagaatctggaaggacgagaccggcagaagcctgaacctgctggcctgcgagagcctgctgagaacctacagactgctgagcgacaagatgctggagaacaaggagtacaagcaggccatcaagatcctgatcaaggccagcgagatcgccaaggagggcagcgacaagaagatggaggccgaggccagctactacctgggcctggcccacctggccgccgaggagtacgagaccgccctgaccgtgctggacacctactgcaagatcagcaccgacctggacgacgacctgagcctgggcagaggctacgaggccatcgccaaggtgctgcagagccagggcgagatgaccgaggccatcaagtacctgaagaagttcgtgaagatcgccagaaacaacttccagagcctggacctggtgagagccagcaccatgctgggcgacatctacaacgagaagggctactacaacaaggccagcgagtgcttccagcaggccttcgacaccaccgtggagctgatgagcatgcccctgatggacgagaccaaggtgcactacggcatcgccaaggcccaccagatgatgctgaccgtgaacaactacatcgagagcgccgacctgaccagcctgaactacctgctgagctggaaggagagcagaggcaacatcgagcccgaccccgtgaccgaggagttcagaggcagcaccgtggaggccgtgagccagaacagcgagagactggaggagctgagcagattccccggcgaccagaagaacgagacctag

SEQ ID NO: 112549 - DNA, 81 bp, Artificial Sequence
  derived and/or modified sequence
atgaccaccctgccccccctgcccatgaccagacccaagctgaccgccctggccagacagaagctgccctgcagcagctag

SEQ ID NO: 112550 - DNA, 1428 bp, Artificial Sequence
  derived and/or modified sequence
atgaccaccctcccccctctgccaatgacgcgccccaaactcactgccctcgcaagacaaaagttaccttgttccagtaggaaaatccccagaagtcagctcataaaggagaaggatgacattgatcactacctggaagttaacttcaaggggctgtcaaaggaggaggtcgccgcttatcgaaactcctataagaaaaacatttgtgtggacatgctccgggacgggtaccataagtcgtttacggaactctttgctctcatggaaaggtgggatgcgctgcgggaggctgcccgggttagatcactgttctggttacagaaaccgctggaagaacagcctgataaactcgactacctctaccattacctgactagagcagaagatgccgagcggaaggaaagcttcgaagatgtgcacaataacctctacgctctagcctgttatttcaacaatagtgaggataagtgggtgagaaatcacttctatgagagatgtttcaagatcgcccagttgattaaaatcgactgtggcaaaaaggaggctgaggctcatatgcacatgggtctgctgtatgaagaagacggccagctcctggaggctgctgagcactacgaggctttccaccaattaacccaggggcgcatctggaaggacgaaaccgggcgctctttgaacctgctagcatgcgagtcccttcttagaacttataggctgctgagcgacaaaatgctggagaataaggaatacaagcaggcaataaagatcttgattaaggcctcagagattgccaaggagggcagtgacaagaaaatggaggcagaagctagttactacctgggccttgcccatctcgcagccgaggaatacgagactgctctcactgtcctggatacatactgcaagattagcacagatttagacgatgacctgtctctgggacgcggttacgaggccatcgccaaagtgcttcagtcacaaggggagatgactgaagctatcaaatacctgaaaaagttcgtgaagattgcccggaacaattttcagtcccttgatctggtccgggctagtacaatgctgggtgacatatataacgagaagggctattataacaaggccagcgaatgtttccaacaagcatttgatactaccgttgaactgatgtccatgcctctgatggatgaaacgaaggtgcactatggaatcgccaaggcccatcagatgatgttaaccgtcaacaattacattgaaagcgcagacctgaccagtttgaactacctgttgagctggaaggagtctaggggcaacatcgagcccgaccccgttaccgaggagttcagggggtccacagtcgaagccgtgagccagaactccgaaagacttgaggaactcagccgattccccggagaccagaaaaatgagacctag

SEQ ID NO: 112551 - DNA, 1506 bp, Artificial Sequence
  derived and/or modified sequence
atgatccccatgttcacagtgactctcgaggacagtggtaccctttggaagagcctccacagcagctctgagtcggaaatgacgaccttgcccccccttcccatgacacggccaaagttgaccgcgctggcccgacaaaagctgccatgttcaagccgcaagatcccaaggagccaacttattaaggaaaaggacgacattgaccattacctggaggtgaatttcaagggactatctaaagaagaggtggccgcatatagaaactcctataaaaaaaacatctgtgtggatatgctgcgcgacggctaccacaaatcgtttacggagctattcgcattaatggaacgatgggacgccctccgggaagcagcaagggtgagatctctgttctggctccaaaaacctctagaggagcagccagacaagctcgactatttgtaccactatctcacccgcgcggaggatgcagagcgtaaggagtcatttgaagatgtgcacaacaatctttatgccctcgcctgctatttcaacaattcggaagataagtgggtgagaaaccacttttatgagcgctgcttcaagatagcccagcttattaagattgattgtgggaaaaaagaggcggaggcacatatgcatatgggccttctttacgaggaggacggccaactcctggaagctgcggagcactatgaggctttccaccagttgactcagggacgcatctggaaagacgaaactggaagaagcttgaaccttctggcctgtgaatcgctgctgcggacttatcgcctgctgtcagacaaaatgttagaaaacaaagaatacaaacaagcaattaagatcttgataaaggctagtgagattgctaaagagggctcagacaaaaagatggaagccgaggcatcgtactatctcggccttgcacacttagcagccgaggagtatgaaacggctctgaccgtgttagacacgtattgtaaaataagtacagatctcgatgacgatctgtcactgggccggggatacgaagccatcgccaaggtgctacagtcccagggggagatgacagaggctataaagtacctgaaaaaatttgtgaagatcgcccgaaataacttccagagcctggatttggtgagggcttcaacaatgctgggagacatctacaatgagaaaggatactacaacaaagcctcagaatgtttccagcaagcctttgacacaactgtagaattaatgtccatgccacttatggatgagacgaaggttcactatggaatcgccaaggcccaccaaatgatgcttaccgtaaacaattacatcgaaagcgcagacctgaccagtcttaactacctcctcagttggaaggagtcgagagggaatatcgagccagacccagtcacagaggaatttcggggttccaccgtcgaagctgtctctcagaacagcgagaggcttgaagaactctcaagatttcccggagaccagaagaatgaaacatag

SEQ ID NO: 112552 - DNA, 81 bp, Artificial Sequence
  derived and/or modified sequence
atgactactctacctccgctgcctatgacacgacctaagttgactgctcttgcaagacagaagttgccctgctcttcctag

SEQ ID NO: 112553 - DNA, 1506 bp, Artificial Sequence
  derived and/or modified sequence
atgatcccgatgtttactgtaactcttgaggactctggtactctgtggaagtccctccactcgagctcggaatcggaaatgaccactctgccaccgttacccatgactaggccaaaactcaccgccctggccagacagaagctgccttgctcatctcgcaaaattcccagaagccaattgattaaggaaaaggacgacatagaccactatctggaggtaaactttaaaggtttgtcaaaggaggaagtagccgcctatcgaaattcctataaaaagaatatctgcgtggatatgttgagggacgggtaccacaagagttttacggaactgttcgccctgatggagcggtgggacgcgctgcgcgaagcggcccgtgtgaggtctctgttttggttgcaaaaacctttggaagagcagccagacaagctcgactacctgtatcactacctaacacgagctgaggatgcagagagaaaagagagctttgaggatgtgcacaacaatctgtacgcgctggcctgctactttaacaacagcgaagacaagtgggtccgtaaccacttttatgaacggtgtttcaagatcgctcaacttataaaaatagattgcggaaagaaagaagctgaagcccacatgcacatggggctcctctacgaggaggacggtcaactgctagaggcagctgagcactacgaagccttccaccagttgacgcaagggcgaatttggaaagacgagaccggccgcagtctgaatctgttagcctgtgaaagccttctgcgcacttatcgcttgctcagtgataaaatgttggaaaataaagagtacaagcaggcgatcaaaatccttatcaaggcttccgaaatcgctaaggagggatctgataaaaagatggaggctgaggcttcctactacttgggcttggcacacctggccgcggaagagtacgaaaccgcactgacagtcctggacacttactgtaagatatccactgatttggatgacgatctttcgctcggtagaggatatgaggccatcgccaaggttttacagtctcagggcgaaatgactgaggccataaaatacttaaaaaaatttgtgaaaattgcacgaaacaattttcagagcctcgacctggtccgcgcctctacaatgctcggcgatatctataacgagaaaggctactataataaagccagcgagtgtttccagcaggccttcgacacaaccgtggaactaatgagtatgcctttaatggatgagacaaaggtgcactacggaattgcgaaggctcatcagatgatgctcactgtgaacaactacatcgagagtgcggatctgactagcctcaattacctgctgagttggaaagaatcgcggggcaatattgaacccgaccctgtcacagaggagttcagagggtccactgtcgaggctgtgtctcagaattccgaacgcctggaggagttgtccagatttccgggggaccagaagaatgagacctag

SEQ ID NO: 112554 - DNA, 1428 bp, Artificial Sequence
  derived and/or modified sequence
atgaccaccctgccccccctgcccatgacccggcccaagctgacagccctggcccggcagaagctgccctgcagcagcaggaagatccccaggagccagctgatcaaggagaaggatgacatcgaccactacctggaggtgaacttcaagggcctgagcaaggaggaggtggccgcctacagaaattcctacaagaagaacatctgtgtggacatgctgagagatggctaccacaagagcttcacagagctgtttgccctgatggagcgctgggatgccctgcgggaggccgcccgggtgcgcagcctcttctggctgcagaagcccctggaggagcagcctgacaagctggactacctgtaccactacctgaccagggcagaagatgctgagaggaaggagagctttgaagatgtgcacaacaacctgtatgccctggcctgctacttcaacaacagcgaggacaagtgggtgaggaaccacttctatgagcgctgcttcaagatcgcccagctgatcaagattgactgtgggaagaaggaggccgaggcccacatgcacatgggcctgctgtatgaggaggatggccagctgctggaggccgctgagcactatgaggccttccaccagctgacccagggccgcatctggaaggatgaaacaggccgcagcctgaacctgctggcctgtgagagcctgctgcggacctaccgcctgctgagtgacaagatgctggagaacaaggagtacaagcaggccatcaagatcctgatcaaggccagcgagatcgccaaggagggcagtgacaagaagatggaggccgaggccagctactacctgggcctggcccacctggccgctgaggagtatgaaacagccctgactgtgctggacacctactgcaagatcagcacagacctggatgatgacctgagcctgggccggggctatgaggccatcgccaaggtgctgcagagccagggcgagatgacagaggccatcaagtacctgaagaagtttgtgaagatcgccaggaacaacttccagagcctggacctggtgcgggccagcaccatgctgggggacatctacaatgagaagggctactacaacaaggccagcgagtgcttccagcaggcctttgacaccaccgtggagctgatgtccatgcccctgatggatgagaccaaggtgcactacggcatcgccaaggcccaccagatgatgctgactgtgaacaactacatcgagagcgctgacctgaccagcctgaactacctgctgtcctggaaggagagccggggcaacattgaaccagaccctgtgacagaggagttccggggcagcacagtggaggccgtgtcccagaacagcgagcggctggaggagctgagccgcttccctggggaccagaagaatgagacctag

SEQ ID NO: 112555 - DNA, 1506 bp, Artificial Sequence
  derived and/or modified sequence
atgatccccatgttcaccgtgaccctggaggacagcggcaccctgtggaagagcctgcacagcagcagcgagagcgagatgaccaccctgccccccctgcccatgacccggcccaagctgacagccctggcccggcagaagctgccctgcagcagcaggaagatccccaggagccagctgatcaaggagaaggatgacatcgaccactacctggaggtgaacttcaagggcctgagcaaggaggaggtggccgcctacagaaattcctacaagaagaacatctgtgtggacatgctgagagatggctaccacaagagcttcacagagctgtttgccctgatggagcgctgggatgccctgcgggaggccgcccgggtgcgcagcctcttctggctgcagaagcccctggaggagcagcctgacaagctggactacctgtaccactacctgaccagggcagaagatgctgagaggaaggagagctttgaagatgtgcacaacaacctgtatgccctggcctgctacttcaacaacagcgaggacaagtgggtgaggaaccacttctatgagcgctgcttcaagatcgcccagctgatcaagattgactgtgggaagaaggaggccgaggcccacatgcacatgggcctgctgtatgaggaggatggccagctgctggaggccgctgagcactatgaggccttccaccagctgacccagggccgcatctggaaggatgaaacaggccgcagcctgaacctgctggcctgtgagagcctgctgcggacctaccgcctgctgagtgacaagatgctggagaacaaggagtacaagcaggccatcaagatcctgatcaaggccagcgagatcgccaaggagggcagtgacaagaagatggaggccgaggccagctactacctgggcctggcccacctggccgctgaggagtatgaaacagccctgactgtgctggacacctactgcaagatcagcacagacctggatgatgacctgagcctgggccggggctatgaggccatcgccaaggtgctgcagagccagggcgagatgacagaggccatcaagtacctgaagaagtttgtgaagatcgccaggaacaacttccagagcctggacctggtgcgggccagcaccatgctgggggacatctacaatgagaagggctactacaacaaggccagcgagtgcttccagcaggcctttgacaccaccgtggagctgatgtccatgcccctgatggatgagaccaaggtgcactacggcatcgccaaggcccaccagatgatgctgactgtgaacaactacatcgagagcgctgacctgaccagcctgaactacctgctgtcctggaaggagagccggggcaacattgaaccagaccctgtgacagaggagttccggggcagcacagtggaggccgtgtcccagaacagcgagcggctggaggagctgagccgcttccctggggaccagaagaatgagacctag

SEQ ID NO: 112556 - DNA, 81 bp, Artificial Sequence
  derived and/or modified sequence
atgaccaccctgccccccctgcccatgacccggcccaagctgacagccctggcccggcagaagctgccctgcagcagctag

SEQ ID NO: 112557 - DNA, 1428 bp, Artificial Sequence
  derived and/or modified sequence
atgaccaccctgccccccctgcccatgacccggcccaagctgaccgcattggctcgccaaaagttaccgtgtagtagccgcaagatcccaagatctcagcttattaaagagaaagacgacatcgaccattacctggaggtcaattttaaagggctgtccaaagaagaagtagccgcataccgcaactcctacaagaaaaacatctgtgtagacatgttgagagacgggtaccataaaagtttcacagagctcttcgccctcatggagcgctgggacgcactgagggaggctgctagggtcagatccctgttttggctccagaagccactcgaggaacagcccgataagttggattatctgtaccattacctcaccagagctgaagacgcagaaaggaaggaatcctttgaagatgtgcataataatttatatgcactggcctgctactttaacaattcggaggacaaatgggttagaaatcacttctacgagcgatgtttcaaaatcgctcagctaatcaagatcgattgtggtaagaaggaggcagaggctcatatgcatatgggcctgctatatgaagaggacgggcagctgctcgaagccgcagagcactacgaggcatttcatcagctgacccaaggacggatttggaaggatgaaaccggcaggagtctcaatctgcttgcctgcgagagccttctgcggacatacaggcttctcagcgataaaatgttagagaacaaagagtacaaacaggcaatcaagattctgataaaagcatctgaaatcgctaaggaaggttccgataagaaaatggaggcagaggcaagttattacctcggcctggctcacctggcggccgaagagtatgagacggctctgaccgtgctggatacatactgtaaaatttctaccgacctggatgatgacctgtctctgggccgggggtacgaagcaattgcaaaagttctacagtcacagggcgaaatgaccgaagccataaagtaccttaaaaagttcgtgaaaattgcgcggaacaactttcagagcctggatttagtccgggcaagcactatgctcggagatatctacaacgagaagggctactataataaagcaagcgaatgtttccagcaggcttttgatacaacagtcgagcttatgagcatgccactgatggatgaaacaaaggtccactatgggattgctaaagcccatcagatgatgctgaccgtgaataattatattgagagtgcggatctcacatccctcaactatctgctcagctggaaagagagccgcggcaatattgagcccgatcccgtgacagaagaattcaggggctctaccgttgaggcagttagtcagaacagcgaaaggctggaagagttaagccggtttccgggcgaccaaaagaatgagacatag

SEQ ID NO: 112558 - DNA, 1506 bp, Artificial Sequence
  derived and/or modified sequence
atgatccccatgttcaccgtgaccctggaggacagcggcaccctgtggaaatccctgcacagtagttctgagtcagagatgaccacactgccccctctccctatgacccgcccaaagcttactgctctcgcgcgacagaagctgccgtgctcgtcccgtaagattccccgatcccagctcataaaagagaaagatgacattgatcattatctggaagttaacttcaaggggctctccaaagaggaggtcgctgcgtacagaaatagctataaaaagaacatttgcgttgatatgctgcgagacgggtatcacaaatccttcactgagttgttcgccctaatggagcggtgggacgccctccgggaagccgcccgggtccgaagtctgttttggttacagaagccactcgaggaacagcccgacaaactggattatctatatcactacttgacccgcgcagaagacgccgagagaaaggagagttttgaggatgtccataacaatctgtatgcacttgcctgttatttcaataacagtgaggataagtgggtacgcaatcatttctatgaacgctgctttaaaatcgcccagctcataaaaatcgactgtgggaagaaagaagccgaagcccatatgcacatgggcctgctctatgaagaagatggccagctactggaggccgccgaacactatgaagccttccaccagttgacccagggtagaatctggaaagatgagaccggaagaagcctaaacctcctggcctgtgagagtctgctgcgtacctaccggctgctaagcgacaaaatgctggagaataaggagtataagcaggcgatcaagatattaatcaaggctagcgagattgcgaaggaggggagcgacaagaaaatggaagctgaagcctcttattacctgggactggcacatctggcggctgaagagtatgaaacagcactgacggtgcttgacacatactgtaaaatatcaacagaccttgatgatgatctgagcctcgggcgtgggtacgaggctatcgccaaggtgctgcagagccagggcgagatgacggaagccattaagtatctcaaaaagtttgttaaaatcgccagaaataacttccaaagcctggacctcgttcgcgcttcaactatgctgggagacatctataacgagaaagggtactataacaaagcctctgagtgtttccagcaagccttcgacaccactgtcgagcttatgtctatgccgctgatggatgaaacgaaagtgcattatggcatcgccaaggctcatcagatgatgctgactgtcaataattacattgagtctgccgaccttacttcattaaactatctcctaagctggaaagaatcccgcggtaatattgagccagacccggtaacagaggaatttaggggatccacagtagaggctgtgtcacaaaactccgagaggttggaagagctctcgcggttcccaggcgaccagaaaaatgaaacgtag

SEQ ID NO: 112559 - DNA, 81 bp, Artificial Sequence
  derived and/or modified sequence
atgaccaccctgccccccctgcccatgacccggcccaagctgaccgcactggctcgccagaaattgccttgctctagctag

SEQ ID NO: 112560 - DNA, 1506 bp, Artificial Sequence
  derived and/or modified sequence
atgatccccatgttcaccgtgaccctggaggacagcggcaccctgtggaaatctctccattctagctccgagtcagagatgacaacattgccacccctgccaatgacaagacccaaattgaccgcactagcccgccagaagctcccatgcagctctcgcaaaattcccaggtcccagctgatcaaggagaaggacgacatagaccactatttggaagtgaacttcaagggcctgtctaaggaggaagtggcagcctacagaaattcgtacaaaaaaaacatctgtgtggatatgctgagggatgggtaccataagtccttcacagaactattcgcattgatggaaagatgggatgccctgagagaagcagctagggtgagatccctgttttggctccagaagcctctggaagagcagcccgacaagctggactatttgtaccattaccttacgagagccgaggacgccgagagaaaggaaagtttcgaagacgtacataacaacctctatgcattggcctgttattttaataattccgaggacaaatgggttaggaatcatttttatgaacgatgttttaagatcgcccagcttattaagattgactgcgggaagaaggaggctgaagcacacatgcatatgggtcttctgtacgaagaagatggccagttgcttgaggcagctgaacactacgaggccttccatcaactcacccagggcagaatctggaaggacgaaacggggaggtccctgaacctgttagcgtgtgagagtctgttgaggacatatcgcctcttatcagacaagatgcttgaaaataaagaatacaagcaggccatcaagattctcataaaggccagcgagatcgccaaggaaggatccgataaaaagatggaagccgaggcctcttattacctcgggctagctcatcttgccgctgaggaatacgaaacagcattaactgttctcgacacttactgtaaaatcagcaccgatctggacgacgatctgagcttgggccgtggttatgaggctatcgcaaaagtcctgcaatcccaaggagagatgacagaggcaataaagtatctcaagaaattcgtgaaaatcgctcggaacaacttccagtcactggatctggttagagcctccacaatgttaggagacatttacaatgagaaaggctactataacaaagcctctgaatgttttcagcaggcatttgatacaactgtcgaactcatgtccatgccgctgatggacgagaccaaagttcactacggcatagcgaaggcgcatcagatgatgttgaccgttaacaactatattgagagcgcagatttgacaagtctgaactatcttttgagttggaaggagtcccgaggcaacatcgagccagacccagtgacagaggagtttcgggggtctacagtcgaagctgtgagtcagaatagcgagcggttggaagagctctcccgattcccgggggatcagaagaacgagacctag

SEQ ID NO: 112561 - DNA, 1428 bp, Artificial Sequence
  derived and/or modified sequence
atgacgacacttccaccactgccaatgaccaggccaaaactgacggccctggctcgtcagaagctcccttgctccagcaggaagattcctcggtcacagctgatcaaggagaaggacgacatagaccactatctggaagtaaacttcaaaggcctgtctaaagaggaggtcgccgcatatcgcaacagttataaaaagaatatttgcgtggacatgctccgcgatggatatcacaaatctttcaccgaactgttcgcactgatggagagatgggatgccctcagagaagcagccagggttcgaagtcttttttggttacagaaacctctagaggagcagccagacaagctagattacctgtaccattatctcacaagggcagaggatgcagaacgcaaagagagctttgaagacgtgcataataacctctatgcgctcgcctgttatttcaataattcagaagataaatgggtacgtaaccacttctatgaaagatgttttaagatcgcgcagttaatcaagatcgactgcggaaagaaggaggcagaggcccacatgcacatgggactgctctatgaagaggatgggcaactgcttgaagccgcagaacattatgaagccttccaccagctgacgcaagggcgaatttggaaggacgaaacaggaagaagccttaatcttctggcttgtgaaagtctcctgcggacctatcgtctcttatctgacaagatgcttgaaaacaaggagtacaaacaggcaatcaaaattctcattaaggcttcagaaattgctaaagagggtagtgataaaaagatggaggctgaagcctcatattacttggggttagcacacctagccgcagaggaatacgagactgctttaaccgtcctggacacatactgtaagatttccaccgatttagacgacgatctgtccctgggtagaggctacgaagccattgccaaagttttgcagagtcaaggcgagatgactgaggccattaagtatttaaagaagttcgtgaagatcgcccgaaacaacttccagtcactagacctggtgcgggctagcacaatgttgggagacatatataacgaaaagggttattacaataaggcttccgaatgcttccagcaagcgttcgataccactgtcgagttgatgagcatgcccctcatggacgagacgaaggtgcactacgggattgcaaaggcccaccagatgatgctgactgtcaacaactacatagagagtgctgacctgacatcgttgaactacctcctgtcgtggaaagagagccgaggtaatatcgaaccagacccagtcacagaggaatttagaggatccacagtagaagctgtctcccagaatagcgagaggctggaggaactcagccgctttcccggagaccagaaaaatgaaacatag

SEQ ID NO: 112562 - DNA, 1506 bp, Artificial Sequence
  derived and/or modified sequence
atgattcccatgtttactgtgaccttggaagactcaggcaccctgtggaagagcctccacagcagtagcgaaagcgaaatgacgacattaccccctctacctatgactagaccaaagctgaccgccctcgctaggcagaagctgccatgctccagcagaaagatcccaaggagccaactaatcaaagaaaaggatgacatcgatcactacctcgaagtgaacttcaaagggctgagcaaggaggaggtcgcagcgtacaggaactcatacaagaagaacatctgcgtcgatatgctccgagatggatatcacaagagctttacggaactgtttgccctgatggagcgttgggatgcactcagagaggccgcaagagtcagatctctattttggctgcagaagcctctggaggagcagccagacaaactggactacctttaccactatctgactcgcgcagaagacgctgaaagaaaggagtcatttgaagatgtacataacaatctttatgcactcgcttgctatttcaacaactctgaggacaaatgggtacggaatcatttctatgaaagatgctttaagatcgcacagctgattaagattgactgcggtaagaaagaggcagaggcacatatgcatatggggttactttacgaggaggatggccagttattggaagctgctgagcactacgaagccttccaccagctcacccaaggccgaatctggaaagatgaaacgggcaggtctctgaacttacttgcctgcgaatcgcttctgcggacgtaccggctgctgtcagacaagatgctcgagaacaaagagtataaacaggccatcaagatcttgatcaaggcctctgaaatagccaaagaaggctcagacaagaagatggaagcggaggcctcatactacctcgggctggcccatctggccgctgaagaatacgagaccgctcttacagtccttgatacctactgtaagatctcaaccgatttggatgatgatctgtccctgggccgtggctatgaagccattgcgaaagtccttcagtcccagggggaaatgaccgaagctatcaagtatctgaagaaattcgtgaaaattgcccgtaataacttccagagtcttgatttggtgagggccagcactatgctcggtgacatttacaacgaaaaaggttactataataaggccagcgagtgttttcagcaggcgttcgacaccacagtggaacttatgagcatgccacttatggacgaaacaaaggtccattacggcatcgctaaggcccatcagatgatgcttaccgtgaacaattacatcgaatccgctgatctaacttcgctgaactacctgctgtcctggaaagagtcccgtggcaatatcgaaccagaccccgtgaccgaagaatttagagggagtacagttgaagcggtgtcacagaattctgaacggctggaagaattatctcgtttccctggagaccaaaagaatgagacctag

SEQ ID NO: 112563 - DNA, 81 bp, Artificial Sequence
  derived and/or modified sequence
atgaccaccctgcccccattacctatgactcgccctaaattgacagcactggcgaggcagaaattgccctgttcttcttag

SEQ ID NO: 112564 - DNA, 1506 bp, Artificial Sequence
  derived and/or modified sequence
atgatccccatgttcaccgtgactctagaagatagcggtaccctatggaaaagcctgcatagttcttctgagtcagaaatgacaacgctgccgccattacctatgacccgtcccaagcttacggcactcgcccgtcagaagctcccttgctcgagtagaaaaatccccaggagccagctaataaaagagaaggatgacattgaccattatctcgaagtgaactttaaagggctgtctaaggaagaagtcgccgcataccgcaattcctacaaaaaaaacatttgcgttgatatgctgcgggacgggtaccacaagagttttacggagttatttgcattgatggagagatgggacgcactgagagaagccgctagagtccgctccctcttctggctgcagaagccactggaggagcagccagacaagctagattacctctaccattacttgacccgagccgaggacgcagaacgaaaagaatctttcgaagatgtgcacaacaatctttacgccctggcttgttacttcaataatagtgaggacaagtgggtcaggaaccacttttatgagcgctgcttcaaaatcgctcagctaataaaaattgattgcggaaagaaggaagcagaggcccacatgcacatgggtcttctttatgaggaagacggacagcttttggaggcggcagagcattacgaggcctttcatcaactcacccaaggccgtatatggaaggacgagacgggtcggtctctgaatcttctggcttgcgagtccctgctgcggacctataggctgctgtccgataaaatgctggagaacaaggagtacaaacaagctattaagattctgattaaagcgtcagagattgcaaaagaaggctcagataagaagatggaggctgaggcatcttattatctcggactagcacacctggccgcagaggagtacgagactgctctgactgtgctggatacgtattgcaaaattagtaccgatctagacgacgatctcagtctgggccgtggttatgaagcaattgctaaggtgctgcagagtcagggtgagatgaccgaggcgattaagtacctgaaaaaattcgtcaaaatcgctaggaacaactttcagtcactagacctggtgcgtgcctctaccatgcttggggacatttacaatgagaaaggctattataataaagcttccgagtgcttccaacaggccttcgatacgactgtggaactcatgagcatgcctcttatggatgaaacgaaggtccactacggcattgcaaaggcccaccagatgatgctgaccgtgaacaactacattgagagcgccgaccttacatcgcttaattatctcctgagctggaaggagagtcgtggcaacattgagcctgatcccgtaaccgaggaattccggggatcgaccgttgaggcagtctcccagaacagtgagaggctcgaagagttgagccgtttccctggcgaccaaaagaatgagacctag

SEQ ID NO: 112565 - DNA, 1785 bp, Artificial Sequence
  derived and/or modified sequence
ctctgtttccgtggagacgctctcggcgtcccctgtctccgctccggcggagccaggcttcggaatcactgagagaggagggggcagcgccaacgcccagcacctgccgccggtgggggactgacttcggcggaacggaaaactggagttgtttccctgggccagtgcaccgaggctgaagtctataagcctggagagaccatcagcagtaatctgcaaattccgaaatgaccaccctgcccccactgcccatgacacgcccgaagcttacagccttagccagacagaagctgccttgctcctccagaaaaattccaaggtctcaattgatcaaagaaaaagatgacatagatcattatctagaggtaaatttcaaaggattatcaaaagaggaagttgctgcttataggaactcctacaagaagaatatctgtgtggacatgctgcgagatggttatcataagtccttcaccgagctcttcgctctgatggagcggtgggatgccctgagggaggctgcgagagtcaggtccctcttctggctgcagaagcccctggaggagcagcctgataaactggattacctgtaccattacctgaccagggctgaggacgctgagaggaaagaatccttcgaagatgtacataataacttgtatgctctggcctgttacttcaataattctgaagacaagtgggtaaggaaccacttctatgaacgatgttttaagattgctcagctgatcaaaattgactgtgggaagaaagaagccgaggcacacatgcatatgggtcttctctacgaggaagatggtcagcttctggaagctgctgagcattatgaagcattccatcaattgacacaggggcggatatggaaggatgagacaggccgctctctcaacttgttggcctgtgagagtctcctgaggacttacagattactctcagacaaaatgctagaaaataaagaatacaaacaggccatcaaaattctaataaaagcttctgaaatagccaaagaaggaagtgacaaaaagatggaagcggaagcctcttactacttgggcttagcacacttagctgctgaggaatatgaaacagcattaacagtccttgacacttactgtaaaatctccacagacctggatgatgatctcagtctggggagaggctatgaagccatagccaaggtcctgcagagccaaggagagatgacagaagcaattaaatacttgaaaaaatttgtgaaaattgcaagaaacaattttcaaagcctagatttggtgagagcaagtacaatgcttggggacatctacaatgaaaaaggatactacaacaaagcttctgaatgctttcagcaagcttttgacacaacagtagagctaatgagcatgcctctgatggatgagacaaaagttcactatggaatagcaaaagctcatcagatgatgcttacagtgaacaactatatagagtctgcagatctcaccagcctcaactacctgctgtcatggaaggagagcagaggtaacattgaacctgatccagttactgaagagtttagaggatccacagtggaagctgtatctcaaaactcagaacgtttggaagaactcagtaggtttccaggtgatcaaaaaaatgaaacttaaagcagcttttcacttaacatcaaagcaagaagaaatccatcatgtcaccttagacttcaatacttgtaataggagcatgttacagataatatagagttataataaaacggactatgactcttttcattgg

SEQ ID NO: 112566 - DNA, 1729 bp, Artificial Sequence
  derived and/or modified sequence
aggcttcggaatcactgagagaggagggggcagcgccaacgcccagcacctgccgccggtgggggactgacttcggcggaacggaaaactggagttgtttccctgggccagtgcaccgaggctgaagtctataagcctggagagaccatcagcagtaatctgcaaattccgaaatgaccaccctgcccccactgcccatgacacgcccgaagcttacagccttagccagacagaagctgccttgctcctccagaaaaattccaaggtctcaattgatcaaagaaaaagatgacatagatcattatctagaggtaaatttcaaaggattatcaaaagaggaagttgctgcttataggaactcctacaagaagaatatctgtgtggacatgctgcgagatggttatcataagtccttcaccgagctcttcgctctgatggagcggtgggatgccctgagggaggctgcgagagtcaggtccctcttctggctgcagaagcccctggaggagcagcctgataaactggattacctgtaccattacctgaccagggctgaggacgctgagaggaaagaatccttcgaagatgtacataataacttgtatgctctggcctgttacttcaataattctgaagacaagtgggtaaggaaccacttctatgaacgatgttttaagattgctcagctgatcaaaattgactgtgggaagaaagaagccgaggcacacatgcatatgggtcttctctacgaggaagatggtcagcttctggaagctgctgagcattatgaagcattccatcaattgacacaggggcggatatggaaggatgagacaggccgctctctcaacttgttggcctgtgagagtctcctgaggacttacagattactctcagacaaaatgctagaaaataaagaatacaaacaggccatcaaaattctaataaaagcttctgaaatagccaaagaaggaagtgacaaaaagatggaagcggaagcctcttactacttgggcttagcacacttagctgctgaggaatatgaaacagcattaacagtccttgacacttactgtaaatctccacagacctggatgatgatctcagtctggggagaggctatgaagccatagccaaggtcctgcagagccaaggagagatgacagaagcaattaaatacttgaaaaaatttgtgaaaattgcaagaaacaattttcaaagcctagatttggtgagagcaagtacaatgcttggggacatctacaatgaaaaaggatactacaacaaagcttctgaatgctttcagcaagcttttgacacaacagtagagctaatgagcatgcctctgatggatgagacaaaagttcactatggaatagcaaaagctcatcagatgatgcttacagtgaacaactatatagagtctgcagatctcaccagcctcaactacctgctgtcatggaaggagagcagaggtaacattgaacctgatccagttactgaagagtttagaggatccacagtggaagctgtatctcaaaactcagaacgtttggaagaactcagtaggtttccaggtgatcaaaaaaatgaaacttaaagcagcttttcacttaacatcaaagcaagaagaaatccatcatgtcaccttagacttcaatacttgtaataggagcatgttacagataatatagagttataataaaacggactatgactcttttcattg

SEQ ID NO: 112567 - DNA, 1636 bp, Artificial Sequence
  derived and/or modified sequence
atgattccgatgttcactgtaacattggaagactctggaactctgtggaaaagtcttcacagctcctctgaatccgaaatgaccaccctgcccccactgcccatgacacgcccgaagcttacagccttagccagacagaagctgccttgctcctccagaaaaattccaaggtctcaattgatcaaagaaaaagatgacatagatcattatctagaggtaaatttcaaaggattatcaaaagaggaagttgctgcttataggaactcctacaagaagaatatctgtgtggacatgctgcgagatggttatcataagtccttcaccgagctcttcgctctgatggagcggtgggatgccctgagggaggctgcgagagtcaggtccctcttctggctgcagaagcccctggaggagcagcctgataaactggattacctgtaccattacctgaccagggctgaggacgctgagaggaaagaatccttcgaagatgtacataataacttgtatgctctggcctgttacttcaataattctgaagacaagtgggtaaggaaccacttctatgaacgatgttttaagattgctcagctgatcaaaattgactgtgggaagaaagaagccgaggcacacatgcatatgggtcttctctacgaggaagatggtcagcttctggaagctgctgagcattatgaagcattccatcaattgacacaggggcggatatggaaggatgagacaggccgctctctcaacttgttggcctgtgagagtctcctgaggacttacagattactctcagacaaaatgctagaaaataaagaatacaaacaggccatcaaaattctaataaaagcttctgaaatagccaaagaaggaagtgacaaaaagatggaagcggaagcctcttactacttgggcttagcacacttagctgctgaggaatatgaaacagcattaacagtccttgacacttactgtaaaatctccacagacctggatgatgatctcagtctggggagaggctatgaagccatagccaaggtcctgcagagccaaggagagatgacagaagcaattaaatacttgaaaaaatttgtgaaaattgcaagaaacaattttcaaagcctagatttggtgagagcaagtacaatgcttggggacatctacaatgaaaaaggatactacaacaaagcttctgaatgctttcagcaagcttttgacacaacagtagagctaatgagcatgcctctgatggatgagacaaaagttcactatggaatagcaaaagctcatcagatgatgcttacagtgaacaactatatagagtctgcagatctcaccagcctcaactacctgctgtcatggaaggagagcagaggtaacattgaacctgatccagttactgaagagtttagaggatccacagtggaagctgtatctcaaaactcagaacgtttggaagaactcagtaggtttccaggtgatcaaaaaaatgaaacttaaagcagcttttcacttaacatcaaagcaagaagaaatccatcatgtcaccttagacttcaatacttgtaataggagcatgttacagataatatagagttataataaaacggactatgactcttttcattgg

SEQ ID NO: 112568 - DNA, 2226 bp, Artificial Sequence
  derived and/or modified sequence
agccaggcttcggaatcactgagagaggagggggcagcgccaacgcccagcacctgccgccggtgggggactgacttcggcggaacggaaaactggagttgtttccctgggccagtgcaccgaggctgaagtctataagcctggagagaccatcagcagtaatctgcaaatggctacactggtgtgggttaagaacttagatgattccgatgttcactgtaacattggaagactctggaactctgtggaaaagtcttcacagctcctctgaatccgaaatgaccaccctgcccccactgcccatgacacgcccgaagcttacagccttagccagacagaagctgccttgctcctccagaaaaattccaaggtctcaattgatcaaagaaaaagatgacatagatcattatctagaggtaaatttcaaaggattatcaaaagaggaagttgctgcttataggaactcctacaagaagaatatctgtgtggacatgctgcgagatggttatcataagtccttcaccgagctcttcgctctgatggagcggtgggatgccctgagggaggctgcgagagtcaggtccctcttctggctgcagaagcccctggaggagcagcctgataaactggattacctgtaccattacctgaccagggctgaggacgctgagaggaaagaatccttcgaagatgtacataataacttgtatgctctggcctgttacttcaataattctgaagacaagtgggtaaggaaccacttctatgaacgatgttttaagattgctcagctgatcaaaattgactgtgggaagaaagaagccgaggcacacatgcatatgggtcttctctacgaggaagatggtcagcttctggaagctgctgagcattatgaagcattccatcaattgacacaggggcggatatggaaggatgagacaggccgctctctcaacttgttggcctgtgagagtctcctgaggacttacagattactctcagacaaaatgctagaaaataaagaatacaaacaggccatcaaaattctaataaaagcttctgaaatagccaaagaaggaagtgacaaaaagatggaagcggaagcctcttactacttgggcttagcacacttagctgctgaggaatatgaaacagcattaacagtccttgacacttactgtaaaatctccacagacctggatgatgatctcagtctggggagaggctatgaagccatagccaaggtcctgcagagccaaggagagatgacagaagcaattaaatacttgaaaaaatttgtgaaaattgcaagaaacaattttcaaagcctagatttggtgagagcaagtacaatgcttggggacatctacaatgaaaaaggatactacaacaaagcttctgaatgctttcagcaagcttttgacacaacagtagagctaatgagcatgcctctgatggatgagacaaaagttcactatggaatagcaaaagctcatcagatgatgcttacagtgaacaactatatagagtctgcagatctcaccagcctcaactacctgctgtcatggaaggagagcagaggtaacattgaacctgatccagttactgaagagtttagaggatccacagtggaagctgtatctcaaaactcagaacgtttggaagaactcagtaggtttccaggtgatcaaaaaaatgaaacttaaagcagcttttcacttaacatcaaagcaagaagaaatccatcatgtcaccttagacttcaatacttgtaataggagcatgttacagataatatagagttataataaaacggactatgactcttttcattggattttgcatttcagtgtgttactataaatttaatccaaaacatctaaatccatgaaaataaaatatattccaattcttagaaatatcagcaatcatccatgaaataaatgatttcctcttatccactattccacaagaaatagtgataccatgaaaccaaaataagaaaatattttctaatgagaaaataattacaagcttaagaaaatctttcatgctgaattcatgtaggaaaatatttgctaaaactctagggaaacttctcaacatagataaaaggagtataagcaattaagcctaccatactgataagtcttgtttgaaacagttttctttacctgtgtaacagtatattttatgatacttttagctgatagcacataataaaac

SEQ ID NO: 112569 - protein, 99 aa, Artificial Sequence
  derived and/or modified sequence
MALSRVCWARSAVWGSAVTPGHFVTRRLQLGRSGLAWGAPRSSKLHLSPKADVKNLMSYVVTKTKAINGKYHRFLGRHFPRFYVLYTIFMKGTCFPGNY

SEQ ID NO: 112570 - DNA, 300 bp, Artificial Sequence
  derived and/or modified sequence
atggccctgagcagagtgtgctgggccagaagcgccgtgtggggcagcgccgtgacccccggccacttcgtgaccagaagactgcagctgggcagaagcggcctggcctggggcgcccccagaagcagcaagctgcacctgagccccaaggccgacgtgaagaacctgatgagctacgtggtgaccaagaccaaggccatcaacggcaagtaccacagattcctgggcagacacttccccagattctacgtgctgtacaccatcttcatgaagggcacctgcttccccggcaactactag

SEQ ID NO: 112571 - DNA, 300 bp, Artificial Sequence
  derived and/or modified sequence
atggcactgtccagagtgtgttgggcccgatcagcggtttggggcagcgcggtcactcccgggcacttcgttacccggaggttgcagctgggtaggtccggcctggcctggggcgcaccacggtctagtaagctccatttgtcccccaaggcagatgtcaaaaacctgatgtcctacgtcgtcactaagaccaaggcaataaatggcaagtaccaccggtttctaggaagacacttcccgcggttctacgttctgtacacaattttcatgaagggaacatgctttccaggtaactattag

SEQ ID NO: 112572 - DNA, 300 bp, Artificial Sequence
  derived and/or modified sequence
atggccctgagccgggtgtgctgggcccggtctgctgtgtggggcagcgctgtgaccccaggccactttgtgacccggcggctgcagctgggccgcagcggcctggcctggggcgcccccaggagcagcaagctgcacctgagccccaaggcagatgtgaagaacctgatgtcctatgtggtgaccaagaccaaggccatcaacgggaagtaccaccgcttcctgggccgccacttcccccgcttctacgtgctgtacaccatcttcatgaagggcacctgcttccctggcaactactag

SEQ ID NO: 112573 - DNA, 300 bp, Artificial Sequence
  derived and/or modified sequence
atggccctgagccgggtgtgctgggcccggagcgccgtgtggggcagcgcagttacacctgggcatttcgtgactcgcagactgcaattgggccgctccggcttggcttggggcgccccaaggtcttcaaaattgcatttaagcccaaaggccgacgttaaaaatcttatgtcctatgttgtgacaaaaactaaggctattaacggaaaatatcaccgcttcctaggtcggcattttccacgattttacgtgttatacacaatcttcatgaagggcacatgctttcctggtaactattag

SEQ ID NO: 112574 - DNA, 300 bp, Artificial Sequence
  derived and/or modified sequence
atggctctgtctcgagtctgttgggcccgatcagctgtttggggaagcgcagtcactcccggtcacttcgtgactaggcgtctgcagctcggacggagtggattggcatggggcgctcctcggtcctcaaaactgcatctgagccctaaggctgacgttaagaacttaatgagctatgtggtgacaaagaccaaagccattaacggaaaataccatcggttcctgggcaggcacttccctaggttttacgtcctgtatacgatttttatgaaaggaacgtgtttccctgggaattattag

SEQ ID NO: 112575 - protein, 221 aa, Artificial Sequence
  derived and/or modified sequence
MAAASGSVLQRCIVSPAGRHSASLIFLHGSGDSGQGLRMWIKQVLNQDLTFQHIKIIYPTAPPRFKITNDCPEHLESIDVMCQVLTDLIDEEVKSGIKKNRILIGGFSMGGCMAIHLAYRNHQDVAGVFALSSFLNKASAVYQALQKSNGVLPELFQCHGTADELVLHSWAEETNSMLKSLGVTTKFHSFPNVYHELSKTELDILKLWILTKLPGEMEKQK

SEQ ID NO: 112576 - DNA, 666 bp, Artificial Sequence
  derived and/or modified sequence
atggccgccgccagcggcagcgtgctgcagagatgcatcgtgagccccgccggcagacacagcgccagcctgatcttcctgcacggcagcggcgacagcggccagggcctgagaatgtggatcaagcaggtgctgaaccaggacctgaccttccagcacatcaagatcatctaccccaccgccccccccagattcaagatcaccaacgactgccccgagcacctggagagcatcgacgtgatgtgccaggtgctgaccgacctgatcgacgaggaggtgaagagcggcatcaagaagaacagaatcctgatcggcggcttcagcatgggcggctgcatggccatccacctggcctacagaaaccaccaggacgtggccggcgtgttcgccctgagcagcttcctgaacaaggccagcgccgtgtaccaggccctgcagaagagcaacggcgtgctgcccgagctgttccagtgccacggcaccgccgacgagctggtgctgcacagctgggccgaggagaccaacagcatgctgaagagcctgggcgtgaccaccaagttccacagcttccccaacgtgtaccacgagctgagcaagaccgagctggacatcctgaagctgtggatcctgaccaagctgcccggcgagatggagaagcagaagtag

SEQ ID NO: 112577 - DNA, 666 bp, Artificial Sequence
  derived and/or modified sequence
atggccgcagcttcaggaagtgtgctgcagcggtgtatcgttagtccagccggacggcacagcgcgtcattgatattcttgcacggcagtggcgattctggacagggcctccgcatgtggataaagcaggtcctgaatcaggacctcactttccaacatattaagataatctatcctacggcacctccccgttttaagattaccaacgattgccccgagcatttagagagcattgatgttatgtgtcaggttctgaccgatcttatcgacgaagaagtgaagagcgggattaagaagaacagaattctcattggcggcttctcaatgggaggctgtatggcaatccatttggcctatagaaaccatcaggatgttgctggagtctttgccctctcttcatttctcaacaaggcaagcgctgtgtatcaggccctccagaaaagcaacggtgtcttacccgagcttttccaatgccacggtaccgcagacgagctcgtgttgcacagttgggcagaggaaacaaattctatgctgaaatccttgggcgtgaccactaagtttcatagctttcccaacgtataccatgagttgagcaaaacagagctggacatcctcaagctgtggatcctgaccaagctacccggggaaatggagaagcaaaaatag

SEQ ID NO: 112578 - DNA, 1819 bp, Artificial Sequence
  derived and/or modified sequence
ggcagtggcatcagcgatggcggctgcgtcggggtcggttctgcagcgctgtatcgtgtcgccggcagggaggcatagcgcctctctgatcttcctgcatggctcaggtgattctggacaaggattaagaatgtggatcaagcaggttttaaatcaagatttaacattccaacacataaaaattatttatccaacagctcctcccagatttaaaataaccaatgactgcccagaacaccttgaatcaattgatgtcatgtgtcaagtgcttactgatttgattgatgaagaagtaaaaagtggcatcaagaagaacaggatattaataggaggattctctatgggaggatgcatggcaatacatttagcatatagaaatcatcaagatgtggcaggagtatttgctctttctagttttctgaataaagcatctgctgtttaccaggctcttcagaagagtaatggtgtacttcctgaattatttcagtgtcatggtactgcagatgagttagttcttcattcttgggcagaagagacaaactcaatgttaaaatctctaggagtgaccacgaagtttcatagttttccaaatgtttaccatgagctaagcaaaactgagttagacatattgaagttatggattcttacaaagctgccaggagaaatggaaaaacaaaaatgaatgaatcaagagtgatttgttaatgtaagtgtaatgtctttgtgaaaagtgatttttactgccaaattataatgataattaaaatattaagaaataacactttcctgacttttttattattaaaatgcttatcactgtagacagtagctaatcttattaatgaaaaacaatagacaaacatctgtgcataatttttcagacacaattctgtaaatatttggaaaccttttaagtatttaaacttttaaatttttgaaataaagtattctaaactaatataaataaggacaatgaaaaaacatgaaaggacttagcataatgttattttatcttttctacaactttgtttaaattacctttccaaagatatttgtgtttatgtaattttccacggaataacattaatactctaggtttataaaccggtttcacattatttcatttgatcatcacaagagctttgtgaagtaagccgagaagttgttactggtatttaataatagcaatagaggagttaaagactttcccacagcttgcaggtcaagacaagaaattcaggtctcctaattctcagtggagctctatttctgttaacccaaattgctgctctgttttaggtctcaatttcatctgtaaaatgatactaatagtacttatcccattggatttttgttgagatttaaataaatagccaaaagccaatacataataaacactcaataaagattaaccataaggagagtcatgatctggttccaggaatacattgttagatgactgaaaaattgtattacttcaatgaaaatactataaataataacattttcatatattagttggttctcatgcatacataatctaattttatttgatcctcacaactgtttaagttttattaaatatacattatccctatttgtataaatagaatcatacaatacctgcctgctttcattcaacaaaattatcatgagatttttccatgttgtgtacatcaatagttcatctattttattgctcagtaatattccattgtgtggatgtatcactatttgtttacacattcaccactgatatataagttgcttccagtgtgaggctgttttaaataaagctgctatgaatattcatgtaaga

SEQ ID NO: 112579 - DNA, 666 bp, Artificial Sequence
  derived and/or modified sequence
atggctgctgccagcggctctgtgctgcagcgctgcatcgtgtccccagctggccgccacagcgccagcctcatcttcctgcacggcagcggggacagcggccagggcctgaggatgtggatcaagcaggtgctgaaccaggacctgaccttccagcacatcaagatcatctaccccacagccccaccccgcttcaagatcaccaatgactgcccagagcacctggagagcattgatgtgatgtgccaggtgctgacagacctgattgatgaggaggtgaagagcggcatcaagaagaaccgcatcctgattggaggcttctccatgggcggctgcatggccatccacctggcctacagaaaccaccaggatgtggccggcgtgtttgccctgagcagcttcctgaacaaggccagcgctgtgtaccaggccctgcagaagagcaatggagtgctgcctgagctgttccagtgccacggcacagcagatgagctggtgctgcacagctgggccgaggagaccaacagcatgctgaagagcctgggcgtgaccaccaagttccacagcttccccaacgtgtaccacgagctgagcaagacagagctggacatcctgaagctgtggatcctgaccaagctgcccggggagatggagaagcagaagtag

SEQ ID NO: 112580 - DNA, 666 bp, Artificial Sequence
  derived and/or modified sequence
atggccgccgccagcggcagcgtgctgcagcggtgcatcgtgagccccgctggacgccacagtgcttcccttatttttctccatggatctggagactcgggccagggactcagaatgtggatcaagcaggtgctgaaccaggatctgacattccagcacatcaagatcatctacccaaccgctcctccacgatttaagattacaaatgactgtccagagcacctcgagtctattgacgtgatgtgccaggtgctgactgatctcatcgatgaagaggttaaaagtggaattaagaagaaccggatcctgattgggggattttccatgggcggctgcatggccattcatctggcttacagaaatcaccaggatgtggccggagtgtttgccttgtcctctttcctcaataaggcgtcggccgtgtaccaagcactacaaaaatccaacggtgttttaccggagctgttccagtgccacgggactgccgatgagctagttctgcactcctgggccgaggaaactaattcaatgctgaaaagccttggggtgacaaccaagttccatagctttcctaacgtgtatcatgagctgtctaaaaccgagctggacattctgaagctctggattctgaccaagcttcctggcgaaatggagaaacagaaatag

SEQ ID NO: 112581 - DNA, 666 bp, Artificial Sequence
  derived and/or modified sequence
atggccgcagcttcaggcagtgttctccagaggtgcatcgtaagcccagccggtcggcactctgcaagtctgatattcctgcacggttctggggactctggtcagggcctccgaatgtggattaagcaggtgctgaatcaggacttgacatttcagcatatcaagatcatctacccgactgcgcctccacgattcaaaataacaaacgattgccccgagcacctggaatccatcgacgtcatgtgtcaggtcctgactgacctgatcgacgaagaggtcaagagtgggatcaagaagaaccgcattctgatcgggggattttctatgggcggttgcatggccattcacctggcctaccgcaaccatcaggatgtggccggagtattcgccctctcatccttcctcaacaaggcttctgcagtttaccaggcgttgcagaagtcaaatggcgtgctgccggagttgtttcaatgccatggcacggctgacgagctggttcttcactcctgggccgaggagaccaactccatgctcaaatcccttggagtgaccactaagtttcactccttccccaacgtgtaccacgagttgagtaaaacagaactggacatactaaagttgtggattctgaccaagttgcccggagagatggagaaacaaaaatag

SEQ ID NO: 112582 - protein, 1047 aa, Artificial Sequence
  derived and/or modified sequence
MRSEALLLYFTLLHFAGAGFPEDSEPISISHGNYTKQYPVFVGHKPGRNTTQRHRLDIQMIMIMNGTLYIAARDHIYTVDIDTSHTEEIYCSKKLTWKSRQADVDTCRMKGKHKDECHNFIKVLLKKNDDALFVCGTNAFNPSCRNYKMDTLEPFGDEFSGMARCPYDAKHANVALFADGKLYSATVTDFLAIDAVIYRSLGESPTLRTVKHDSKWLKEPYFVQAVDYGDYIYFFFREIAVEYNTMGKVVFPRVAQVCKNDMGGSQRVLEKQWTSFLKARLNCSVPGDSHFYFNILQAVTDVIRINGRDVVLATFSTPYNSIPGSAVCAYDMLDIASVFTGRFKEQKSPDSTWTPVPDERVPKPRPGCCAGSSSLERYATSNEFPDDTLNFIKTHPLMDEAVPSIFNRPWFLRTMVRYRLTKIAVDTAAGPYQNHTVVFLGSEKGIILKFLARIGNSGFLNDSLFLEEMSVYNSEKCSYDGVEDKRIMGMQLDRASSSLYVAFSTCVIKVPLGRCERYGKCKKTCIASRDPYCGWIKEGGACSHLSPNSRLTFEQDIERGNTDGLGDCHNSFVALNDISTPLPDNEMSYNTVYGHSSSLLPSTTTSDSTAQEGYESRGGMLDWKHLLDSPDSTDPLGAVSSHNHQDKKGVIRESYLKGHDQLVPVTLLAIAVILAFVMGAVFSGITVYCVCDHRRKDVAVVQRKEKELTHSRRGSMSSVTKLSGLFGDTQSKDPKPEAILTPLMHNGKLATPGNTAKMLIKADQHHLDLTALPTPESTPTLQQKRKPSRGSREWERNQNLINACTKDMPPMGSPVIPTDLPLRASPSHIPSVVVLPITQQGYQHEYVDQPKMSEVAQMALEDQAATLEYKTIKEHLSSKSPNHGVNLVENLDSLPPKVPQREASLGPPGASLSQTGLSKRLEMHHSSSYGVDYKRSYPTNSLTRSHQATTLKRNNTNSSNSSHLSRNQSFGRGDNPPPAPQRVDSIQVHSSQPSGQAVTVSRQPSLNAYNSLTRSGLKRTPSLKPDVPPKPSFAPLSTSMKPNDACT

SEQ ID NO: 112583 - protein, 114 aa, Artificial Sequence
  derived and/or modified sequence
MRSEALLLYFTLLHFAGAGFPEDSEPISISHGNYTKQYPVFVGHKPGRNTTQRHRLDIQMIMIMNGTLYIAARDHIYTVDIDTSHTEEIYCSKKLTWKSRQADVDTCRMKGKHK

SEQ ID NO: 112584 - protein, 457 aa, Artificial Sequence
  derived and/or modified sequence
MKTGHSSSLLPSTTTSDSTAQEGYESRGGMLDWKHLLDSPDSTDPLGAVSSHNHQDKKGVIRESYLKGHDQLVPVTLLAIAVILAFVMGAVFSGITVYCVCDHRRKDVAVVQRKEKELTHSRRGSMSSVTKLSGLFGDTQSKDPKPEAILTPLMHNGKLATPGNTAKMLIKADQHHLDLTALPTPESTPTLQQKRKPSRGSREWERNQNLINACTKDMPPMGSPVIPTDLPLRASPSHIPSVVVLPITQQGYQHEYVDQPKMSEVAQMALEDQAATLEYKTIKEHLSSKSPNHGVNLVENLDSLPPKVPQREASLGPPGASLSQTGLSKRLEMHHSSSYGVDYKRSYPTNSLTRSHQATTLKRNNTNSSNSSHLSRNQSFGRGDNPPPAPQRVDSIQVHSSQPSGQAVTVSRQPSLNAYNSLTRSGLKRTPSLKPDVPPKPSFAPLSTSMKPNDACT

SEQ ID NO: 112585 - protein, 159 aa, Artificial Sequence
  derived and/or modified sequence
MRSEALLLYFTLLHFAGAGFPEDSEPISISHGNYTKQYPVFVGHKPGRNTTQRHRLDIQMIMIMNGTLYIAARDHIYTVDIDTSHTEEIYCSKKLTWKSRQADVDTCRMKGKHKDECHNFIKVLLKKNDDALFVCGTNAFNPSCRNYKMDTLEPFGDEF

SEQ ID NO: 112586 - DNA, 3144 bp, Artificial Sequence
  derived and/or modified sequence
atgagaagcgaggccctgctgctgtacttcaccctgctgcacttcgccggcgccggcttccccgaggacagcgagcccatcagcatcagccacggcaactacaccaagcagtaccccgtgttcgtgggccacaagcccggcagaaacaccacccagagacacagactggacatccagatgatcatgatcatgaacggcaccctgtacatcgccgccagagaccacatctacaccgtggacatcgacaccagccacaccgaggagatctactgcagcaagaagctgacctggaagagcagacaggccgacgtggacacctgcagaatgaagggcaagcacaaggacgagtgccacaacttcatcaaggtgctgctgaagaagaacgacgacgccctgttcgtgtgcggcaccaacgccttcaaccccagctgcagaaactacaagatggacaccctggagcccttcggcgacgagttcagcggcatggccagatgcccctacgacgccaagcacgccaacgtggccctgttcgccgacggcaagctgtacagcgccaccgtgaccgacttcctggccatcgacgccgtgatctacagaagcctgggcgagagccccaccctgagaaccgtgaagcacgacagcaagtggctgaaggagccctacttcgtgcaggccgtggactacggcgactacatctacttcttcttcagagagatcgccgtggagtacaacaccatgggcaaggtggtgttccccagagtggcccaggtgtgcaagaacgacatgggcggcagccagagagtgctggagaagcagtggaccagcttcctgaaggccagactgaactgcagcgtgcccggcgacagccacttctacttcaacatcctgcaggccgtgaccgacgtgatcagaatcaacggcagagacgtggtgctggccaccttcagcaccccctacaacagcatccccggcagcgccgtgtgcgcctacgacatgctggacatcgccagcgtgttcaccggcagattcaaggagcagaagagccccgacagcacctggacccccgtgcccgacgagagagtgcccaagcccagacccggctgctgcgccggcagcagcagcctggagagatacgccaccagcaacgagttccccgacgacaccctgaacttcatcaagacccaccccctgatggacgaggccgtgcccagcatcttcaacagaccctggttcctgagaaccatggtgagatacagactgaccaagatcgccgtggacaccgccgccggcccctaccagaaccacaccgtggtgttcctgggcagcgagaagggcatcatcctgaagttcctggccagaatcggcaacagcggcttcctgaacgacagcctgttcctggaggagatgagcgtgtacaacagcgagaagtgcagctacgacggcgtggaggacaagagaatcatgggcatgcagctggacagagccagcagcagcctgtacgtggccttcagcacctgcgtgatcaaggtgcccctgggcagatgcgagagatacggcaagtgcaagaagacctgcatcgccagcagagacccctactgcggctggatcaaggagggcggcgcctgcagccacctgagccccaacagcagactgaccttcgagcaggacatcgagagaggcaacaccgacggcctgggcgactgccacaacagcttcgtggccctgaacgacatcagcacccccctgcccgacaacgagatgagctacaacaccgtgtacggccacagcagcagcctgctgcccagcaccaccaccagcgacagcaccgcccaggagggctacgagagcagaggcggcatgctggactggaagcacctgctggacagccccgacagcaccgaccccctgggcgccgtgagcagccacaaccaccaggacaagaagggcgtgatcagagagagctacctgaagggccacgaccagctggtgcccgtgaccctgctggccatcgccgtgatcctggccttcgtgatgggcgccgtgttcagcggcatcaccgtgtactgcgtgtgcgaccacagaagaaaggacgtggccgtggtgcagagaaaggagaaggagctgacccacagcagaagaggcagcatgagcagcgtgaccaagctgagcggcctgttcggcgacacccagagcaaggaccccaagcccgaggccatcctgacccccctgatgcacaacggcaagctggccacccccggcaacaccgccaagatgctgatcaaggccgaccagcaccacctggacctgaccgccctgcccacccccgagagcacccccaccctgcagcagaagagaaagcccagcagaggcagcagagagtgggagagaaaccagaacctgatcaacgcctgcaccaaggacatgccccccatgggcagccccgtgatccccaccgacctgcccctgagagccagccccagccacatccccagcgtggtggtgctgcccatcacccagcagggctaccagcacgagtacgtggaccagcccaagatgagcgaggtggcccagatggccctggaggaccaggccgccaccctggagtacaagaccatcaaggagcacctgagcagcaagagccccaaccacggcgtgaacctggtggagaacctggacagcctgccccccaaggtgccccagagagaggccagcctgggcccccccggcgccagcctgagccagaccggcctgagcaagagactggagatgcaccacagcagcagctacggcgtggactacaagagaagctaccccaccaacagcctgaccagaagccaccaggccaccaccctgaagagaaacaacaccaacagcagcaacagcagccacctgagcagaaaccagagcttcggcagaggcgacaaccccccccccgccccccagagagtggacagcatccaggtgcacagcagccagcccagcggccaggccgtgaccgtgagcagacagcccagcctgaacgcctacaacagcctgaccagaagcggcctgaagagaacccccagcctgaagcccgacgtgccccccaagcccagcttcgcccccctgagcaccagcatgaagcccaacgacgcctgcacctag

SEQ ID NO: 112587 - DNA, 3144 bp, Artificial Sequence
  derived and/or modified sequence
atgaggtccgaggccttgctcctgtattttaccttgttacatttcgccggggctggcttccccgaggacagtgagccgatttctatctctcatggcaattatacaaagcagtaccccgtttttgttggtcacaaacccggacggaacacaacccagaggcaccgtctagacattcagatgattatgattatgaacggcaccctgtacatcgccgccagagatcacatatacactgtcgacatagacacttcccataccgaagagatttattgctcaaagaaactaacctggaaaagtcgacaggcagacgtcgacacttgtcgcatgaaaggtaaacacaaggacgaatgtcacaattttatcaaggttctgctcaagaagaatgacgacgctttgttcgtctgcggcaccaatgcatttaatccaagctgcaggaattacaaaatggacaccctggagcctttcggcgatgagttctcaggcatggcacggtgcccatatgacgctaaacacgcgaacgttgctctcttcgcagatggcaagctttatagtgccacggtgacagactttctggccatcgatgctgtgatctacaggtccttgggggagtcccctaccctgagaaccgttaagcacgactcaaaatggctgaaagagccctattttgtgcaggccgtagattatggcgactacatctattttttcttccgagagatagctgtggaatacaataccatgggcaaagtggtgttcccacgggtggcacaggtgtgtaaaaatgatatgggcggttctcagcgagtcctggagaagcagtggacctcattccttaaagcccggttaaactgttccgtccctggagattcccacttctactttaacattcttcaggcagtgactgatgtgatccggattaatggtagagacgttgtgttagccacgttcagtacaccttataattctatccctggatccgctgtctgcgcttatgacatgctggacattgctagcgtatttacaggaaggttcaaggaacagaaatccccagactccacctggacacccgtccccgacgagcgagtcccaaagcctagaccgggatgttgcgccggttcatctagtctggaaagatatgccacatccaatgagttccctgatgacactctcaatttcatcaagacgcatcccctgatggatgaggctgtcccatccatattcaaccggccgtggttcctgcgcacaatggtgaggtatcgattgaccaagattgcagtagacacagcagccggaccctatcagaatcacaccgtcgttttcctgggctccgagaaggggataatcttgaagtttctggcacgcatcggcaactcaggcttcctcaatgacagcttgtttcttgaagagatgtctgtgtataattctgagaagtgctcttacgatggcgtggaggataaaaggattatggggatgcaattggatcgggcaagcagcagcctgtacgtggcattttctacttgtgtgatcaaggtcccccttgggaggtgtgagcgttatggtaagtgtaaaaagacctgtatagcctctcgagacccctactgcggatggatcaaggagggtggtgcttgttcgcatctgtcgcccaatagtaggttaacattcgaacaggacatcgagaggggcaacaccgatgggcttggcgattgtcacaactccttcgtggctctcaatgacatcagcacgcccctgcccgacaacgaaatgtcctataatacagtttatggacattcctcctccctcttaccttctactaccacttctgattcgaccgcccaggaagggtatgagagtagaggcgggatgctggattggaagcacctcctggactccccagattctaccgatccattaggcgcagtctcttcccacaaccatcaggacaagaaaggggtcattcgtgagtcctacctgaaagggcatgatcaactggtgcccgtaacccttcttgcaatcgcggtgatccttgcattcgtgatgggcgctgtgttctctggcatcactgtttactgcgtctgcgaccatcgacggaaggatgtggcagtggttcaacgcaaagaaaaggaactaacacatagcaggaggggatctatgagctctgtgacaaaactcagtggactgttcggagatacacagtctaaggacccgaagcctgaagccatcttaacccctttgatgcacaacggaaaacttgcgactccgggaaacacggccaaaatgctgatcaaagctgaccagcaccaccttgatctcacagcccttccaaccccagagagtacccccaccctgcaacagaagcgcaagcccagtagggggagtcgagaatgggaacggaatcaaaatctgataaacgcctgtacgaaggatatgccccccatgggaagtcccgtgattccaacagacctgccactacgggcaagtcccagccacatcccgagcgtagttgtcctcccaataacccagcagggctaccagcacgaatatgtggaccaaccaaagatgtcagaagtagcacagatggccctggaagatcaggctgctaccttggagtacaaaaccattaaggagcatctgtcgagtaagtcacccaatcacggcgtcaacctggtggaaaatcttgatagcttaccacccaaagtgcctcaacgggaagccagtttggggcccccaggtgcgtccttatctcagaccggcctgtcaaagcgcctcgagatgcaccattctagctcttacggggttgactacaaaagatcttaccccaccaacagtctcactaggtcacaccaagccacgaccttgaagcggaataacacgaacagttcaaacagctcccacctttctaggaaccagagctttggtaggggagataacccacctcccgccccccaacgtgtggactctattcaggttcacagctcccagccctccgggcaggctgtcaccgtctcccgtcagccctccctaaacgcttataatagccttaccagatcagggctgaaacggacaccaagtttgaagccagacgtccccccgaaaccctccttcgcgccattatccactagtatgaaacccaacgacgcttgtacgtag

SEQ ID NO: 112588 - DNA, 3144 bp, Artificial Sequence
  derived and/or modified sequence
atgaggtctgaggccctgctgctgtacttcaccctgctgcactttgctggggccggcttccctgaggacagcgagcccatcagcatcagccacggcaactacaccaagcagtaccctgtgtttgtgggccacaagccaggcaggaacaccacccagaggcaccggctggacatccagatgatcatgatcatgaatggcaccctgtacatcgccgcccgggaccacatctacacagtggacatcgacaccagccacacagaggagatctactgcagcaagaagctgacctggaagagccggcaggctgatgtggacacctgcaggatgaagggcaagcacaaggatgagtgccacaacttcatcaaggtgctgctgaagaagaatgatgatgccctgtttgtgtgtggcaccaatgccttcaaccccagctgcaggaactacaagatggacaccctggagccctttggagatgagttcagcggcatggcccgctgcccctatgatgccaagcacgccaacgtggccctgtttgctgatggcaagctgtacagcgccaccgtgacagacttcctggccattgatgctgtgatctaccgcagcctgggggagagccccaccctgaggacagtgaagcatgacagcaagtggctgaaggagccctactttgtgcaggccgtggactatggagactacatctacttcttcttccgggagattgctgtggagtacaacaccatgggcaaggtggtgttcccccgggtggcccaggtgtgcaagaatgacatgggcggcagccagagggtgctggagaagcagtggaccagcttcctgaaggcccggctgaactgcagcgtgcctggggacagccacttctacttcaacatcctgcaggccgtgacagatgtgatccgcatcaatggaagagatgtggtgctggccaccttcagcaccccctacaacagcatccctggcagcgctgtgtgtgcctatgacatgctggacatcgcctctgtgttcaccggccgcttcaaggagcagaagagcccagacagcacctggacccctgtgcctgatgagcgggtgcccaagccccggcccggctgctgtgccggcagcagcagcctggagagatatgccaccagcaatgagttcccagatgacaccctgaacttcatcaagacccaccccctgatggatgaagctgtgcccagcatcttcaaccggccctggttcctgcggaccatggtgcgctaccgcctgaccaagattgctgtggacacagctgctggcccctaccagaaccacacagtggtgttcctgggcagcgagaagggcatcatcctgaagttcctggcccgcatcggcaacagcggcttcctgaatgacagcctcttcctggaggagatgtctgtgtacaacagcgagaagtgcagctatgatggagtggaggacaagaggatcatgggcatgcagctggaccgggccagcagcagcctgtatgtggccttcagcacctgtgtgatcaaggtgcccctgggccgctgtgaaagatatggcaagtgcaagaagacctgcatcgccagccgggacccctactgcggctggatcaaggagggcggggcctgcagccacctgagccccaacagccggctgacctttgagcaggacatcgagcggggcaacacagatggcctgggggactgccacaacagctttgtggccctgaatgacatcagcacccccctgcctgacaatgagatgagctacaacacagtgtatggccacagcagcagcctgctgcccagcaccaccaccagtgacagcacagcccaggagggctatgagagccggggcggcatgctggactggaagcacctgctggacagcccagacagcacagaccccctgggcgctgtgagcagccacaaccaccaggacaagaagggcgtcatccgggagagctacctgaagggccatgaccagctggtgcctgtgaccctgctggccatcgctgtgatcctggcctttgtgatgggcgctgtgttttctggcatcaccgtgtactgtgtgtgtgaccacaggaggaaggatgtggccgtggtgcagaggaaggagaaggagctgacccacagccggcggggctccatgagctctgtgaccaagctgagcggcctgtttggagacacccagagcaaggaccccaagccagaggccatcctgacccccctgatgcacaacgggaagctggccaccccaggcaacacagccaagatgctgatcaaggctgaccagcaccacctggacctgacagccctgcccaccccagagagcacccccaccctgcagcagaagaggaagcccagccggggcagccgggagtgggagaggaaccagaacctgatcaatgcctgcaccaaggacatgccacccatgggcagccctgtgatccccacagacctgcccctgcgggccagccccagccacatccccagcgtggtggtgctgcccatcacccagcagggctaccagcacgagtatgtggaccagcccaagatgtctgaggtggcccagatggccctggaggaccaggccgccaccctggagtacaagaccatcaaggagcacctgagcagcaagagccccaaccacggcgtgaacctggtggagaacctggacagcctgccccccaaggtgccccagcgggaggccagcctgggccccccaggggccagcctgagccagacaggcctgagcaagaggctggagatgcaccacagcagcagctatggagtggactacaagaggagctaccccaccaacagcctgaccaggagccaccaggccaccaccctgaagaggaacaacaccaacagcagcaacagcagccacctgagcaggaaccagagctttggccgcggggacaaccccccaccagccccccagagggtggacagcatccaggtgcacagcagccagcccagcggccaggccgtgacagtgtcccggcagcccagcctgaatgcctacaacagcctgaccaggagcggcctgaagaggacccccagcctgaagccagatgtgccccccaagcccagctttgcccccctgagcacctccatgaagcccaatgatgcctgcacctag

SEQ ID NO: 112589 - DNA, 3144 bp, Artificial Sequence
  derived and/or modified sequence
atgcggagcgaggccctgctgctgtacttcaccctgctgcacttcgctggcgcggggtttcccgaggattccgaacccatttccattagccatggcaattatactaaacagtaccccgtttttgtcggccacaaaccagggcgtaatacgacccagagacaccgcttggacatccagatgatcatgatcatgaacgggacactatacattgctgcccgtgatcacatatacactgttgatatcgacacatcccacactgaagagatctactgctccaaaaaactgacctggaaatcgcggcaggccgacgtggacacgtgccggatgaagggaaaacacaaggatgagtgccataatttcattaaggtcctcctaaaaaagaacgacgatgccttatttgtttgcggcacaaacgcctttaatccctcctgtcgcaattacaagatggatacactggagccatttggcgacgagttcagtggtatggctcgatgcccgtacgacgcaaagcatgccaacgtggccttatttgcagatggtaaattgtatagtgcaacggtcaccgacttcttagctatcgatgccgttatataccgatcattaggcgaatcaccaactctaagaacagtgaagcatgatagtaaatggctcaaagaaccttatttcgtgcaggcggtggattacggcgactacatctacttttttttccgggaaatagcggtggaatacaataccatgggcaaggttgtgtttccgcgggtggctcaggtctgcaagaatgacatgggaggatctcaaagagttctggagaagcagtggacttccttcctcaaagcacggctcaattgctctgtccctggcgacagccacttctattttaacattctgcaggcagtcacggacgtaatccgtataaatggcagagacgtcgtcctggctacgttcagcacaccctacaacagcatccctggaagtgccgtttgtgcctacgacatgttggacattgctagcgtatttacaggccgttttaaagaacagaagtctcccgatagtacctggaccccggtgccggacgaacgcgtccccaaaccacgccctggatgctgtgcgggctcatcttcactggagagatacgccacttcgaacgagtttcccgatgatacattaaatttcattaagactcacccgctgatggatgaggctgttccgtctatcttcaaccggccctggttcctgcgaaccatggtaagatatcgcctcaccaagattgccgtggacaccgcagctggaccctaccaaaaccacaccgtcgtgttcctggggtcggagaaaggtattatcctgaagttcctggctaggattgggaatagcgggttcctgaatgattctcttttcctggaggagatgtctgtttataattcggagaagtgttcgtacgacggcgtggaggataagaggattatgggaatgcagttagatagggcatctagctcattgtatgtggccttcagtacatgtgtgattaaagtccctctggggcgctgcgaaagatatggtaagtgtaagaaaacatgtatcgcgtctcgcgatccatattgcgggtggattaaagaggggggggcttgctcacacctgagcccaaattcccggctaactttcgagcaggatatagaaagaggaaatactgatggtctgggcgattgtcataatagctttgtggctctaaatgacatctcaacccctctgcccgacaatgagatgtcctataacacagtttacggacacagctccagcttgctgccttctaccaccacgtccgattccaccgctcaggagggttacgagtcccgcggggggatgctggattggaaacacctgctcgatagcccggacagcacggatccactgggggcggtgtctagtcacaatcaccaagacaagaagggtgtcattcgggagagctaccttaaaggacacgaccagctggtcccagtgaccttactcgccatcgcagtcattctggctttcgtgatgggcgctgtgttcagtgggatcacagtttattgcgtgtgtgatcacaggcggaaagatgttgccgtggtacagagaaaggaaaaggagcttacacactccaggagagggtcaatgagctccgtaactaagctatctgggctgttcggcgatactcaatccaaggatcccaaacctgaagccatcctcacgcccctgatgcacaacgggaagctggcaaccccaggcaataccgcaaaaatgctgataaaggctgaccagcaccacctggacctaacagcattgcctacgcccgagtccacccctaccctgcagcagaagagaaagcccagtcgagggagtagggaatgggaacgcaatcaaaatttaatcaatgcctgcacgaaggacatgcctcctatgggctcacctgtgattcccacagatctgcccctgcgcgcctcacctagccacattcccagcgtagttgttttgcctatcacccaacagggctaccagcatgaatacgtggaccaaccaaagatgtccgaggtcgctcaaatggctctggaagatcaggccgccactctggagtataagactatcaaagagcacctgtccagtaagtccccaaatcacggggtgaacctggtggagaacctggatagccttccccctaaagtcccccaacgcgaggccagcttggggccccctggcgcgagcttgagccaaacaggcctgtctaaacgtttggaaatgcatcatagctccagctatggcgtggactacaagcgcagctatcccaccaactctttgactcgtagtcatcaagctaccaccctgaaaagaaataacactaactcatctaattcgtcgcacctgtccagaaaccaaagctttggtagaggagacaatcctccacctgcaccccaaagggtggattccattcaggtgcactcctcacaacccagcggccaggcagtgacggtctcacgacagcctagcctaaacgcctacaattcactcactcggagtgggctcaagcggactcctagcttgaagcccgatgtcccccccaaaccctcgttcgccccacttagtacaagtatgaaaccgaatgacgcttgtacctag

SEQ ID NO: 112590 - DNA, 3144 bp, Artificial Sequence
  derived and/or modified sequence
atgagaagcgaagctctgctcctgtatttcacactgctccactttgctggggctggcttccctgaagattctgaaccaatttctatctctcatggtaattacactaagcagtatcccgtgttcgtcggccataagcctgggagaaacacaactcagaggcacaggctagatatccagatgattatgatcatgaacggaactctatatatcgcggctcgcgaccacatttataccgtggatatcgacacctcccataccgaagagatatattgcagcaaaaagctgacttggaaatcacgccaggctgacgtagatacttgtcgcatgaaagggaagcataaggacgagtgccataactttatcaaagttcttctgaaaaagaatgacgacgcgttattcgtctgcggaactaatgcttttaatccctcctgccggaactataagatggacaccttggaaccattcggtgacgaatttagtgggatggccaggtgcccctacgacgcaaaacacgccaacgtggccctgtttgcggacgggaagctgtattcagctaccgttacagatttcctcgcaattgatgccgtgatctaccgaagcttaggagagtcacccacgctccgcacagtgaagcacgactccaagtggttaaaggaaccatacttcgtgcaggccgtcgactacggtgactatatatatttctttttccgcgagatcgcagtcgagtataatactatgggtaaagtggtattccctcgggttgcgcaggtttgcaaaaacgacatggggggatcccagcgtgtgcttgagaaacagtggacctcatttctaaaggctagactgaattgcagcgtgcccggtgactcacatttttatttcaacatcctgcaggcagtgaccgacgtaatccgtatcaacggccgagatgtggtcctcgccacgttctccaccccctataatagtatcccgggatccgcggtctgcgcctacgacatgctcgatatcgcatccgtgttcaccggtagattcaaggaacaaaagagtcccgatagtacatggacacctgttcctgacgagcgcgtccctaaacccagaccaggctgttgcgcaggaagctcgtctctggaacggtatgcaacatcgaacgaatttccagatgatactctgaatttcattaagactcacccactgatggacgaagccgttccatctatttttaaccggccttggtttttacgcaccatggtacgctatcgccttactaagatagcggtggacactgccgctggcccataccagaaccacacggtggtgttcctgggctctgagaaggggataatcctgaagtttctcgccaggatcggcaattccggcttccttaacgactccctgttcctggaggaaatgtctgtgtacaatagcgagaagtgttcctatgacggcgtggaggacaagcgcatcatgggtatgcaactggatcgggctagtagcagcttatatgttgctttctctacgtgcgtgataaaggttcctcttggccgatgtgaacgctacggtaagtgtaagaaaacatgcattgcatctagagacccatactgcgggtggatcaaagaggggggagcgtgtagtcatctgtctccgaattcccggctcacgtttgaacaagatattgaacgcggaaacactgacggcctcggagactgccataactcatttgttgctctcaatgatatttccacccctctgcccgataacgaaatgtcatacaacactgtttacggacatagtagcagtcttctcccatctacgaccactagcgatagcactgcccaggaaggctatgaaagtaggggcggtatgttggattggaaacatctgttggacagtccagactccactgaccccttgggcgctgtgtcctctcacaatcaccaagacaagaaaggcgtcatccgcgagagttacttaaaaggccacgatcagttggttccggtgacccttttggcaatcgccgtcatcctcgccttcgtgatgggcgcagtgttctcgggcataaccgtatattgcgtttgcgatcatcgtagaaaggatgttgctgtggtgcagcggaaagagaaggaacttacacattcaagacggggaagtatgagctccgtcactaagctttcagggctttttggcgatacccagtctaaagaccctaaaccagaggctattctgacaccactcatgcataacggcaaactggccacccctggcaataccgcaaagatgttgatcaaggctgaccagcaccatctggatctaaccgccctgcctactcctgagagcacccctaccctccaacagaaaaggaagccttcccgcggttctagagagtgggaacgtaatcagaacctgatcaacgcatgcaccaaggatatgcctcctatgggatctcctgtgattcctaccgatctgcccctccgggcaagcccctcgcacataccttccgtggtcgtgctgccaataacccagcaagggtaccaacacgaatacgtggatcagcccaagatgagcgaggtagctcaaatggcgctagaagaccaggcagctacactggaatacaaaaccattaaagaacacctctcttccaaaagtccaaatcatggagttaatctagtggaaaatttggacagcctgccccctaaggtgccacagagggaagcatccctgggccctccaggggcatcgctcagccagacaggcctatctaaacgccttgaaatgcaccactcctcatcatatggggtggactacaagcggtcctaccctaccaactcactgacacgaagccatcaggcaaccacgctcaagcgaaataacaccaacagcagtaatagctcccacctcagccgcaaccaatcattcggccgtggcgacaatccccctcctgctcctcaaagagtcgacagtattcaggtgcattctagtcagccaagcggacaggctgtcaccgtgtccaggcagccttcactgaatgcctataacagtctaacaaggagtgggcttaaaaggacaccctctcttaagcctgatgtgcctccaaagccctccttcgccccattaagtacatcgatgaagcctaatgatgcatgcacctag

SEQ ID NO: 112591 - DNA, 4256 bp, Artificial Sequence
  derived and/or modified sequence
gaacacatcgcgtttgcatcccagaaagtagtcgccgcgactatttcccccaaagagacaagcacacatgtaggaatgacaaaggcttgcgaaggagagagcgcagcccgcggcccggagagatcccctcgataatggattactaaatgggatacacgctgtaccagttcgctccgagccccggccgcctgtccgtcgatgcaccgaaaagggtgaagtagagaaataaagtctccccgctgaactactatgaggtcagaagccttgctgctatatttcacactgctacactttgctggggctggtttcccagaagattctgagccaatcagtatttcgcatggcaactatacaaaacagtatccggtgtttgtgggccacaagccaggacggaacaccacacagaggcacaggctggacatccagatgattatgatcatgaacggaaccctctacattgctgctagggaccatatttatactgttgatatagacacatcacacacggaagaaatttattgtagcaaaaaactgacatggaaatctagacaggccgatgtagacacatgcagaatgaagggaaaacataaggatgagtgccacaactttattaaagttcttctaaagaaaaacgatgatgcattgtttgtctgtggaactaatgccttcaacccttcctgcagaaactataagatggatacattggaaccattcggggatgaattcagcggaatggccagatgcccatatgatgccaaacatgccaacgttgcactgtttgcagatggaaaactatactcagccacagtgactgacttccttgccattgacgcagtcatttaccggagtcttggagaaagccctaccctgcggaccgtcaagcacgattcaaaatggttgaaagaaccatactttgttcaagccgtggattacggagattatatctacttcttcttcagggaaatagcagtggagtataacaccatgggaaaggtagttttcccaagagtggctcaggtttgtaagaatgatatgggaggatctcaaagagtcctggagaaacagtggacgtcgttcctgaaggcgcgcttgaactgctcagttcctggagactctcatttttatttcaacattctccaggcagttacagatgtgattcgtatcaacgggcgtgatgttgtcctggcaacgttttctacaccttataacagcatccctgggtctgcagtctgtgcctatgacatgcttgacattgccagtgtttttactgggagattcaaggaacagaagtctcctgattccacctggacaccagttcctgatgaacgagttcctaagcccaggccaggttgctgtgctggctcatcctccttagaaagatatgcaacctccaatgagttccctgatgataccctgaacttcatcaagacgcacccgctcatggatgaggcagtgccctccatcttcaacaggccatggttcctgagaacaatggtcagataccgccttaccaaaattgcagtggacacagctgctgggccatatcagaatcacactgtggtttttctgggatcagagaagggaatcatcttgaagtttttggccagaataggaaatagtggttttctaaatgacagccttttcctggaggagatgagtgtttacaactctgaaaaatgcagctatgatggagtcgaagacaaaaggatcatgggcatgcagctggacagagcaagcagctctctgtatgttgcgttctctacctgtgtgataaaggttccccttggccggtgtgaacgatatgggaagtgtaaaaaaacctgtattgcctccagagacccatattgtggatggataaaggaaggtggtgcctgcagccatttatcacccaacagcagactgacttttgagcaggacatagagcgtggcaatacagatggtctgggggactgtcacaattcctttgtggcactgaatgacatttcaactcctctaccagataatgaaatgtcttacaacacagtgtatgggcattccagttccctcttgcccagcacaaccacatcagattcgacggctcaagaggggtatgagtctaggggaggaatgctggactggaagcatctgcttgactcacctgacagcacagaccctttgggggcagtgtcttcccataatcaccaagacaagaagggagtgattcgggaaagttacctcaaaggccacgaccagctggttcccgtcaccctcttggccattgcagtcatcctggctttcgtcatgggggccgtcttctcgggcatcaccgtctactgcgtctgtgatcatcggcgcaaagacgtggctgtggtgcagcgcaaggagaaggagctcacccactcgcgccggggctccatgagcagcgtcaccaagctcagcggcctctttggggacactcaatccaaagacccaaagccggaggccatcctcacgccactcatgcacaacggcaagctcgccactcccggcaacacggccaagatgctcattaaagcagaccagcaccacctggacctgacggccctccccaccccagagtcaaccccaacgctgcagcagaagcggaagcccagccgcggcagccgcgagtgggagaggaaccagaacctcatcaatgcctgcacaaaggacatgccccccatgggctcccctgtgattcccacggacctgcccctgcgggcctcccccagccacatccccagcgtggtggtcctgcccatcacgcagcagggctaccagcatgagtacgtggaccagcccaaaatgagcgaggtggcccagatggcgctggaggaccaggccgccacactggagtataagaccatcaaggaacatctcagcagcaagagtcccaaccatggggtgaaccttgtggagaacctggacagcctgccccccaaagttccacagcgggaggcctccctgggtcccccgggagcctccctgtctcagaccggtctaagcaagcggctggaaatgcaccactcctcttcctacggggttgactataagaggagctaccccacgaactcgctcacgagaagccaccaggccaccactctcaaaagaaacaacactaactcctccaattcctctcacctctccagaaaccagagctttggcaggggagacaacccgccgcccgccccgcagagggtggactccatccaggtgcacagctcccagccatctggccaggccgtgactgtctcgaggcagcccagcctcaacgcctacaactcactgacaaggtcggggctgaagcgtacgccctcgctaaagccggacgtaccccccaaaccatcctttgctcccctttccacatccatgaagcccaatgatgcgtgtacataatcccagggggagggggtcaggtgtcgaaccagcaggcaaggcgaggtgcccgctcagctcagcaaggttctcaactgcctcgagtacccaccagaccaagaaggcctgcggcagagccgaggacgctgggtcctcctctctgggacacaggggtactcacgaaaactgggccgcgtggtttggtgaaggtttgcaacggcggggactcaccttcattctcttccttcactttcccccacaccctacaacaggtcggacccacaaaagacttcagttatcatcacaaacatgagccaaaagcacatacctaccccatcccccacccccacacacacacacacacacacatgcacacaacacatacacacacacgcacagaggtgaacagaaactgaaacattttgtccacaacttcacgggacgtggccagactgggtttgcgttccaacctgcaaaacacaaatacattttttaaaatcaagaaaatttaaaaagacaaaaaaaaaagaattcattgataattctaactcagactttaacaatggcagaagtttactatgcgcaaatactgtgaaatgcccgccagtgttacagctttctgttgcagcagataaatgccatgttgggcaactatgtcatagatttctgctcctcctctcttttaatgaaataacgtgaccgttaacgcaagtaactctttatttattgttcaccctttttttccttaaggaaaggactcttccaaatatcatcctatgaacagctcttcagaaagcccattgaaagttaaactatttaacgtgaaatccattaactggaataattgagtttctttatttttacaataaattcactgagtaaat

SEQ ID NO: 112592 - protein, 327 aa, Artificial Sequence
  derived and/or modified sequence
MSDKLKERKVSRLSPNGTCALVVEASDSPTRHLGGPMAGKCPHGTLSVEESRVRTPVSHKVIEKRRRDRINRCLNELGKTVPMALAKQGEPQEALAQIRSRVRSLVLSSATVPDQQALGRCEGPFLLLQSSGKLEKAEILEMTVQYLRALHSADFPRGREKAELLAEFANYFHYGYHECMKNLVHYLTTVERMETKDTKYARILAFLQSKARLGAEPAFPPLGSLPEPDFSYQLHPAGPEFAGHSPGEAAVFPQGSGAGPFPWPPGAARSPALPYLPSAPVPLASPAQQHSPFLTPVQGLDRHYLNLIGHAHPNALNLHTPQHPPVL

SEQ ID NO: 112593 - protein, 242 aa, Artificial Sequence
  derived and/or modified sequence
MSDKLKERKRTPVSHKVIEKRRRDRINRCLNELGKTVPMALAKQSSGKLEKAEILEMTVQYLRALHSADFPRGREKAELLAEFANYFHYGYHECMKNLVHYLTTVERMETKDTKYARILAFLQSKARLGAEPAFPPLGSLPEPDFSYQLHPAGPEFAGHSPGEAAVFPQGSGAGPFPWPPGAARSPALPYLPSAPVPLASPAQQHSPFLTPVQGLDRHYLNLIGHAHPNALNLHTPQHPPVL

SEQ ID NO: 112594 - DNA, 984 bp, Artificial Sequence
  derived and/or modified sequence
atgtctgataagctgaaggaacggaaggtctcaaggctgagccccaacggaacttgcgccttggtcgtcgaggccagcgatagccccactagacacttgggaggaccaatggccggaaaatgtccccacggcactctgtctgtcgaagagagtcgggtgaggacccctgttagccacaaagtcattgagaagcgcaggagggataggatcaatcgttgcctgaatgagctcgggaagacagtgcctatggcactggccaagcagggcgagccgcaggaggcattagcccagatcaggtccagagtccggtccctcgtgctcagttcggcaacggtgcctgaccagcaggccctgggtaggtgcgaagggcccttcctactccttcagtcgtcggggaagttagagaaagctgagatcctggaaatgactgtgcaataccttcgcgcactccattctgccgactttccgcgaggtcgggagaaggctgaactgctggctgagtttgccaactactttcattatggatatcatgagtgtatgaagaatttggtccattatctgacgacggtggagcgtatggagaccaaggataccaaatacgctagaatcttagcgtttctgcaaagtaaggctcggctgggggcagagccagccttcccacctctcggtagtcttccggagcccgacttcagctaccagctgcacccagctggtcccgagtttgccggtcattcacctggagaggcagctgtgtttccccagggcagtggggccgggcccttcccttggccccccggagctgctaggagtcctgctctgccttatctgccctctgccccggtcccgctggcaagccccgcacagcagcattccccgttcctgacgcccgtccaaggccttgatcggcattacctgaatctgattgggcacgcccacccaaacgccctgaacctacacacacctcaacacccgcccgtcttgtag

SEQ ID NO: 112595 - DNA, 729 bp, Artificial Sequence
  derived and/or modified sequence
atgtctgataaattaaaagagcggaagcgaaccccagtgtcacacaaagttattgagaagcgtcgacgcgataggattaaccgatgcctgaatgaactcgggaaaacagtgcccatggccctcgctaagcagtcctctgggaagctcgaaaaggcggaaattctggagatgacagtgcagtatcttcgggcactccactctgcagactttccaagaggaagagagaaggccgaactcctggccgagttcgctaactacttccattatgggtaccacgaatgcatgaaaaatctggtgcattacctgacaacagtggagcgaatggagactaaggacaccaaatacgcccggatcctcgcttttcttcagtctaaagcacggcttggcgctgaaccagcttttcccccgcttggctcactccccgagcctgactttagttatcagttacacccagcaggccctgagtttgctggccacagtcccggggaggctgccgtgttccctcagggcagtggcgccggcccttttccctggccacctggcgccgccagatcccctgcactgccctatctgcccagtgcccctgtgcccctcgctagcccggcacaacaacattctccttttcttactccggtgcaaggcctggaccgccattacttgaatctgattggccatgcccatcctaacgcccttaatttgcatacgccccaacatccaccagtcctgtag

SEQ ID NO: 112596 - DNA, 984 bp, Artificial Sequence
  derived and/or modified sequence
atgtctgacaagctgaaggagaggaaggtgtcccggctgagccccaacggcacctgtgccctggtggtggaggccagtgacagccccaccaggcacctgggcggccccatggccggcaagtgcccccacggcaccctgtctgtggaggagagccgggtgaggacccctgtgagccacaaggtgattgagaagagaagaagagaccgcatcaaccgctgcctgaatgagctgggcaagacagtgcccatggccctggccaagcagggcgagccccaggaggccctggcccagatccgcagccgggtgcgcagcctggtgctgagcagcgccaccgtgcctgaccagcaggccctgggccgctgtgagggccccttcctgctgctgcagagcagcggcaagctggagaaggccgagatcctggagatgacagtgcagtacctgcgggccctgcacagcgctgacttcccccggggccgggagaaggccgagctgctggccgagtttgccaactacttccactacggctaccacgagtgcatgaagaacctggtgcactacctgaccaccgtggagaggatggagaccaaggacaccaagtatgcccgcatcctggccttcctgcagagcaaggcccggctgggcgctgagcccgccttcccccccctgggcagcctgcctgagccagacttctcctaccagctgcaccctgctggccctgagtttgctggccacagccctggagaggccgctgtgttcccccagggcagcggggccggccccttcccctggcccccaggagctgcccggagccctgccctgccctacctgcccagcgcccctgtgcccctggccagccctgcccagcagcacagccccttcctgacccctgtgcagggcctggacagacactacctgaacctgattggccacgcccaccccaatgccctgaacctgcacaccccccagcacccccctgtgctgtag

SEQ ID NO: 112597 - DNA, 729 bp, Artificial Sequence
  derived and/or modified sequence
atgtctgacaagctgaaggagaggaagaggacccctgtgagccacaaggtgattgagaagagaagaagagaccgcatcaaccgctgcctgaatgagctgggcaagacagtgcccatggccctggccaagcagagcagcggcaagctggagaaggccgagatcctggagatgacagtgcagtacctgcgggccctgcacagcgctgacttcccccggggccgggagaaggccgagctgctggccgagtttgccaactacttccactacggctaccacgagtgcatgaagaacctggtgcactacctgaccaccgtggagaggatggagaccaaggacaccaagtatgcccgcatcctggccttcctgcagagcaaggcccggctgggcgctgagcccgccttcccccccctgggcagcctgcctgagccagacttctcctaccagctgcaccctgctggccctgagtttgctggccacagccctggagaggccgctgtgttcccccagggcagcggggccggccccttcccctggcccccaggggccgcccggagccctgccctgccctacctgcccagcgcccctgtgcccctggccagccctgcccagcagcacagccccttcctgacccctgtgcagggcctggacagacactacctgaacctgattggacatgcccaccccaatgccctgaacctgcacaccccccagcacccccctgtgctgtag

SEQ ID NO: 112598 - DNA, 984 bp, Artificial Sequence
  derived and/or modified sequence
atgagcgacaagctgaaggagcggaaggtgagccggctgagccccaatgggacctgtgccctggtagttgaggctagtgattcacctacacgacacctcggtggaccaatggccggcaagtgtccacatggtacactctcagtggaggagagccgtgtgcgaacgccggtttcacacaaagtcattgaaaaaaggagaagagatcggatcaaccgatgcttaaacgaactgggcaaaacagtgcccatggcactggcaaagcagggcgaaccacaggaggcccttgcacagattcgttctcgcgtacgctctttggttctctcctctgccactgtcccagatcagcaggccctggggaggtgtgaaggcccattcctgctgctacagtcttccgggaaactcgagaaagctgaaattcttgagatgacagtgcagtacctgagagcactgcacagcgctgattttccccgcggacgagagaaggctgagctgctggcggagttcgcaaattacttccattatggttatcacgaatgtatgaagaacctggttcattacctcaccaccgtcgaacgaatggagacgaaagacactaaatacgctcgcatattggcatttcttcagtccaaggcccggctgggggcggagcccgcttttcctccccttggctctctgcccgaaccagacttctcctatcagctccatcctgcaggccctgagttcgccggacactcaccaggggaagctgctgttttcccccaggggtcaggggcaggcccctttccttggcctcccggcgcagcccggagccctgctttaccctacttaccttccgcaccagtgcccttggcctcacccgcccagcaacacagcccctttctgacgcccgttcaaggactcgatcgccactaccttaacctgattggccatgctcatcctaatgctttgaacctccatacaccacagcacccacccgtgctatag

SEQ ID NO: 112599 - DNA, 729 bp, Artificial Sequence
  derived and/or modified sequence
atgagcgacaagctgaaggagcggaagcggacccccgtgagccacaaggtcatcgagaagcggcgcagagaccggattaatagatgcttaaatgagctgggcaagaccgtacccatggccctggctaaacagtcaagcggcaagttggagaaggcagagatcctggaaatgaccgtccagtaccttagagccctgcattctgctgatttcccgcgaggtcgggaaaaagctgaactgctcgccgaattcgcgaattactttcactacggctaccatgagtgcatgaaaaacctcgtacactacttgacaacggtggagaggatggagaccaaagatacgaagtacgcccggatcctggcgtttctgcagtccaaagcacgcttgggcgctgagcctgctttcccccctttggggagcctgccagagcctgacttttcctaccaattacatcctgctggccctgagttcgctggacactctccaggcgaggcagctgtgttcccccaaggctctggtgccggcccgtttccctggcctcccggcgctgcccgcagtcctgcactaccctaccttccatctgcacctgtccctcttgctagtccggctcagcaacactcaccatttctgacacctgttcaggggttggaccgccattatctgaacctcattggccatgcgcaccccaatgctcttaaccttcatactcctcagcacccacctgtgctttag

SEQ ID NO: 112600 - DNA, 984 bp, Artificial Sequence
  derived and/or modified sequence
atgtctgataagttaaaggagcgcaaggtgtcccgtttatccccaaatgggacgtgtgctctcgtggtcgaagcatccgattcacccaccaggcacctgggcggaccgatggctggcaaatgcccgcacggcacactctccgtggaggagtcgagggtgaggaccccagtgtcccacaaggtgatagagaaacgaaggcgcgatagaatcaacagatgcctgaatgagctcggcaaaaccgtgcctatggctcttgcaaagcagggcgaaccccaggaagccctggctcagatccggtctcgcgtgaggagcctcgtcctgtcaagcgcaacagtacccgaccagcaggctttgggcaggtgtgaaggacccttcttgctactgcagtcatcaggaaagctggaaaaggccgagatcctcgagatgaccgtccagtacctgagggcgctccacagtgccgattttcccagaggcagagagaaggccgagctgctcgcagagtttgctaactactttcattatggctatcacgaatgcatgaaaaacctggtccactacctgactacagttgaacgtatggagaccaaagatacgaagtatgcccgtattctagcgtttctgcagtcaaaagcgagactgggcgcagaacccgctttcccccctctcgggagcctacccgagcctgacttctcttatcagctccacccagccggacccgaatttgctgggcactcacccggtgaagctgcagtgttcccgcagggttctggggctggaccttttccttggccgccaggagcagctcgatcccccgcacttccctacctgcctagtgccccagtgccgctagcatctcctgcgcaacagcactctccctttctgacacccgttcagggattagaccgccactacctgaacctcatcggccacgcccacccgaatgctctgaatctgcacacaccacagcatccaccagtgctgtag

SEQ ID NO: 112601 - DNA, 729 bp, Artificial Sequence
  derived and/or modified sequence
atgtctgacaagctaaaagagagaaaacgaacccctgtgagccataaagtaatagaaaagagacgtcgagaccgtatcaatcgttgcctgaacgagctgggcaaaacggtgccaatggcactggcgaagcaaagttcaggtaagcttgaaaaagccgaaatcttagagatgaccgtccaatacctcagagcactgcatagtgccgactttcccagagggagggaaaaggcagagttgctggcagaatttgccaactatttccactacggatatcacgagtgcatgaagaacctcgtgcattatctcaccaccgtcgagaggatggaaacaaaggacaccaagtatgcgaggattcttgccttcctccagtccaaagctcgcctgggagccgaaccagccttccctcccctgggatctctccctgagcctgatttttcctaccagcttcaccccgctggcccagaatttgcgggacattccccaggcgaagccgctgtcttccctcagggtagcggagcaggtcctttcccctggccacccggagccgcaagatcaccagcccttccgtatctcccgtctgcccctgtccccctagccagtcctgcccagcaacattccccatttttgacacccgtgcagggcctggatcgacactacctgaacctgatcgggcacgcacacccaaacgcgctcaacctacacaccccacagcacccccctgttctctag

SEQ ID NO: 112602 - DNA, 984 bp, Artificial Sequence
  derived and/or modified sequence
atgagcgacaagctgaaggagagaaaggtgagcagactgagccccaacggcacctgcgccctggtggtggaggccagcgacagccccaccagacacctgggcggccccatggccggcaagtgcccccacggcaccctgagcgtggaggagagcagagtgagaacccccgtgagccacaaggtgatcgagaagagaagaagagacagaatcaacagatgcctgaacgagctgggcaagaccgtgcccatggccctggccaagcagggcgagccccaggaggccctggcccagatcagaagcagagtgagaagcctggtgctgagcagcgccaccgtgcccgaccagcaggccctgggcagatgcgagggccccttcctgctgctgcagagcagcggcaagctggagaaggccgagatcctggagatgaccgtgcagtacctgagagccctgcacagcgccgacttccccagaggcagagagaaggccgagctgctggccgagttcgccaactacttccactacggctaccacgagtgcatgaagaacctggtgcactacctgaccaccgtggagagaatggagaccaaggacaccaagtacgccagaatcctggccttcctgcagagcaaggccagactgggcgccgagcccgccttcccccccctgggcagcctgcccgagcccgacttcagctaccagctgcaccccgccggccccgagttcgccggccacagccccggcgaggccgccgtgttcccccagggcagcggcgccggccccttcccctggccccccggcgccgccagaagccccgccctgccctacctgcccagcgcccccgtgcccctggccagccccgcccagcagcacagccccttcctgacccccgtgcagggcctggacagacactacctgaacctgatcggccacgcccaccccaacgccctgaacctgcacaccccccagcacccccccgtgctgtag

SEQ ID NO: 112603 - DNA, 729 bp, Artificial Sequence
  derived and/or modified sequence
atgagcgacaagctgaaggagagaaagagaacccccgtgagccacaaggtgatcgagaagagaagaagagacagaatcaacagatgcctgaacgagctgggcaagaccgtgcccatggccctggccaagcagagcagcggcaagctggagaaggccgagatcctggagatgaccgtgcagtacctgagagccctgcacagcgccgacttccccagaggcagagagaaggccgagctgctggccgagttcgccaactacttccactacggctaccacgagtgcatgaagaacctggtgcactacctgaccaccgtggagagaatggagaccaaggacaccaagtacgccagaatcctggccttcctgcagagcaaggccagactgggcgccgagcccgccttcccccccctgggcagcctgcccgagcccgacttcagctaccagctgcaccccgccggccccgagttcgccggccacagccccggcgaggccgccgtgttcccccagggcagcggcgccggccccttcccctggccccccggcgccgccagaagccccgccctgccctacctgcccagcgcccccgtgcccctggccagccccgcccagcagcacagccccttcctgacccccgtgcagggcctggacagacactacctgaacctgatcggccacgcccaccccaacgccctgaacctgcacaccccccagcacccccccgtgctgtag

SEQ ID NO: 112604 - DNA, 984 bp, Artificial Sequence
  derived and/or modified sequence
atgtcagacaagctcaaggaacgcaaagtgagtcggctgagcccaaatggcacttgcgccctggtggtggaggcatctgactcaccgacccgccacttgggtggaccgatggcagggaagtgcccgcacgggactttgagtgtggaggaatctcgagtgagaacccccgtttctcataaagtgatagaaaagcggaggagggacaggatcaaccgctgcttgaacgagctgggcaagacagtgcccatggccttggcgaagcagggcgaacctcaggaggctctggcgcagatccgcagccgcgtccgctcgctggtcctctccagcgccacagtgcccgaccagcaggcgctgggccgctgcgaggggcccttcctccttttgcagagttccgggaagctggagaaggcggagatcctcgagatgaccgttcagtacctgagagcactgcactccgctgattttccccggggaagggaaaaagcagaacttctagcggagtttgccaactacttccactatggctaccacgagtgcatgaagaacctggtgcattacctcaccacggtggagcggatggagaccaaggacacgaagtacgcgcgcatcctcgccttcttgcagtccaaggcccgcctgggcgcggagcccgcctttccgccgctgggttcgctcccggagccggatttctcctatcagctgcaccctgcggggcccgaattcgctggtcacagcccgggcgaggccgctgtgttcccgcagggctctggtgccgggcctttcccctggccgcctggcgcggcccgcagccccgcgctgccctacctgcccagcgcgccagtgccgctcgctagcccagcgcagcagcacagccccttcctgacaccggtgcagggcctggaccggcattacctcaacctgatcggccacgcgcaccccaacgcccttaacctgcacacgccccagcaccccccggtgctctga

SEQ ID NO: 112605 - DNA, 841 bp, Artificial Sequence
  derived and/or modified sequence
acctgggacactcgaggaggcacacgaggcggaaaagtggacgggtgccccgcgccaccgcctctcccgagggcgcgtactgaccaggatgtcagacaagctcaaggaacgcaaaagaacccccgtttctcataaagtgatagaaaagcggaggagggacaggatcaaccgctgcttgaacgagctgggcaagacagtgcccatggccttggcgaagcagagttccgggaagctggagaaggcggagatcctcgagatgaccgttcagtacctgagagcactgcactccgctgattttccccggggaagggaaaaagcagaacttctagcggagtttgccaactacttccactatggctaccacgagtgcatgaagaacctggtgcattacctcaccacggtggagcggatggagaccaaggacacgaagtacgcgcgcatcctcgccttcttgcagtccaaggcccgcctgggcgcggagcccgcctttccgccgctgggttcgctcccggagccggatttctcctatcagctgcaccctgcggggcccgaattcgctggtcacagcccgggcgaggccgctgtgttcccgcagggctctggtgccgggcctttcccctggccgcctggcgcggcccgcagccccgcgctgccctacctgcccagcgcgccagtgccgctcgctagcccagcgcagcagcacagccccttcctgacaccggtgcagggcctggaccggcattacctcaacctgatcggccacgcgcaccccaacgcccttaacctgcacacgccccagcaccccccggtgctctgacgcccactcgcccgccagatttct

SEQ ID NO: 112606 - protein, 241 aa, Artificial Sequence
  derived and/or modified sequence
MSDKLKERKRTPVSHKVIEKRRRDRINRCLNELGKTVPMALAKQSSGKLEKAEILEMTVQYLRALHSADFPRGREKELLAEFANYFHYGYHECMKNLVHYLTTVERMETKDTKYARILAFLQSKARLGAEPAFPPLGSLPEPDFSYQLHPAGPEFAGHSPGEAAVFPQGSGAGPFPWPPGAARSPALPYLPSAPVPLASPAQQHSPFLTPVQGLDRHYLNLIGHAHPNALNLHTPQHPPVL

SEQ ID NO: 112607 - DNA, 726 bp, Artificial Sequence
  derived and/or modified sequence
atgtctgataaactcaaagaacgaaagaggaccccagtttcacataaagtaattgaaaagcggcgccgggacaggattaacagatgcttaaatgaactggggaaaaccgtcccgatggcgctggcgaaacagtcttctggaaagctggagaaggccgaaattctggaaatgaccgttcagtacctgcgggccctgcacagtgccgacttccctcggggcagagaaaaagaattgctggctgagtttgctaattactttcattacggctaccatgagtgcatgaaaaacttggttcattatctcacgaccgtggagcggatggagacgaaggataccaaatacgcccgcatactggctttcttgcagagtaaagctcgactaggcgccgaacctgccttcccgccgcttggctctcttccggaaccagacttctcatatcaactgcacccagctgggcctgagtttgccggacactctcccggagaggcagctgtgtttcctcaaggcagcggagccggcccgtttccatggccacccggggccgcaagaagccctgcactgccatacctgcctagcgcgcccgtccccttggcttcccccgcgcagcagcactccccttttctgacccctgtgcaggggctcgataggcattacttgaaccttatcgggcatgcgcaccccaacgctctgaatcttcacaccccacagcacccacccgtgctgtag

SEQ ID NO: 112608 - DNA, 726 bp, Artificial Sequence
  derived and/or modified sequence
atgtctgacaagctgaaggagaggaagaggacccctgtgagccacaaggtgattgagaagagaagaagagaccgcatcaaccgctgcctgaatgagctgggcaagacagtgcccatggccctggccaagcagagcagcggcaagctggagaaggccgagatcctggagatgacagtgcagtacctgcgggccctgcacagcgctgacttcccccggggccgggagaaggagctgctggccgagtttgccaactacttccactacggctaccacgagtgcatgaagaacctggtgcactacctgaccaccgtggagaggatggagaccaaggacaccaagtatgcccgcatcctggccttcctgcagagcaaggcccggctgggcgctgagcccgccttcccccccctgggcagcctgcctgagccagacttctcctaccagctgcaccctgctggccctgagtttgctggccacagccctggagaggccgctgtgttcccccagggcagcggggccggccccttcccctggcccccaggagctgcccggagccctgccctgccctacctgcccagcgcccctgtgcccctggccagccctgcccagcagcacagccccttcctgacccctgtgcagggcctggacagacactacctgaacctgattggccacgcccaccccaatgccctgaacctgcacaccccccagcacccccctgtgctgtag

SEQ ID NO: 112609 - DNA, 726 bp, Artificial Sequence
  derived and/or modified sequence
atgagcgacaagctgaaggagcggaagcggacccccgtgagccacaaagttattgagaaacgccggcgcgaccggatcaaccggtgtctcaatgagctgggcaaaacagttccgatggccctggccaaacaatcgagtggcaagttggaaaaggccgagattttggagatgaccgtgcagtacctacgggccctgcatagcgcagactttcccagaggacgggagaaggagctgttagccgagttcgcaaattattttcactatggatatcacgaatgtatgaagaatctggtgcattacctgaccacggtagaacggatggaaactaaagataccaagtatgcaaggattttagccttcctgcaatccaaggccagactgggcgccgagccagcatttccccccctgggctcgctgcctgagccggacttttcttaccagctccacccggctgggccggagttcgccgggcactctcccggggaagccgccgtctttccccagggatccggagctgggccctttccatggccccccggcgcagcaagatccccagctctcccttacttgcccagcgccccagtgccgctggcttctccagcccaacaacacagtccgttcctgacccctgtacagggactggacagacattacttaaatctcatcggacacgcccacccaaacgctctaaatctacatacaccacaacacccccccgtgctatag

SEQ ID NO: 112610 - DNA, 726 bp, Artificial Sequence
  derived and/or modified sequence
atgtctgataaacttaaggaaaggaagcgtacaccagttagtcacaaggtgatcgaaaagaggcggagggatcggattaaccgatgcctcaacgaattaggaaagacggtgccaatggccctggcaaagcagagcagcggcaaactggagaaggctgagattttagaaatgacagttcaatacttgagggccctgcacagtgcagattttccccgaggtagggagaaggaactgttagctgagtttgctaattacttccactacggataccacgaatgtatgaagaacttagtccactaccttacaacagtggagaggatggagacgaaggatactaagtacgcccgtattctggcattcctgcagtccaaagcacgactgggtgccgagcccgcttttccgccactgggctccttgcctgagcctgatttttcatatcagctgcatccggctggccctgagtttgcaggtcactcgcccggtgaggctgccgttttccctcagggatccggagctgggccttttccctggccacctggggcagctcggagcccggctctgccatacttgccttccgccccagtgccactggcaagcccagcccagcagcacagcccgttccttactcccgtgcagggactggatcgccattatctcaaccttattggccacgcacatcccaacgctctcaacctgcataccccacagcacccccctgtgctttag

SEQ ID NO: 112611 - DNA, 726 bp, Artificial Sequence
  derived and/or modified sequence
atgagcgacaagctgaaggagagaaagagaacccccgtgagccacaaggtgatcgagaagagaagaagagacagaatcaacagatgcctgaacgagctgggcaagaccgtgcccatggccctggccaagcagagcagcggcaagctggagaaggccgagatcctggagatgaccgtgcagtacctgagagccctgcacagcgccgacttccccagaggcagagagaaggagctgctggccgagttcgccaactacttccactacggctaccacgagtgcatgaagaacctggtgcactacctgaccaccgtggagagaatggagaccaaggacaccaagtacgccagaatcctggccttcctgcagagcaaggccagactgggcgccgagcccgccttcccccccctgggcagcctgcccgagcccgacttcagctaccagctgcaccccgccggccccgagttcgccggccacagccccggcgaggccgccgtgttcccccagggcagcggcgccggccccttcccctggccccccggcgccgccagaagccccgccctgccctacctgcccagcgcccccgtgcccctggccagccccgcccagcagcacagccccttcctgacccccgtgcagggcctggacagacactacctgaacctgatcggccacgcccaccccaacgccctgaacctgcacaccccccagcacccccccgtgctgtag

SEQ ID NO: 112612 - DNA, 846 bp, Artificial Sequence
  derived and/or modified sequence
acctgggacactcgaggaggcacacgaggcggaaaagtggacgggtgccccgcgccaccgcctctcccgagggcgcgtactgaccaggatgtcagacaagctcaaggaacgcaaaagaacccccgtttctcataaagtgatagaaaagcggaggagggacaggatcaaccgctgcttgaacgagctgggcaagacagtgcccatggccttggcgaagcagagttccgggaagctggagaaggcggagatcctcgagatgaccgttcagtacctgagagcactgcactccgctgattttccccggggaagggaaaaagaacttctagcggagtttgccaactacttccactatggctaccacgagtgcatgaagaacctggtgcattacctcaccacggtggagcggatggagaccaaggacacgaagtacgcgcgcatcctcgccttcttgcagtccaaggcccgcctgggcgcggagcccgcctttccgccgctgggttcgctcccggagccggatttctcctatcagctgcaccctgcggggcccgaattcgctggtcacagcccgggcgaggccgctgtgttcccgcagggctctggtgccgggcctttcccctggccgcctggcgcggcccgcagccccgcgctgccctacctgcccagcgcgccagtgccgctcgctagcccagcgcagcagcacagccccttcctgacaccggtgcagggcctggaccggcattacctcaacctgatcggccacgcgcaccccaacgcccttaacctgcacacgccccagcaccccccggtgctctgacgcccactcgcccgccagatttctcctcgctt

SEQ ID NO: 112613 - protein, 304 aa, Artificial Sequence
  derived and/or modified sequence
MSAKSKGNPSSSCPAEGPPAASKTKVKEQIKIIVEDLELVLGDLKDVAKELKEVVDQIDTLTSDLQLEDEMTDSSKTDTLNSSSSGTTASSLEKIKVQANAPLIKPPAHPSAILTVLRKPNPPPPPPRLTPVKCEDPKRVVPTANPVKTNGTLLRNGGLPGGPNKIPNGDICCIPNSNLDKAPVQLLMHRPEKDRCPQAGPRERVRFNEKVQYHGYCPDCDTRYNIKNREVHLHSEPVHPPGKIPHQGPPLPPTPHLPPFPLENGGMGISHSNSFPPIRPATVPPPTAPKPQKTILRKSTTTTV

SEQ ID NO: 112614 - protein, 234 aa, Artificial Sequence
  derived and/or modified sequence
MTDSSKTDTLNSSSSGTTASSLEKIKVQANAPLIKPPAHPSAILTVLRKPNPPPPPPRLTPVKCEDPKRVVPTANPVKTNGTLLRNGGLPGGPNKIPNGDICCIPNSNLDKAPVQLLMHRPEKDRCPQAGPRERVRFNEKVQYHGYCPDCDTRYNIKNREVHLHSEPVHPPGKIPHQGPPLPPTPHLPPFPLENGGMGISHSNSFPPIRPATVPPPTAPKPQKTILRKSTTTTV

SEQ ID NO: 112615 - DNA, 915 bp, Artificial Sequence
  derived and/or modified sequence
atgagcgccaagagcaagggcaaccccagcagcagctgccccgccgagggcccccccgccgccagcaagaccaaggtgaaggagcagatcaagatcatcgtggaggacctggagctggtgctgggcgacctgaaggacgtggccaaggagctgaaggaggtggtggaccagatcgacaccctgaccagcgacctgcagctggaggacgagatgaccgacagcagcaagaccgacaccctgaacagcagcagcagcggcaccaccgccagcagcctggagaagatcaaggtgcaggccaacgcccccctgatcaagccccccgcccaccccagcgccatcctgaccgtgctgagaaagcccaacccccccccccccccccccagactgacccccgtgaagtgcgaggaccccaagagagtggtgcccaccgccaaccccgtgaagaccaacggcaccctgctgagaaacggcggcctgcccggcggccccaacaagatccccaacggcgacatctgctgcatccccaacagcaacctggacaaggcccccgtgcagctgctgatgcacagacccgagaaggacagatgcccccaggccggccccagagagagagtgagattcaacgagaaggtgcagtaccacggctactgccccgactgcgacaccagatacaacatcaagaacagagaggtgcacctgcacagcgagcccgtgcacccccccggcaagatcccccaccagggcccccccctgccccccaccccccacctgccccccttccccctggagaacggcggcatgggcatcagccacagcaacagcttcccccccatcagacccgccaccgtgcccccccccaccgcccccaagccccagaagaccatcctgagaaagagcaccaccaccaccgtgtag

SEQ ID NO: 112616 - DNA, 915 bp, Artificial Sequence
  derived and/or modified sequence
atgagtgcgaaatcgaagggtaatccttcatcctcttgccctgccgagggacctcccgccgcatcaaagaccaaagtaaaagaacagatcaagatcattgttgaggacctcgagcttgttctcggggacctgaaagacgtggcaaaagagttgaaggaggtagtagatcagattgacacactgacatccgacctgcagctagaagatgagatgactgattcctctaaaacggacaccctgaactctagctcgtcagggaccacagcaagctcacttgaaaaaatcaaagtccaggccaacgcaccactgattaagccacccgcgcaccccagtgcgatactcactgtcctgaggaaacccaatccccccccccctccacccaggctaacacctgtgaagtgtgaagatccgaagcgggttgttcccactgcaaacccagtcaaaacaaacggcaccctcctgcggaacggcggactacctggcggccccaataagattccaaatggcgacatttgctgcatcccaaactccaacctcgacaaagccccggttcagcttttgatgcacagacctgagaaagatagatgtccccaggctgggccccgggagagagtacgatttaatgaaaaagttcagtaccatgggtattgtccagattgtgacacacgctacaacattaagaatcgcgaggtgcacctgcactccgaacccgtgcatccacccggaaaaatacctcaccaaggaccaccactgccgcctacaccacacctacccccctttcctttggaaaacggaggtatgggcatcagccacagtaactcctttcctcctatacggcctgcgaccgtcccgcctcctaccgcccccaagcctcagaaaacaattttacgcaagtccacaactaccactgtgtag

SEQ ID NO: 112617 - DNA, 915 bp, Artificial Sequence
  derived and/or modified sequence
atgtctgccaagagcaagggcaaccccagcagcagctgcccagctgagggccccccagctgccagcaagaccaaggtgaaggagcagatcaagatcatcgtggaggacctggagctggtgctgggggacctgaaggatgtggccaaggagctgaaggaggtggtggaccagattgacaccctgaccagtgacctgcagctggaggatgagatgacagacagcagcaagacagacaccctgaacagcagcagcagcggcaccacagccagcagcctggagaagatcaaggtgcaggccaatgcccccctcatcaagcccccagcccaccccagcgccatcctgactgtgctgaggaagcccaaccccccacctcctccaccccggctgacccctgtgaagtgtgaggaccccaagagggtggtgcccacagccaaccctgtgaagaccaacggcaccctgctgagaaatggaggcctgcccggcggccccaacaagatccccaacggggacatctgctgcatccccaacagcaacctggacaaggcccctgtgcagctgctgatgcacaggcctgagaaggaccgctgcccccaggccggcccccgggagcgggtgcgcttcaatgagaaggtgcagtaccacggctactgcccagactgtgacacccgctacaacatcaagaaccgggaggtgcacctgcacagcgagcctgtgcaccccccaggcaagatcccccaccagggcccccccctgccccccaccccccacctgccccccttccccctggagaatggaggcatgggcatcagccacagcaacagcttcccccccatccggcctgccaccgtgcccccacccacagcccccaagccccagaagaccatcctgaggaagagcaccaccaccaccgtgtag

SEQ ID NO: 112618 - DNA, 915 bp, Artificial Sequence
  derived and/or modified sequence
atgagcgccaagagcaagggcaaccccagcagcagctgccccgccgaaggacctcccgctgcctctaagactaaagtgaaggagcagattaaaattattgtggaggacctagaactagtcctgggcgatctcaaggatgtcgctaaggaactgaaggaggttgttgaccagattgatactctcactagcgacctccagttagaggatgaaatgactgattccagtaagaccgacactctaaacagctcatcaagtggtactactgcctctagtctcgagaagataaaagtgcaggccaatgccccactcatcaagccacccgctcaccctagcgcaatcttaactgttctccggaaaccaaaccccccaccccccccacctaggctgacacccgtgaaatgcgaggatccgaaaagggttgtacccactgctaatccggtcaagactaatggtactctgctacggaatggaggacttccggggggcccgaacaagattcccaacggcgacatttgctgcattccaaattccaatctggacaaagctccagtgcagctactgatgcacaggcccgagaaagacagatgccctcaggctggccccagagaaagggtgcggttcaatgagaaagtgcagtaccatggctactgccctgactgcgacacgaggtacaatatcaagaatcgagaggtgcaccttcacagcgagccagtccatccccctggtaaaattcctcatcagggtccaccacttcctccaacccctcatctgccgccttttcctctggagaacgggggtatggggatctctcacagtaactccttcccgcctataaggcccgctacggtgccccccccaaccgctcctaagcctcaaaaaaccatcttacggaaatccaccacaactacagtctag

SEQ ID NO: 112619 - DNA, 915 bp, Artificial Sequence
  derived and/or modified sequence
atgtctgccaagagtaagggtaacccatctagctcatgtcctgccgaagggccacctgcagcttccaagaccaaagtcaaggaacagattaaaatcatcgtcgaggacctggagctggtgcttggtgacctgaaggacgtagcgaaagagctgaaggaggtggtcgatcagattgacaccctcacttcagatcttcagcttgaggacgagatgacagactcctccaaaaccgatactctaaattcaagttcctctggaactaccgccagctctctggaaaaaattaaagtgcaggctaatgctcccttgataaaaccccctgcccaccccagcgccatcctgaccgtcttgagaaaacccaatcccccaccccctcctcccaggctcacacccgtgaaatgcgaggacccaaagcgagtcgtgcccacagccaaccccgtcaagacaaatggtacactgctgaggaatgggggactccccggaggtccaaataagattccaaatggagatatttgttgcatccctaactcaaatctggataaagcaccagtgcagttgctgatgcaccgacctgagaaggaccgatgcccccaagcaggtcccagggaaagagtgcgatttaatgagaaggtgcagtaccacggctattgccctgactgcgatactagatataatatcaaaaatagggaagtgcatttgcattccgaaccagtgcaccctcctggcaaaatccctcatcaggggcctccgctcccaccaacacctcacctcccaccttttcctttggaaaatggcggtatgggcatcagtcactccaacagcttcccaccaatccgtccagctactgtccccccacccaccgcacccaagccgcagaaaacaatccttcggaagagcactacaaccacggtctag

SEQ ID NO: 112620 - DNA, 1747 bp, Artificial Sequence
  derived and/or modified sequence
gagccgagcgccgcgtctcgggagttgatggcagcaccactgtgcggccgcccggccgagcgcggagcgcagccactcgccgctgcccagggagcgcccaagatgtggggggaccggggcggcagcggccgtagcagcgccagggacgggggcacgcagcagcctccgctcgcccgcctgtcctgacctgcctcgcttgcccccaaagaatgtcagccaagtccaaggggaacccctcctcgtcctgtccagccgagggaccgccggcagcctccaaaaccaaggtgaaggaacagatcaagatcatcgtggaggatttggaattagtcctgggcgacctgaaggacgtggccaaggaacttaaggaggtggttgaccagattgacaccctgacctctgacctacagctggaggatgagatgactgacagctccaaaacggacacgctgaatagtagctcaagtggcacaacagcctccagcctagagaagatcaaagtgcaggctaatgcaccgcttattaaacccccagcacacccgtctgctatcctcacggtcctgagaaagccaaaccctccaccacctcctccaaggttgacacctgtgaagtgtgaagaccccaaaagggtggttccaactgccaatcctgtaaaaaccaatggcacccttctacgaaatggaggcttaccaggtggacctaacaaaattccaaatggagatatctgctgcatacccaacagtaacttggacaaggctccagtccagcttctgatgcatagacctgaaaaagacagatgtccccaggcagggcctcgagaacgagttcggtttaatgaaaaagtacagtaccatggctattgtcctgactgtgatacccggtataacataaaaaacagggaggtccacttacacagtgaacctgtccacccaccgggaaagattcctcaccaaggccctcccctccctcctacaccccatctccctcctttcccactagaaaatgggggaatgggaataagccacagtaacagcttcccccctatcagacctgcaactgtgcctcctcccactgcaccaaaaccacagaagacgatcttgaggaagtcaaccactacaaccgtgtgatgtatgccattaaaaaaattgtttttttaattttctatattataaacataaaataagtaatgagcactttctactcaagcaataaaaagcccaaatatattaatcctgcattcagcaaagtggcataaaaatcacctggtaagtatgcagcacattgcttatatcctgggtatgcattattttaaatgttgtatcattaaaaacctcagaatgatgaaaaatatgaatgatgcattgtttttgcaattgacctatgacaaactgtgaacctgcagatttcacctattttgatttactataagagctgggatttgattcattttatttatgcctaagtcatctatgcattaacatgtcatattcttaactttgatctaatgctttttactaggaaattttaatactgaaggactattttattatttttttctaaagatgtttgtcactagtttttcattattaaatgctgaggccaataccaagaagtttattttctatattatacaattatgaattacatgctcagctatatatgtaataaaatactttggtctgtggaaatattgttaaatcaataaacaatagtaaataatgacaaaagcaaatgttcctcagaattaaaa

SEQ ID NO: 112621 - DNA, 1179 bp, Artificial Sequence
  derived and/or modified sequence
ttaacagaagctccattacctactcccacctccccacatgatgaaacagggaaacagtgctgcaggcatacagtgacaacaggacatcaggaaatgcccaagaagtttgttaggtgctgtgtcatgaatcaagtcttcattttaatgtgttctaattgttgtaaaacaagagggaatggtatttggaatttagctatatttatcttctcaatcaaattctacttcagaggtggttgaccagattgacaccctgacctctgacctacagctggaggatgagatgactgacagctccaaaacggacacgctgaatagtagctcaagtggcacaacagcctccagcctagagaagatcaaagtgcaggctaatgcaccgcttattaaacccccagcacacccgtctgctatcctcacggtcctgagaaagccaaaccctccaccacctcctccaaggttgacacctgtgaagtgtgaagaccccaaaagggtggttccaactgccaatcctgtaaaaaccaatggcacccttctacgaaatggaggcttaccaggtggacctaacaaaattccaaatggagatatctgctgcatacccaacagtaacttggacaaggctccagtccagcttctgatgcatagacctgaaaaagacagatgtccccaggcagggcctcgagaacgagttcggtttaatgaaaaagtacagtaccatggctattgtcctgactgtgatacccggtataacataaaaaacagggaggtccacttacacagtgaacctgtccacccaccgggaaagattcctcaccaaggccctcccctccctcctacaccccatctccctcctttcccactagaaaatgggggaatgggaataagccacagtaacagcttcccccctatcagacctgcaactgtgcctcctcccactgcaccaaaaccacagaagacgatcttgaggaagtcaaccactacaaccgtgtgatgtatgccattaaaaaaattgtttttttaattttctatattataaacataaaataagtaatgagcactttctactcaagcaataaaaagcccaaatatattaatcctgcattcagcaaagtggcataaaaatcacctggtaagtatgcagcacattgcttatatcctgggtatgcattattttaaatgttgtat

SEQ ID NO: 112622 - DNA, 1298 bp, Artificial Sequence
  derived and/or modified sequence
agcatgtctggtatccagcttttaatccgtaatgccaggcactcccaaataaaaggaaccaatcaactgatgcatgcattctctagcaggtcattccagaagctccattacctactcccacctccccacatgatgaaacagggaaacagtgctgcaggcatacagtgacaacaggacatcaggaaatgcccaagaagtttgttaggtgctgtgtcatgaatcaagtcttcattttaatgtgttctaattgttgtaaaacaagagggaatggtatttggaatttagctatatttatcttctcaatcaaattctacttcagaggtggttgaccagattgacaccctgacctctgacctacagctggaggatgagatgactgacagctccaaaacggacacgctgaatagtagctcaagtggcacaacagcctccagcctagagaagatcaaagtgcaggctaatgcaccgcttattaaacccccagcacacccgtctgctatcctcacggtcctgagaaagccaaaccctccaccacctcctccaaggttgacacctgtgaagtgtgaagaccccaaaagggtggttccaactgccaatcctgtaaaaaccaatggcacccttctacgaaatggaggcttaccaggtggacctaacaaaattccaaatggagatatctgctgcatacccaacagtaacttggacaaggctccagtccagcttctgatgcatagacctgaaaaagacagatgtccccaggcagggcctcgagaacgagttcggtttaatgaaaaagtacagtaccatggctattgtcctgactgtgatacccggtataacataaaaaacagggaggtccacttacacagtgaacctgtccacccaccgggaaagattcctcaccaaggccctcccctccctcctacaccccatctccctcctttcccactagaaaatgggggaatgggaataagccacagtaacagcttcccccctatcagacctgcaactgtgcctcctcccactgcaccaaaaccacagaagacgatcttgaggaagtcaaccactacaaccgtgtgatgtatgccattaaaaaaattgtttttttaattttctatattataaacataaaataagtaatgagcactttctactcaagcaataaaaagcccaaatatattaatcctgcattcagcaaagtggcataaaaatcacctggtaagtatgcagcacattgcttatatcctgggtatgcattattttaaatgttgtatcattaaaaacctcagaatgatgaaaaa

SEQ ID NO: 112623 - protein, 498 aa, Artificial Sequence
  derived and/or modified sequence
MFEKLTLYCDSYIQLIPISFVLGFYVTLVVTRWWNQYENLPWPDRLMSLVSGFVEGKDEQGRLLRRTLIRYANLGNVLILRSVSTAVYKRFPSAQHLVQAGFMTPAEHKQLEKLSLPHNMFWVPWVWFANLSMKAWLGGRIRDPILLQSLLNEMNTLRTQCGHLYAYDWISIPLVYTQVVTVAVYSFFLTCLVGRQFLNPAKAYPGHELDLVVPVFTFLQFFFYVGWLKVSLLAVDEMHQDLPRMEPDMYWNKPEPQPPYTAASAQFRRASFMGSTFNISLNKEEMEFQPNQEDEEDAHAGIIGRFLGLQSHDHHPPRANSRTKLLWPKRESLLHEGLPKNHKAAKQNVRGQEDNKAWKLKAVDAFKSAPLYQRPGYYSAPQTPLSPTPMFFPLEPSAPSKLHSVTGIDTKDKSLKTVSSGAKKSFELLSESDGALMEHPEVSQVRRKTVEFNLTDMPEIPENHLKEPLEQSPTNIHTTLKDHMDPYWALENRDEAHS

SEQ ID NO: 112624 - DNA, 1497 bp, Artificial Sequence
  derived and/or modified sequence
atgtttgagaaactgacattgtattgtgactcttacattcagttgattcccatcagcttcgtactgggattctatgtgacccttgttgtgactcggtggtggaatcagtacgagaacctgccgtggcctgatcgactgatgtcgctggtgtccgggtttgtggagggtaaggatgagcagggaaggttgttgagacggacactcatacgctacgccaacttgggaaatgtgctgatcctgaggtctgtgtccacagcagtttacaaaagattcccatctgctcagcacctcgtgcaggccggtttcatgaccccggccgagcataagcagctggagaaattatccctgccccacaacatgttttgggtgccttgggtgtggtttgctaacctgagcatgaaagcctggctaggtggcagaatccgcgacccaatactcctacagagtctgctcaacgaaatgaatacccttagaacacagtgtggccacctgtacgcatacgattggatttccatccctttagtgtatacccaggtggtgaccgtggcagtatatagcttctttctgacgtgtctagtgggtaggcagtttctgaaccctgccaaggcatacccgggacacgagctcgacctggtcgtgcctgtcttcaccttcctgcagttttttttttacgtcgggtggctgaaagtgtcactgctggccgttgacgagatgcaccaagaccttcctcggatggagcccgacatgtactggaataagcccgagccccagcccccatatactgctgccagcgcacaatttagaagggcaagttttatgggttctactttcaacatcagtttaaataaagaggagatggagtttcagccaaatcaggaggatgaagaggatgcacacgccggaatcattggacgatttctggggctgcagtctcatgaccatcatccacccagagcaaacagtagaacaaaactcctgtggccaaagcgagaatcattgctacatgaggggctacccaagaaccacaaggccgcaaaacagaacgtgcgtggacaggaggacaataaagcatggaagctcaaggcagtggatgcctttaagagtgctcctctgtaccagaggcccggctactacagcgcaccacagactcccctttctcctacgcccatgtttttcccactggaaccctctgccccctcaaagctgcattcagtgacaggaatcgatacaaaggacaagtctctgaaaactgtgagtagcggagccaaaaagtcctttgaattgctgtcagagtctgacggcgcattgatggagcaccctgaggtgtcccaggttaggcggaaaaccgtcgaattcaacttaaccgatatgccagagattccggaaaatcatctcaaggaacctttagagcagagtcctacaaatatacacaccactctaaaggaccacatggatccgtactgggccttggaaaaccgcgatgaagcacatagctag

SEQ ID NO: 112625 - DNA, 1497 bp, Artificial Sequence
  derived and/or modified sequence
atgtttgagaagctgaccctgtactgtgacagctacatccagctgatccccatcagctttgtgctgggcttctacgtgaccctggtggtgacccgctggtggaaccagtatgagaacctgccctggccagaccggctgatgagcctggtgtctggctttgtggagggcaaggatgagcagggccgcctgctgcggaggaccctcatccgctatgccaacctgggcaatgtgctgatcctgcggtctgtgtccacagctgtgtacaagcgcttccccagcgcccagcacctggtgcaggccggcttcatgaccccagctgagcacaagcagctggagaagctgagcctgccccacaacatgttctgggtgccctgggtgtggtttgccaacctgtccatgaaggcctggctgggcggccgcatccgggaccccatcctgctgcagagcctgctgaatgagatgaacaccctgcggacccagtgtggccacctgtatgcctatgactggatcagcatccccctggtgtacacccaggtggtgacagtggccgtgtacagcttcttcctgacctgcctggtgggccggcagttcctgaacccagccaaggcctacccaggccacgagctggacctggtggtgcctgtgttcaccttcctgcagttcttcttctacgtgggctggctgaaggtgtccctgctggccgtggatgagatgcaccaggacctgcccaggatggagccagacatgtactggaacaagccagagccccagcccccctacacagctgccagcgcccagttccggcgggccagcttcatgggcagcaccttcaacatcagcctgaacaaggaggagatggagttccagcccaaccaggaggatgaggaggatgcccacgccggcatcatcggccgcttcctgggcctgcagagccatgaccaccaccccccccgggccaacagcaggaccaagctgctgtggcccaagcgggagagcctgctgcacgagggcctgcccaagaaccacaaggccgccaagcagaatgtgcggggccaggaggacaacaaggcctggaagctgaaggctgtggatgccttcaagagcgcccccctgtaccagaggcctggctactacagcgccccccagacccccctgagccccacccccatgttcttccccctggagcccagcgcccccagcaagctgcacagcgtgacaggcatcgacaccaaggacaagagcctgaagacagtgagcagcggggccaagaagagctttgagctgctgtctgagagtgatggagccctgatggagcaccctgaggtgtcccaggtgcggaggaagacagtggagttcaacctgacagacatgcctgagatccctgagaaccacctgaaggagcccctggagcagagccccaccaacatccacaccaccctgaaggaccacatggacccctactgggccctggagaacagagatgaggcccacagctag

SEQ ID NO: 112626 - DNA, 1497 bp, Artificial Sequence
  derived and/or modified sequence
atgttcgagaagctgaccctgtactgcgacagctacatccagctgatcccgatctcttttgtgcttgggttctacgtcacgctggtggtcacccgctggtggaaccaatatgaaaatttgccctggccggacaggttgatgtcacttgtaagtggattcgtcgaaggcaaagacgagcagggtaggctcctgcgccggactctgatccgttatgcgaacctgggcaacgtcctgatcttgaggtccgtgtccacagccgtctataagagattcccttccgcccagcacttggtgcaggctgggtttatgacacccgccgagcacaagcagctcgaaaagctctctctgccgcacaacatgttttgggtgccatgggtatggttcgcgaaccttagtatgaaggcatggctaggggggcgaatccgggacccaatcctgttgcagtcgcttttgaatgagatgaacaccctgcgcacccaatgtggacatctgtatgcgtatgactggatatcaattcctctggtgtatacccaggttgtgactgtagccgtgtattccttcttcctgacttgcttggtgggcaggcagttcctcaatccagctaaagcttatcccggacatgagttggaccttgtggtaccagtgtttacgtttctccagttctttttttacgtgggatggctcaaagtgtcattgttggccgtggatgagatgcatcaggatcttccccgtatggagcctgatatgtattggaataaacctgagccacagccgccttatacagccgcgtctgcacagttcaggcgcgcctcatttatgggaagcacattcaatatttcactcaacaaggaggagatggaattccaaccaaaccaagaggacgaggaggacgcacacgctgggattattggcaggtttctcggcctgcagagtcacgaccatcacccgcccagggccaattcccggacaaagctgctttggcccaagagagaaagtctcctgcatgagggactgccgaaaaatcataaggcagccaaacagaacgtacgcggccaagaggacaataaggcatggaagctcaaagcagtggatgctttcaaaagcgccccgctctaccagcgcccaggctactacagcgcaccacaaacaccattgtcgcccacccctatgttctttcctctagagccaagcgcgccatccaagctgcatagcgtgaccggaatcgacaccaaagataaatctctaaagactgtcagctctggtgccaagaaatctttcgagctgctgtcagagtcagacggggccctcatggagcaccctgaagtctcccaggtgagacggaagacagtggaatttaacctgactgacatgccagaaattcccgagaaccacctgaaagagcccctggagcagtcgcccacaaatattcatacaacccttaaggatcatatggacccctattgggctctggaaaatcgtgacgaggcccattcatag

SEQ ID NO: 112627 - DNA, 1497 bp, Artificial Sequence
  derived and/or modified sequence
atgttcgagaaactgaccctgtactgtgactcatacatacaactcatccctatcagtttcgtcctggggttttacgtcacgctagtggtcacccgctggtggaaccagtacgagaatcttccatggcccgacaggctaatgagcctggtgtcaggctttgtggaaggaaaagatgagcagggtagactgctcaggcggactctcatcagatacgctaacctcggcaacgttctgattttacgcagtgtgtctaccgcagtttataagcggttcccatccgcacagcatcttgttcaggccggatttatgactccagccgagcataagcagctcgaaaaactctccctccctcataatatgttttgggttccatgggtctggttcgctaacttaagcatgaaagcttggctgggcggtaggatcagggaccccatccttctccagtctctactcaatgaaatgaacactctgagaacccaatgcggtcacttatatgcatatgactggatatcaataccgctggtatatacgcaggttgtcacagtggctgtgtactcattcttcctgacttgcctcgttggtaggcagtttctcaaccccgcaaaggcgtatcctgggcatgaactggacctggttgtccccgtcttcaccttccttcaattttttttctacgtcggctggctgaaggtgagcctcctggccgtggatgagatgcatcaggacctgccgcgtatggagcctgacatgtactggaacaaaccagaaccccagccaccatataccgctgcaagcgcccagttccggagggcttcctttatgggttcaacatttaacatctcactgaataaggaggaaatggaatttcaacctaatcaggaggacgaggaggacgcacatgccggaatcatcgggaggttccttggcctccaatcccacgaccaccatccccctagggccaactctcgcaccaagttgctgtggcctaagcgggagtcactacttcacgagggcctacctaagaatcacaaggcggcaaagcagaatgtgaggggtcaggaggacaataaggcttggaaactaaaggctgtggacgcctttaagagtgcgcctctctaccaaagacccggatactacagtgcaccacagacgcccctgtcccccaccccgatgttcttccctctggagccatctgccccatccaaactgcactctgtgacgggcatagataccaaggacaaaagtctgaaaacggtgagtagtggcgcaaaaaaatccttcgagctgctgtccgagtcagacggagcgttaatggaacaccccgaggtgtcacaagttcgaaggaaaacagtggagttcaacttgacagatatgcccgagatcccagaaaaccatttaaaggagccgctggagcagagtccaacgaatattcacactacactgaaggaccatatggacccctattgggcactggagaatagagatgaggcccactcatag

SEQ ID NO: 112628 - DNA, 1497 bp, Artificial Sequence
  derived and/or modified sequence
atgttcgagaagctgaccctgtactgcgacagctacatccagctgatccccatcagcttcgtgctgggcttctacgtgaccctggtggtgaccagatggtggaaccagtacgagaacctgccctggcccgacagactgatgagcctggtgagcggcttcgtggagggcaaggacgagcagggcagactgctgagaagaaccctgatcagatacgccaacctgggcaacgtgctgatcctgagaagcgtgagcaccgccgtgtacaagagattccccagcgcccagcacctggtgcaggccggcttcatgacccccgccgagcacaagcagctggagaagctgagcctgccccacaacatgttctgggtgccctgggtgtggttcgccaacctgagcatgaaggcctggctgggcggcagaatcagagaccccatcctgctgcagagcctgctgaacgagatgaacaccctgagaacccagtgcggccacctgtacgcctacgactggatcagcatccccctggtgtacacccaggtggtgaccgtggccgtgtacagcttcttcctgacctgcctggtgggcagacagttcctgaaccccgccaaggcctaccccggccacgagctggacctggtggtgcccgtgttcaccttcctgcagttcttcttctacgtgggctggctgaaggtgagcctgctggccgtggacgagatgcaccaggacctgcccagaatggagcccgacatgtactggaacaagcccgagccccagcccccctacaccgccgccagcgcccagttcagaagagccagcttcatgggcagcaccttcaacatcagcctgaacaaggaggagatggagttccagcccaaccaggaggacgaggaggacgcccacgccggcatcatcggcagattcctgggcctgcagagccacgaccaccacccccccagagccaacagcagaaccaagctgctgtggcccaagagagagagcctgctgcacgagggcctgcccaagaaccacaaggccgccaagcagaacgtgagaggccaggaggacaacaaggcctggaagctgaaggccgtggacgccttcaagagcgcccccctgtaccagagacccggctactacagcgccccccagacccccctgagccccacccccatgttcttccccctggagcccagcgcccccagcaagctgcacagcgtgaccggcatcgacaccaaggacaagagcctgaagaccgtgagcagcggcgccaagaagagcttcgagctgctgagcgagagcgacggcgccctgatggagcaccccgaggtgagccaggtgagaagaaagaccgtggagttcaacctgaccgacatgcccgagatccccgagaaccacctgaaggagcccctggagcagagccccaccaacatccacaccaccctgaaggaccacatggacccctactgggccctggagaacagagacgaggcccacagctag

SEQ ID NO: 112629 - protein, 660 aa, Artificial Sequence
  derived and/or modified sequence
MLLCRAHRVLGLRGARELAVTMAMRELVEAECGGANPLMKLAGHFTQDKALRQEGLRPGPWPPGAPASEAASKPLGVASEDELVAEFLQDQNAPLVSRAPQTFKMDDLLAEMQQIEQSNFRQAPQRAPGVADLALSENWAQEFLAAGDAVDVTQDYNETDWSQEFISEVTDPLSVSPARWAEEYLEQSEEKLWLGEPEGTATDRWYDEYHPEEDLQHTASDFVAKVDDPKLANSEFLKFVRQIGEGQVSLESGAGSGRAQAEQWAAEFIQQQGTSDAWVDQFTRPVNTSALDMEFERAKSAIESDVDFWDKLQAELEEMAKRDAEAHPWLSDYDDLTSATYDKGYQFEEENPLRDHPQPFEEGLRRLQEGDLPNAVLLFEAAVQQDPKHMEAWQYLGTTQAENEQELLAISALRRCLELKPDNQTALMALAVSFTNESLQRQACETLRDWLRYTPAYAHLVTPAEEGAGGAGLGPSKRILGSLLSDSLFLEVKELFLAAVRLDPTSIDPDVQCGLGVLFNLSGEYDKAVDCFTAALSVRPNDYLLWNKLGATLANGNQSEEAVAAYRRALELQPGYIRSRYNLGISCINLGAHREAVEHFLEALNMQRKSRGPRGEGGAMSENIWSTLRLALSMLGQSDAYGAADARDLSTLLTMFGLPQ

SEQ ID NO: 112630 - protein, 639 aa, Artificial Sequence
  derived and/or modified sequence
MAMRELVEAECGGANPLMKLAGHFTQDKALRQEGLRPGPWPPGAPASEAASKPLGVASEDELVAEFLQDQNAPLVSRAPQTFKMDDLLAEMQQIEQSNFRQAPQRAPGVADLALSENWAQEFLAAGDAVDVTQDYNETDWSQEFISEVTDPLSVSPARWAEEYLEQSEEKLWLGEPEGTATDRWYDEYHPEEDLQHTASDFVAKVDDPKLANSEFLKFVRQIGEGQVSLESGAGSGRAQAEQWAAEFIQQQGTSDAWVDQFTRPVNTSALDMEFERAKSAIESDVDFWDKLQAELEEMAKRDAEAHPWLSDYDDLTSATYDKGYQFEEENPLRDHPQPFEEGLRRLQEGDLPNAVLLFEAAVQQDPKHMEAWQYLGTTQAENEQELLAISALRRCLELKPDNQTALMALAVSFTNESLQRQACETLRDWLRYTPAYAHLVTPAEEGAGGAGLGPSKRILGSLLSDSLFLEVKELFLAAVRLDPTSIDPDVQCGLGVLFNLSGEYDKAVDCFTAALSVRPNDYLLWNKLGATLANGNQSEEAVAAYRRALELQPGYIRSRYNLGISCINLGAHREAVEHFLEALNMQRKSRGPRGEGGAMSENIWSTLRLALSMLGQSDAYGAADARDLSTLLTMFGLPQ

SEQ ID NO: 112631 - DNA, 1983 bp, Artificial Sequence
  derived and/or modified sequence
atgctgctatgcagggcacatagggtgctcggactgcgcggggctcgtgagcttgcagtgacgatggctatgcgggagctggtggaagctgagtgtgggggtgccaatccactgatgaagctggctggacatttcacccaggacaaggctctccggcaggaaggccttaggccgggaccatggcctcccggcgccccagctagtgaagctgcctctaagcctctgggtgtcgcatctgaagatgagctggttgcagagttcctgcaggaccagaatgcgcccttggtctctagggcaccccagacgtttaaaatggacgatctgttggcagagatgcaacagatcgaacagagcaactttcggcaggcaccccagcgtgcgcccggcgtagcggatctggccctgtcagagaattgggcacaggaatttctggcagcaggcgatgccgttgacgtgacgcaagactacaatgagactgattggtcccaagagttcattagcgaggtaacagacccgctttccgtctcgcccgcacgatgggctgaggaatatttagaacagtccgaagagaagttgtggttaggagaacctgagggtaccgctacagacaggtggtacgatgagtatcacccggaggaggacctacagcatacagcatctgacttcgtcgccaaggtagacgacccaaagttagccaacagcgaatttttgaaattcgttagacagattggcgaaggccaagtgtccctagagagcggggccgggagcggcagggctcaagccgagcagtgggcggctgagttcatccagcagcagggaacgtccgacgcgtgggtggaccaatttacacgacctgtgaacacttctgctctcgacatggaatttgaacgggcaaagagcgctatcgaatctgacgtggatttctgggacaagctgcaggcagaacttgaggaaatggctaaaagggacgccgaggcacacccctggctcagcgattacgatgacttaacttccgccacctacgacaaagggtaccaattcgaagaggaaaatcctctgcgtgaccaccctcagccttttgaagaggggctgcgacgcttacaagagggcgacctaccgaacgccgtcctgctgtttgaggccgcagtgcaacaggacccgaaacacatggaggcatggcagtatcttggaacaacccaggctgagaacgaacaagaattgctggctatctcagcccttaggcgatgtttggagctcaaacctgacaatcagacagccttgatggccctggcagtctcattcaccaacgagagtttgcaacgtcaggcgtgcgaaactctaagggattggctccggtatactccagcatacgctcaccttgtaacccccgctgaagaaggcgcagggggcgcaggtctaggacccagtaaaaggatccttgggagtctgctgagtgatagtttgttcttggaggtaaaggaactgttcctggctgccgtacgcttggatccgacatcaatagaccccgacgtgcagtgtggtcttggcgtgttatttaacctgagcggggagtacgataaggccgttgactgcttcaccgccgctctaagcgtcagacccaatgactacctgctgtggaataagctgggcgccaccctggcaaatggtaatcagtctgaggaggcagtggccgcgtatcggcgggcccttgaactgcaacctggctacatcagaagccgctacaacctcggaattagttgtatcaacctgggcgcccaccgggaagccgtcgagcacttcctcgaggcgttaaacatgcagaggaagtccagggggcctcgaggcgagggaggggccatgagcgagaacatatggagcactctgcggctcgctctaagtatgctcgggcagtctgatgcatacggcgctgccgacgctagggatctgtctactctactcaccatgtttggtctaccacaatag

SEQ ID NO: 112632 - DNA, 1983 bp, Artificial Sequence
  derived and/or modified sequence
atgctgctgtgccgggcccaccgggtgctgggcctgcggggggcccgggagctggccgtgaccatggccatgagggagctggtggaggctgaatgtggcggggccaaccccctgatgaagctggccggccacttcacccaggacaaggccctgcggcaggagggcctgcggcccggcccctggcccccaggggccccagccagcgaggccgccagcaagcccctgggcgtggcctctgaagatgagctggtggccgagttcctgcaggaccagaatgcccccctggtgtcccgggccccccagaccttcaagatggatgacctgctggccgagatgcagcagatcgagcagagcaacttccggcaggccccccagagggcccctggggtggccgacctggccctgtctgagaactgggcccaggagttcctggccgctggagatgctgtggatgtgacccaggactacaatgaaacagactggagccaggagttcatcagcgaggtgacagaccccctgtctgtgtccccagcccgctgggccgaggagtacctggagcagagcgaggagaagctgtggctgggggagcctgagggcacagccacagaccgctggtatgatgagtaccaccctgaggaggacctgcagcacacagccagtgactttgtggccaaggtggatgaccccaagctggccaacagcgagttcctgaagtttgtgcggcagattggagagggccaggtgtccctggagagcggggccggcagcggccgggcccaggccgagcagtgggccgctgagttcatccagcagcagggcaccagtgatgcctgggtggaccagttcaccaggcctgtgaacaccagcgccctggacatggagtttgagcgggccaagagcgccatcgagagtgatgtggacttctgggacaagctgcaggccgagctggaggagatggccaagagagatgctgaggcccacccctggctgagtgactatgatgacctgaccagcgccacctatgacaagggctaccagtttgaggaggagaaccccctgcgggaccacccccagccctttgaggagggcctgcggcggctgcaggagggggacctgcccaatgctgtgctgctgtttgaagctgctgtgcagcaggaccccaagcacatggaggcctggcagtacctgggcaccacccaggccgagaatgagcaggagctgctggccatcagcgccctgcggcgctgcctggagctgaagccagacaaccagacagccctgatggccctggccgtgtccttcaccaatgaaagcctgcagaggcaggcctgtgagaccctgcgggactggctgcgctacaccccagcctatgcccacctggtgaccccagctgaggagggcgctgggggcgccggcctgggccccagcaagaggatcctgggcagcctgctgagtgacagcctcttcctggaggtgaaggagctgttcctggccgctgtgcggctggaccccaccagcattgatcctgatgtgcagtgtggcctgggcgtgctcttcaacctgagcggggagtatgacaaggctgtggactgcttcaccgctgccctgtctgtgcggcccaatgactacctgctgtggaacaagctgggcgccaccctggccaatggaaaccagagcgaggaggccgtggccgcctacagaagagccctggagctgcagcccggctacatccgcagccgctacaacctgggcatcagctgcatcaacctgggcgcccaccgggaggccgtggagcacttcctggaggccctgaacatgcagaggaagagccggggccccagaggagagggcggggccatgtctgagaacatctggagcaccctgcggctggccctgtccatgctgggccagagtgatgcctatggagctgctgatgcccgggacctgagcaccctgctgaccatgtttggcctgccccagtag

SEQ ID NO: 112633 - DNA, 1983 bp, Artificial Sequence
  derived and/or modified sequence
atgctgctgtgccgggcccaccgggtgctgggcctgcggggcgcccgagagctagcagtgaccatggcaatgagagaacttgttgaagccgagtgcggaggagcaaaccccttgatgaaattggctggacattttacccaggataaagcacttcgccaggagggtcttcgccccgggccatggcccccgggtgccccagcgtcagaagccgccagcaaacctctgggcgttgcttccgaagatgaactggttgccgagtttctgcaggatcagaacgcccctctcgtgtccagggccccgcagacgtttaagatggacgacttgctggccgagatgcagcagatcgaacagtcaaacttccggcaggccccccagcgtgccccaggcgttgccgatctggccttgtccgagaactgggctcaggagttcctggccgctggcgatgccgtagacgtgacgcaagattacaatgagacggactggtcccaggaatttatctctgaagtcaccgaccccctgagtgtgtctcctgcccgatgggccgaagaatacctcgaacagtcagaggaaaagttgtggctgggcgaaccggaggggactgcaactgatcgttggtacgatgagtatcacccggaggaggatctgcagcacacagcctccgattttgtggccaaagtggacgatccgaagctggccaattctgaatttcttaaatttgtgaggcagattggggagggccaggtgtccctggagtctggtgctggctcaggaagggctcaggcggagcaatgggccgctgagtttatccagcagcaaggcacaagtgacgcatgggttgatcagtttacgcggccagtcaacacgtctgccctggatatggagttcgaacgggcaaagtccgccatagagtcagacgtggatttctgggataagctccaggcagagctcgaggagatggctaagcgcgacgcagaggctcatccgtggctttccgactacgatgacttgacctcagcgacttatgacaagggataccagttcgaagaagaaaatccacttagggaccacccccagcccttcgaggaggggttacgtcgattgcaggaaggagatctgcccaacgctgttttgcttttcgaggccgctgtgcagcaggatccaaaacacatggaagcctggcagtatctcggcactacacaggctgaaaacgagcaggaattactggccatttctgcacttaggagatgcctcgaactcaaacccgataatcagacagccttaatggccctggctgttagttttacaaacgaatcccttcagcgccaggcctgcgaaacattacgggattggttgcgctatacgccggcatacgcacacctggtcaccccagcagaagagggcgctggcggcgctggcctcggtccatccaaacgcattctgggaagccttctctcggactcgctcttcctagaggtcaaagagctgtttctcgctgccgtccgactggaccccacgtcaatcgatccagatgtgcagtgtggtctgggggtgttgttcaacctgagcggcgaatacgataaagcggtggactgtttcacggcagcactctctgtccgcccaaatgactacctgctctggaataagctaggcgcaaccttggcgaacggaaatcagagcgaagaggctgtggcggcctaccgaagggccctggagctccagcctggatacatccggagccgatacaacctcggcatttcttgtattaatttaggtgcccaccgtgaggccgtcgaacattttctagaagcactcaacatgcagagaaagtccaggggccctcgtggtgaggggggcgccatgagcgagaatatttggtctaccttgaggcttgccctcagcatgctgggtcagagcgatgcatatggcgctgcggatgcacgggacctgtccacgctgctgaccatgtttggcttaccccaatag

SEQ ID NO: 112634 - DNA, 3170 bp, Artificial Sequence
  derived and/or modified sequence
gagagctggcggtcaccatggcaatgcgggagctggtggaggccgaatgcgggggtgccaacccgctcatgaagctcgccgggcacttcacccaggacaaggcccttcggcaggagggattgaggcctggcccctggccccccggagccccggcctctgaggcagcctccaagcctttgggagtagcttctgaagatgagttggtggctgaattcctgcaggaccagaatgcaccccttgtgtcccgtgcccctcagaccttcaagatggatgacctcctggctgagatgcagcagattgagcagtcaaacttccgccaggctccccagagagcccctggtgtggcagacttggccttgtctgagaactgggcccaggagtttcttgcagctggagatgctgtggatgtaactcaggattataatgagactgactggtcccaagaattcatctctgaagttacagaccccttgtctgtgtcccctgcccgctgggctgaggaatatttggagcaatcagaggagaagctgtggctgggagaacctgagggaacagccaccgatcgctggtatgatgaatatcatcctgaggaggatctgcagcacacggccagtgactttgtggccaaagtggatgaccccaaattggctaattctgagttcctgaaattcgtgcggcagattggcgaagggcaggtgtccctggagtccggtgcagggtcgggccgagctcaggcagaacagtgggcagcagagtttatacagcagcagggtacatcagatgcctgggttgaccagttcacaagaccagtaaacacatctgcccttgatatggagtttgaacgagccaagtcagctatagagttgcaggcagagttggaggagatggcaaaacgggatgctgaggcccacccctggctttctgactatgatgaccttacgtcagctacctatgataaggggtaccagtttgaggaggagaaccccttgcgtgatcaccctcagccttttgaagaagggctgcggcgccttcaggagggggacctgccaaatgctgtgctgctttttgaggcagctgtgcagcaggatcctaagcacatggaagcttggcagtatctgggtaccacccaggcagagaatgaacaagaactattagccatcagtgcattgcggaggtgtctggagctaaagccagataaccagacagcactgatggcgctggctgtgagcttcaccaacgagtccctgcagcgacaggcctgtgaaaccctacgagactggctgcggtacacaccagcctatgcccatctggtgacacctgctgaagaaggggctggtggggcaggactgggccccagcaagcgtatcctgggatctctcttgtctgactccctgtttcttgaagtgaaagagctcttcctggcagctgtgcggctggaccctacctccattgaccctgatgtgcagtgtggcttgggagtccttttcaacctgagtggggagtatgacaaggccgtggactgcttcacagctgccctcagcgttcgtcccaatgactatttgctgtggaataagctaggcgccaccctggccaatggaaaccagagtgaagaagcagtagctgcgtaccgccgggccctcgagctccagcctggctatatccggtcccgctataacctgggcatcagctgcatcaacctcggggctcaccgggaggctgtggagcactttctggaggccctgaacatgcagaggaaaagccggggcccccggggtgaaggaggtgccatgtcggagaacatctggagcaccctgcgtttggcattgtctatgttaggccagagcgatgcctatggggcagccgacgcgcgggatctgtccaccctcctaactatgtttggcctgccccagtgacagtgggacgggctgccctgtgagtgtccacctggagggatccccgctttggatgtgattccctctccccaaatgggcctaccaagggggcgggctgatgaccataagcggtacggcctttcaggagctgcctcaacgtaggggtgggtagtctgtgttctagttcctacataattgtaggaaaatgagctgtgtcatctctgagtcccttggtaattcaagggctgtacatccagctacagatctctctgctcatcatgccctttcttggtgctgctttttgggtaggaccccacgatttagggtaactgttatcatcagctgccatttctgatagggtctaccacatctgtaatgtctgtcctttcccccacttttactgggaattgatagtccagcttccttgggcagtgtaagtaggaggttcatctgctgtgcgcctctaatgtctgtctggatgggatgtgttaggagttggcctgttgggttgaattgttgatttggctgagcagagctgagttttggtaggagtgctcatggttctgtcattcttggacctctcctggctgagctctgattccctgtgagcacgatgctgatgcaatagtcctgtgtcatcactgcagcggtcctcaggagctgccagggccaattgctacagagtgtctgggtgtgtggcataggaggaaggtttgcttgtgaaatgaggctgggtgggagcggggagggactagatcagaagagatcaagggctctattcaggaacgttggtgggaggacagagcaagtgggaagggggtatggtgagtgcggcaatccctcatcctcttagaagcacctgtgaatgggaattgagccaactgttatagaaaattggttcagaaagtgcaatcttgccagatttctagcaaataggttcagtgttaccataagcctttgctgtacttcttgaaatgtttctaggggagagcattggaaaatccccttcccccatctagatcgaaggaagatgagggagcagcttggattcttctcagttgtcccctgcatggggagatacactaacccccagaaatgactgctaagcctcttgccttgtctttagtagctaatgatcagagagattttttttttaaactaccatggtcccaggattccatcctgaaatttatttttctttgtatgaatatgtgtaaatgatttaaaaataaaactgtaaaatatttgtacgaagaataaatggaactgatgtgggta

SEQ ID NO: 112635 - DNA, 2105 bp, Artificial Sequence
  derived and/or modified sequence
ggcagcagggccggggagatgggcggtggggagcgcgggagggaccgggccgagccgggggaagggctccggtgacttaaggggagggaatgctcctctgccgtgctcaccgcgtgctggggctgcgcggggctagagagctggcggtcaccatggcaatgcgggagctggtggaggccgaatgcgggggtgccaacccgctcatgaagctcgccgggcacttcacccaggacaaggcccttcggcaggagggattgaggcctggcccctggccccccggagccccggcctctgaggcagcctccaagcctttgggagtagcttctgaagatgagttggtggctgaattcctgcaggaccagaatgcaccccttgtgtcccgtgcccctcagaccttcaagatggatgacctcctggctgagatgcagcagattgagcagtcaaacttccgccaggctccccagagagcccctggtgtggcagacttggccttgtctgagaactgggcccaggagtttcttgcagctggagatgctgtggatgtaactcaggattataatgagactgactggtcccaagaattcatctctgaagttacagaccccttgtctgtgtcccctgcccgctgggctgaggaatatttggagcaatcagaggagaagctgtggctgggagaacctgagggaacagccaccgatcgctggtatgatgaatatcatcctgaggaggatctgcagcacacggccagtgactttgtggccaaagtggatgaccccaaattggctaattctgagttcctgaaattcgtgcggcagattggcgaagggcaggtgtccctggagtccggtgcagggtcgggccgagctcaggcagaacagtgggcagcagagtttatacagcagcagggtacatcagatgcctgggttgaccagttcacaagaccagtaaacacatctgcccttgatatggagtttgaacgagccaagtcagctatagagtctgatgtcgatttctgggacaagttgcaggcagagttggaggagatggcaaaacgggatgctgaggcccacccctggctttctgactatgatgaccttacgtcagctacctatgataaggggtaccagtttgaggaggagaaccccttgcgtgatcaccctcagccttttgaagaagggctgcggcgccttcaggagggggacctgccaaatgctgtgctgctttttgaggcagctgtgcagcaggatcctaagcacatggaagcttggcagtatctgggtaccacccaggcagagaatgaacaagaactattagccatcagtgcattgcggaggtgtctggagctaaagccagataaccagacagcactgatggcgctggctgtgagcttcaccaacgagtccctgcagcgacaggcctgtgaaaccctacgagactggctgcggtacacaccagcctatgcccatctggtgacacctgctgaagaaggggctggtggggcaggactgggccccagcaagcgtatcctgggatctctcttgtctgactccctgtttcttgaagtgaaagagctcttcctggcagctgtgcggctggaccctacctccattgaccctgatgtgcagtgtggcttgggagtccttttcaacctgagtggggagtatgacaaggccgtggactgcttcacagctgccctcagcgttcgtcccaatgactatttgctgtggaataagctaggcgccaccctggccaatggaaaccagagtgaagaagcagtagctgcgtaccgccgggccctcgagctccagcctggctatatccggtcccgctataacctgggcatcagctgcatcaacctcggggctcaccgggaggctgtggagcactttctggaggccctgaacatgcagaggaaaagccggggcccccggggtgaaggaggtgccatgtcggagaacatctggagcaccctgcgtttggcattgtctatgttaggccagagcgatgcctatggggcagccgacgcgcgggatctgtccaccctcctaactatgtttggcctgccccagtgacagtgggacgggctgccctgtgagtgtccacct

SEQ ID NO: 112636 - DNA, 2477 bp, Artificial Sequence
  derived and/or modified sequence
ggtgccccggcgggtcgtgcggcgcggcgctccgcggtgagcgcctgaccccgagggggcccggggccgcgtccctgggccctccccacccttgcggtggcctcgcgggtcccaggggcggggctggagcggcagcagggccggggagatgggcggtggggagcgcgggagggaccgggccgagccgggggaagggctccggtgacttaaggggagggaatgctcctctgccgtgctcaccgcgtgctggggctgcgcggggctaggtatggtcgggctgttttcccactgtcccttcttcgggcagtgtcgccgtccagcctggttgttgaagcgtccccgtggtcccccggggtccaggcccctttgtggaggcagctgctggcccccagcccatgggaccgtagtcgcggaggcctctgcagaggcgcaggctggaagcggtggcctttgaggggggcggcaggagagagtaccgacctccctcgaactcctggcagagagagctggcggtcaccatggcaatgcgggagctggtggaggccgaatgcgggggtgccaacccgctcatgaagctcgccgggcacttcacccaggacaaggcccttcggcaggagggattgaggcctggcccctggccccccggagccccggcctctgaggcagcctccaagcctttgggagtagcttctgaagatgagttggtggctgaattcctgcaggaccagaatgcaccccttgtgtcccgtgcccctcagaccttcaagatggatgacctcctggctgagatgcagcagattgagcagtcaaacttccgccaggctccccagagagcccctggtgtggcagacttggccttgtctgagaactgggcccaggagtttcttgcagctggagatgctgtggatgtaactcaggattataatgagactgactggtcccaagaattcatctctgaagttacagaccccttgtctgtgtcccctgcccgctgggctgaggaatatttggagcaatcagaggagaagctgtggctgggagaacctgagggaacagccaccgatcgctggtatgatgaatatcatcctgaggaggatctgcagcacacggccagtgactttgtggccaaagtggatgaccccaaattggctaattctgagttcctgaaattcgtgcggcagattggcgaagggcaggtgtccctggagtccggtgcagggtcgggccgagctcaggcagaacagtgggcagcagagtttatacagcagcagggtacatcagatgcctgggttgaccagttcacaagaccagtaaacacatctgcccttgatatggagtttgaacgagccaagtcagctatagagtctgatgtcgatttctgggacaagttgcaggcagagttggaggagatggcaaaacgggatgctgaggcccacccctggctttctgactatgatgaccttacgtcagctacctatgataaggggtaccagtttgaggaggagaaccccttgcgtgatcaccctcagccttttgaagaagggctgcggcgccttcaggagggggacctgccaaatgctgtgctgctttttgaggcagctgtgcagcaggatcctaagcacatggaagcttggcagtatctgggtaccacccaggcagagaatgaacaagaactattagccatcagtgcattgcggaggtgtctggagctaaagccagataaccagacagcactgatggcgctggctgtgagcttcaccaacgagtccctgcagcgacaggcctgtgaaaccctacgagactggctgcggtacacaccagcctatgcccatctggtgacacctgctgaagaaggggctggtggggcaggactgggccccagcaagcgtatcctgggatctctcttgtctgactccctgtttcttgaagtgaaagagctcttcctggcagctgtgcggctggaccctacctccattgaccctgatgtgcagtgtggcttgggagtccttttcaacctgagtggggagtatgacaaggccgtggactgcttcacagctgccctcagcgttcgtcccaatgactatttgctgtggaataagctaggcgccaccctggccaatggaaaccagagtgaagaagcagtagctgcgtaccgccgggccctcgagctccagcctggctatatccggtcccgctataacctgggcatcagctgcatcaacctcggggctcaccgggaggctgtggagcactttctggaggccctgaacatgcagaggaaaagccggggcccccggggtgaaggaggtgccatgtcggagaacatctggagcaccctgcgtttggcattgtctatgttaggccagagcgatgcctatggggcagccgacgcgcgggatctgtccaccctcctaactatgtttggcctgccccagtgacagtgggacgggctgccctgtgagtgtccacctggaggg

SEQ ID NO: 112637 - DNA, 2689 bp, Artificial Sequence
  derived and/or modified sequence
gacgctaccccgctaggggttatttggaagcggggcaggcctaggaggctgaagaaggcttcggactggactccccagcccctggtgttagggcttttctctttcttgggcttgggaacattagccagccccattttagaggggaaaactgaggctcagaaagggcactgaatccccttaggtcacaatgcgcccaagggaagaggcaggatcgactgagcctaggatctcgcgtcttcggctttcccccagagcctgggaagcccttcttagctccactcttctttgagctttccgtcaaacaaatcctagggcccgtggccttttcgagcgctcctaaaggcgactctccaagacccgctctctaagtgtcgccgtccagcctggttgttgaagcgtccccgtggtcccccggggtccaggcccctttgtggaggcagctgctggcccccagcccatgggaccgtagtcgcggaggcctctgcagaggcgcaggctggaagcggtggcctttgaggggggcggcaggagagagtaccgacctccctcgaactcctggcagagagagctggcggtcaccatggcaatgcgggagctggtggaggccgaatgcgggggtgccaacccgctcatgaagctcgccgggcacttcacccaggacaaggcccttcggcaggagggattgaggcctggcccctggccccccggagccccggcctctgaggcagcctccaagcctttgggagtagcttctgaagatgagttggtggctgaattcctgcaggaccagaatgcaccccttgtgtcccgtgcccctcagaccttcaagatggatgacctcctggctgagatgcagcagattgagcagtcaaacttccgccaggctccccagagagcccctggtgtggcagacttggccttgtctgagaactgggcccaggagtttcttgcagctggagatgctgtggatgtaactcaggattataatgagactgactggtcccaagaattcatctctgaagttacagaccccttgtctgtgtcccctgcccgctgggctgaggaatatttggagcaatcagaggagaagctgtggctgggagaacctgagggaacagccaccgatcgctggtatgatgaatatcatcctgaggaggatctgcagcacacggccagtgactttgtggccaaagtggatgaccccaaattggctaattctgagttcctgaaattcgtgcggcagattggcgaagggcaggtgtccctggagtccggtgcagggtcgggccgagctcaggcagaacagtgggcagcagagtttatacagcagcagggtacatcagatgcctgggttgaccagttcacaagaccagtaaacacatctgcccttgatatggagtttgaacgagccaagtcagctatagagtctgatgtcgatttctgggacaagttgcaggcagagttggaggagatggcaaaacgggatgctgaggcccacccctggctttctgactatgatgaccttacgtcagctacctatgataaggggtaccagtttgaggaggagaaccccttgcgtgatcaccctcagccttttgaagaagggctgcggcgccttcaggagggggacctgccaaatgctgtgctgctttttgaggcagctgtgcagcaggatcctaagcacatggaagcttggcagtatctgggtaccacccaggcagagaatgaacaagaactattagccatcagtgcattgcggaggtgtctggagctaaagccagataaccagacagcactgatggcgctggctgtgagcttcaccaacgagtccctgcagcgacaggcctgtgaaaccctacgagactggctgcggtacacaccagcctatgcccatctggtgacacctgctgaagaaggggctggtggggcaggactgggccccagcaagcgtatcctgggatctctcttgtctgactccctgtttcttgaagtgaaagagctcttcctggcagctgtgcggctggaccctacctccattgaccctgatgtgcagtgtggcttgggagtccttttcaacctgagtggggagtatgacaaggccgtggactgcttcacagctgccctcagcgttcgtcccaatgactatttgctgtggaataagctaggcgccaccctggccaatggaaaccagagtgaagaagcagtagctgcgtaccgccgggccctcgagctccagcctggctatatccggtcccgctataacctgggcatcagctgcatcaacctcggggctcaccgggaggctgtggagcactttctggaggccctgaacatgcagaggaaaagccggggcccccggggtgaaggaggtgccatgtcggagaacatctggagcaccctgcgtttggcattgtctatgttaggccagagcgatgcctatggggcagccgacgcgcgggatctgtccaccctcctaactatgtttggcctgccccagtgacagtgggacgggctgccctaaatatacagcctctgcagacactgcttctgaatgaacgggctggagtttccttgggatcctgaactcatattggattctctacctaccatcttggacaattcatgtaggaaaacaaatcctcatttgttcaaacaatagatgaaaattattaaagttttgacacatatt

SEQ ID NO: 112638 - DNA, 848 bp, Artificial Sequence
  derived and/or modified sequence
attattgcccttggtcatttaccggcagccctgggcccctccttgctcttctccatgacactaggactcccttggtcttgaagctggagagctggcggtcaccatggcaatgcgggagctggtggaggccgaatgcgggggtgccaacccgctcatgaagctcgccgggcacttcacccaggacaaggcccttcggcaggagggattgaggcctggcccctggccccccggagccccggcctctgaggcagcctccaagcctttgggagtagcttctgaagatgagttggtggctgaattcctgcaggaccagaatgcaccccttgtgtcccgtgcccctcagaccttcaagatggatgacctcctggctgagatgcagcagattgagcagtcaaacttccgccaggctccccagagagcccctggtgtggcagacttggccttgtctgagaactgggcccaggagtttcttgcagctggagatgctgtggatgtaactcaggattataatgagactgactggtcccaagaattcatctctgaagttacagaccccttgtctgtgtcccctgcccgctgggctgaggaatatttggagcaatcagaggagaagctgtggctgggagaacctgagggaacagccaccgatcgctggtatgatgaatatcatcctgaggaggatctgcagcacacggccagtgactttgtggccaaagtggatgaccccaaattggctaattctgagttcctgaaattcgtgcggcagattggcgaagggcaggtgtccctggagtccggtgcagggtcgggccgagctcaggcagaacagtgggcagcagagtttatac

SEQ ID NO: 112639 - DNA, 1983 bp, Artificial Sequence
  derived and/or modified sequence
atgctactgtgcagagctcatcgagtgcttggcctcagaggcgctcgagagttggccgtgaccatggctatgagggagctggtggaggctgagtgcggcggagccaaccccctgatgaagctggcaggccacttcactcaagacaaggcgctgcggcaagaaggccttagacccggaccatggccgccaggcgcaccagcctccgaggcagcttcaaaacctttaggcgtagccagtgaagatgagttggttgccgaattcctccaggatcaaaacgcacccctcgtgagcagggcccctcagaccttcaaaatggacgatcttctcgcagagatgcagcagattgagcagtctaattttcggcaggccccacagagggctccgggagtggctgatctcgcgttaagcgagaactgggcacaagaatttctcgccgctggcgatgccgtggacgtgactcaggattacaatgagactgattggagtcaggagtttatctccgaggttaccgaccccctatccgtctctccagcgaggtgggctgaggagtacctagaacagagcgaggaaaaactgtggttgggagagcccgaagggacagctactgatcggtggtatgatgaataccatccagaagaagatctgcagcatactgcctctgactttgtggcgaaggtggacgatcccaaactggctaacagtgaattccttaaatttgtgagacagattggagaagggcaagtgagtctggaaagcggagcagggtctggcagagcacaagcagagcagtgggccgctgagtttattcaacaacaaggtacgtcagacgcgtgggtcgaccagtttacccgcccagtgaataccagcgccctggacatggagtttgaacgcgctaagtcagccattgagtccgacgtggatttctgggacaagctgcaggctgagctagaagagatggccaagagagatgccgaggcacacccatggctcagcgactacgacgacctaacaagcgccacctatgataaggggtatcagtttgaagaagagaatcctctgcgtgaccatccacagccatttgaagagggcctccggcgactgcaagaaggcgacctccctaatgcggtgctgctgttcgaggcagccgtgcagcaggatcctaagcacatggaagcatggcagtacctcggaactacccaggcagaaaacgagcaggaattattggccataagcgccctgcgaaggtgcctggagttaaaacccgataatcagacagccctgatggccctcgctgtgagcttcacaaatgagagtttacaacgacaggcatgcgagaccctgagggattggttgcgctatactcctgcttatgctcacttagtcacccctgcagaagagggtgccggaggggctgggttgggcccttctaagcggattttgggctctctgctctcggactctctcttcctcgaggtcaaagagctttttctggccgctgtgcgactcgaccccacatcaatcgatcccgatgtacaatgtggacttggggtgttatttaatttgtcgggagagtacgataaagcagttgattgcttcacagccgctctcagtgtccggcctaacgactatttactctggaacaagttgggcgcaacattggccaacggcaaccaaagcgaagaagcggtagccgcataccgaagggctttggagctgcagccagggtacatccgttcccgatacaatcttggtatttcttgtatcaatctgggggctcacagagaagctgttgaacactttttagaggcactgaacatgcagcgcaagagccgaggacctcgcggtgagggaggagctatgagtgagaatatctggtccacactccggttggctctttcgatgctcgggcagagcgacgcctatggcgctgcggatgcacgcgatctctctacactactgacgatgttcggtctgccacaatag

SEQ ID NO: 112640 - DNA, 1983 bp, Artificial Sequence
  derived and/or modified sequence
atgctgctgtgcagagcccacagagtgctgggcctgagaggcgccagagagctggccgtgaccatggccatgagagagctggtggaggccgagtgcggcggcgccaaccccctgatgaagctggccggccacttcacccaggacaaggccctgagacaggagggcctgagacccggcccctggccccccggcgcccccgccagcgaggccgccagcaagcccctgggcgtggccagcgaggacgagctggtggccgagttcctgcaggaccagaacgcccccctggtgagcagagccccccagaccttcaagatggacgacctgctggccgagatgcagcagatcgagcagagcaacttcagacaggccccccagagagcccccggcgtggccgacctggccctgagcgagaactgggcccaggagttcctggccgccggcgacgccgtggacgtgacccaggactacaacgagaccgactggagccaggagttcatcagcgaggtgaccgaccccctgagcgtgagccccgccagatgggccgaggagtacctggagcagagcgaggagaagctgtggctgggcgagcccgagggcaccgccaccgacagatggtacgacgagtaccaccccgaggaggacctgcagcacaccgccagcgacttcgtggccaaggtggacgaccccaagctggccaacagcgagttcctgaagttcgtgagacagatcggcgagggccaggtgagcctggagagcggcgccggcagcggcagagcccaggccgagcagtgggccgccgagttcatccagcagcagggcaccagcgacgcctgggtggaccagttcaccagacccgtgaacaccagcgccctggacatggagttcgagagagccaagagcgccatcgagagcgacgtggacttctgggacaagctgcaggccgagctggaggagatggccaagagagacgccgaggcccacccctggctgagcgactacgacgacctgaccagcgccacctacgacaagggctaccagttcgaggaggagaaccccctgagagaccacccccagcccttcgaggagggcctgagaagactgcaggagggcgacctgcccaacgccgtgctgctgttcgaggccgccgtgcagcaggaccccaagcacatggaggcctggcagtacctgggcaccacccaggccgagaacgagcaggagctgctggccatcagcgccctgagaagatgcctggagctgaagcccgacaaccagaccgccctgatggccctggccgtgagcttcaccaacgagagcctgcagagacaggcctgcgagaccctgagagactggctgagatacacccccgcctacgcccacctggtgacccccgccgaggagggcgccggcggcgccggcctgggccccagcaagagaatcctgggcagcctgctgagcgacagcctgttcctggaggtgaaggagctgttcctggccgccgtgagactggaccccaccagcatcgaccccgacgtgcagtgcggcctgggcgtgctgttcaacctgagcggcgagtacgacaaggccgtggactgcttcaccgccgccctgagcgtgagacccaacgactacctgctgtggaacaagctgggcgccaccctggccaacggcaaccagagcgaggaggccgtggccgcctacagaagagccctggagctgcagcccggctacatcagaagcagatacaacctgggcatcagctgcatcaacctgggcgcccacagagaggccgtggagcacttcctggaggccctgaacatgcagagaaagagcagaggccccagaggcgagggcggcgccatgagcgagaacatctggagcaccctgagactggccctgagcatgctgggccagagcgacgcctacggcgccgccgacgccagagacctgagcaccctgctgaccatgttcggcctgccccagtag

SEQ ID NO: 112641 - protein, 264 aa, Artificial Sequence
  derived and/or modified sequence
MALQIPGGFWAAAVTVMLVMLSTPVAEARDFPKDFLVQFKGMCYFTNGTERVRGVARYIYNREEYGRFDSDVGEFQAVTELGRSIEDWNNYKDFLEQERAAVDKVCRHNYEAELRTTLQRQVEPTVTISPSRTEALNHHNLLVCSVTDFYPAQIKVRWFRNDQEETAGVVSTSLIRNGDWTFQILVMLEITPQRGDIYTCQVEHPSLQSPITVEWRAQSESAQSKMLSGIGGFVLGLIFLGLGLIIRHRGQKGPRGPPPAGLLH

SEQ ID NO: 112642 - DNA, 795 bp, Artificial Sequence
  derived and/or modified sequence
atggccctgcagatccccggcggcttctgggccgccgccgtgaccgtgatgctggtgatgctgagcacccccgtggccgaggccagagacttccccaaggacttcctggtgcagttcaagggcatgtgctacttcaccaacggcaccgagagagtgagaggcgtggccagatacatctacaacagagaggagtacggcagattcgacagcgacgtgggcgagttccaggccgtgaccgagctgggcagaagcatcgaggactggaacaactacaaggacttcctggagcaggagagagccgccgtggacaaggtgtgcagacacaactacgaggccgagctgagaaccaccctgcagagacaggtggagcccaccgtgaccatcagccccagcagaaccgaggccctgaaccaccacaacctgctggtgtgcagcgtgaccgacttctaccccgcccagatcaaggtgagatggttcagaaacgaccaggaggagaccgccggcgtggtgagcaccagcctgatcagaaacggcgactggaccttccagatcctggtgatgctggagatcaccccccagagaggcgacatctacacctgccaggtggagcaccccagcctgcagagccccatcaccgtggagtggagagcccagagcgagagcgcccagagcaagatgctgagcggcatcggcggcttcgtgctgggcctgatcttcctgggcctgggcctgatcatcagacacagaggccagaagggccccagaggccccccccccgccggcctgctgcactag

SEQ ID NO: 112643 - DNA, 795 bp, Artificial Sequence
  derived and/or modified sequence
atggcccttcagattcctggaggcttttgggctgccgcggtcacagtgatgctagtcatgctttccaccccagtcgcagaagcgcgcgactttcctaaggactttttggttcaatttaaggggatgtgttattttaccaacggaaccgagcgagtgagaggggttgccaggtatatatacaatcgagaggagtacgggaggtttgacagtgacgttggtgagttccaggctgtgacagagctgggccgttccattgaagattggaacaattacaaagactttctggagcaggaacgtgcagccgtggataaggtgtgtagacacaattacgaggcagaattaaggaccactctgcaaagacaggtggagccgactgtgacgatcagcccttcaagaacggaggccttgaatcatcacaatttgctggtgtgtagtgtcaccgacttctacccagctcaaattaaggtgcgctggttccgtaacgaccaggaggagactgcaggcgttgtgtcaacttctctcattcggaatggagactggacctttcagatcctcgtcatgctggaaatcactccgcaacggggtgacatctatacatgccaggtggagcatccatctctacagtctccgatcacggtggagtggagagcacagtctgagagcgcgcagtccaagatgctctccggcatagggggatttgtgcttggtctgatttttctgggcctaggattgatcattagacacaggggacaaaaagggcccagaggacctcccccagcaggcctactgcattag

SEQ ID NO: 112644 - DNA, 795 bp, Artificial Sequence
  derived and/or modified sequence
atggcgctccagattccgggcggcttttgggccgcggctgtaaccgtcatgctagttatgctatctactccggtcgcagaggcaagagacttccctaaggacttcctggtacagttcaaaggcatgtgctatttcactaacgggacagaaagagtgcggggggtggcccgctatatttataacagggaggagtatggaagatttgactcagatgtgggtgagttccaggcagtcacagagctaggccgttcaatcgaggattggaataactacaaggatttcctcgagcaggaacgggctgctgttgataaagtttgtcgccacaactacgaagccgaattacgcacaaccctgcagcgacaggttgaacccacagtgacgatatctccttcccgcacggaggctctgaaccaccacaatctgttggtttgttcagttaccgacttttacccagcccaaatcaaagttaggtggtttagaaatgatcaggaagagacggccggagtggtgtctaccagcttgattcgaaatggcgactggacttttcagattctcgtcatgctcgaaatcactcctcagagaggtgatatctacacctgtcaggttgagcatccttccctgcagtcgccaatcacggtggagtggcgtgcccagagtgagtctgcccagtcaaaaatgctgtctggcatcgggggctttgtcctcggcctcatctttcttggcctcggcctgatcattagacacagaggccaaaaaggcccaaggggtccaccacccgccggacttctccactag

SEQ ID NO: 112645 - DNA, 795 bp, Artificial Sequence
  derived and/or modified sequence
atggctctgcagataccaggcggattctgggccgcggctgttacggttatgctggtaatgcttagcactcccgttgccgaggcacgtgattttcccaaggactttctggtacagtttaaggggatgtgctattttacaaatggcacagagagagtgcgcggggttgcacggtacatttataaccgcgaggagtacggccgctttgactccgatgtcggagagtttcaagcagtaactgaattaggccgctcaatcgaagactggaataactataaagattttctggaacaggagcgggccgctgttgacaaagtctgccgtcataactacgaggccgagctgcgaacaacgctgcaaaggcaggtcgagccaacggtgaccatttcgccctcccgtacagaggcgctcaatcatcataacctgctcgtatgttctgtaacagatttctatccagcccaaattaaggtgcgatggttccgaaacgaccaagaggaaacagctggtgtcgtgagcacatcacttataaggaacggggactggacattccaaattttagtcatgctggagataactccgcagaggggggatatttacacatgtcaggtggaacacccatccctccagtcccctattaccgtagaatggcgggctcagtctgaatctgctcaaagtaagatgctgtccggtatcggtggcttcgttctcgggttaatttttctgggcctcggcctcattatcaggcaccgcggccagaaaggccctcgagggccaccgcccgcgggtctgctccattag

SEQ ID NO: 112646 - DNA, 795 bp, Artificial Sequence
  derived and/or modified sequence
atggctctccagatccctgggggtttttgggccgcggcagtcaccgtgatgctggtcatgctatccacacccgtcgctgaggcccgcgatttccctaaggactttctggtacagtttaagggaatgtgttactttacgaacggaacggaacgggtgcgaggagtcgcccggtatatttataaccgcgaggaatatggtcgatttgacagcgatgttggcgagttccaggccgtaaccgaactcggtcgcagcattgaggattggaacaactataaagacttcctcgaacaagaacgggccgctgttgataaggtctgcagacataactacgaggctgaactgcgcaccactctccagcgccaggtggaacccactgttacgatcagccctagtcgcaccgaagctttgaatcaccacaacctactggtgtgctctgtgaccgatttttaccctgcacaaatcaaggtccggtggtttcggaatgaccaggaagagactgccggcgtggtaagcacatctcttataagaaacggggactggacctttcaaatcctcgtaatgctggagataaccccacagcggggggatatctacacgtgccaagtcgagcacccctccctgcagagccctataaccgtggaatggcgggcccaaagcgaatctgcgcagagcaagatgctctccggcatcgggggattcgttctcggactaatcttccttggattgggcctcataatacggcaccgtggtcagaaggggcctcggggaccaccccctgctggcctcctccattag

SEQ ID NO: 112647 - DNA, 795 bp, Artificial Sequence
  derived and/or modified sequence
atggccctgcagatccctgggggcttctgggccgctgctgtgacagtgatgctggtgatgctgagcacccctgtggccgaggcccgggacttccccaaggacttcctggtgcagttcaagggcatgtgctacttcaccaatggaacagagcgggtgcggggcgtggcccgctacatctacaaccgggaggagtatggccgctttgacagtgatgtgggggagttccaggccgtgacagagctgggccgcagcattgaggactggaacaactacaaggacttcctggagcaggagagagctgctgtggacaaggtgtgccgccacaactatgaggccgagctgcggaccaccctgcagaggcaggtggagcccaccgtgaccatcagccccagcaggacagaggccctgaaccaccacaacctgctggtgtgcagcgtgacagacttctacccagcccagatcaaggtgcgctggttcagaaatgaccaggaggagacagctggggtggtgtccaccagcctcatcagaaatggagactggaccttccagatcctggtgatgctggagatcaccccccagagaggagacatctacacctgccaggtggagcaccccagcctgcagagccccatcaccgtggagtggagggcccagagcgagagcgcccagagcaagatgctgagcggcatcggcggctttgtgctgggcctcatcttcctgggcctgggcctcatcatccgccaccggggccagaagggcccccggggccccccacctgctggcctgctgcactag

SEQ ID NO: 112648 - DNA, 795 bp, Artificial Sequence
  derived and/or modified sequence
atggccctgcagatccccggcggcttctgggccgccgccgtgaccgtcatgctggtgatgttatcaaccccagtcgccgaagcaagggacttccccaaagatttcttggtgcagttcaaagggatgtgttactttacaaacgggaccgagagggtgaggggcgtggcccgatatatctataacagagaggaatatgggcggtttgatagcgacgtcggcgagtttcaggccgttacggaactgggtcgctcaatcgaggactggaataattataaagacttccttgagcaggagagagccgccgtggataaagtttgccggcacaattatgaagctgagttacggacgaccctgcagcggcaagtcgagccgactgtgactatctctccgagcaggaccgaggctctcaaccatcacaatctccttgtttgttccgtcactgacttttatcctgcccagatcaaagtgcgttggtttagaaatgaccaggaagagaccgccggagttgtgagcacttcgttaatccggaatggtgactggacatttcagatcctggtgatgctggaaatcactccccagcggggcgacatttacacttgccaagtagagcacccttcccttcagtcccccatcacagtcgagtggcgtgcacagagtgagtccgcacagtcgaagatgctttccggaattggggggttcgtgctgggattgatcttcttgggattaggacttataatcagacatcgtggacagaaaggtcctagggggcctccacctgccgggctgttgcactag

SEQ ID NO: 112649 - DNA, 795 bp, Artificial Sequence
  derived and/or modified sequence
atggccctgcagatccccggcggcttctgggccgccgccgtgaccgtcatgttggtaatgctgtcaaccccagtcgcggaggcgcgcgactttcccaaggattttctggttcagtttaagggtatgtgctattttactaacgggactgaacgggtgaggggggtggcccggtatatctacaacagagaagagtatgggagattcgacagtgatgtgggcgaatttcaggccgtgaccgagttgggcaggagtatcgaggactggaacaattacaaggatttcctcgagcaggagcgcgcggctgtcgataaagtgtgtcggcacaactatgaggccgagctgaggaccacactccagaggcaggttgagccaacagtgacaatttcccctagcagaaccgaagcgctcaatcaccacaacctgctggtgtgctctgttactgatttttatccggctcagattaaagttagatggttccgcaacgatcaggaggaaaccgcaggggtggtaagcactagcctcatccgaaatggtgactggactttccagatcctcgtgatgttggaaatcacgccccaacgtggggatatttacacatgccaggtggagcacccctctttacaaagccccattactgtcgagtggagagcccagagtgagtctgcccagtctaagatgctgtctggaattggaggttttgtgctggggctgattttcttgggtctgggccttattattcggcatagggggcagaagggaccccgggggcccccaccagcgggcctcctgcattag

SEQ ID NO: 112650 - DNA, 795 bp, Artificial Sequence
  derived and/or modified sequence
atggccctgcagatccccggcggcttctgggccgccgccgtgaccgtgatgctggttatgctatcaacccccgtggcagaagccagagacttcccgaaggacttcctagtgcagtttaagggaatgtgctactttactaatggcactgaaagggtgcgaggggtcgcgcgttatatttacaaccgcgaggaatacggacgtttcgacagtgacgtaggcgagtttcaggctgtaaccgagctcggacgctccatcgaagattggaataattataaggatttcctggagcaggagagggcagccgtggacaaggtgtgccgccacaattatgaagctgagctccggactaccctacagaggcaggtggagccaactgtgaccatttccccaagtaggacagaggctctgaaccaccataatctattggtgtgctccgtaaccgacttttaccccgctcagataaaagtaaggtggtttaggaacgaccaggaggaaacagccggagtggtgtccacttcacttataagaaacggcgattggacttttcagattctggtcatgctagagattaccccccagcgcggcgacatatacacctgccaggtcgagcacccaagtctgcagtcccctataaccgtggagtggcgggctcaatcggaaagcgcccagtccaaaatgctgtcaggtattggtggtttcgtccttggtctgatcttcctgggattgggtctcataattaggcaccggggacagaagggcccccgcgggccgccgccggctggtctgctccattag

SEQ ID NO: 112651 - DNA, 795 bp, Artificial Sequence
  derived and/or modified sequence
atggccctgcagatccccggcggcttctgggccgccgccgtgaccgtgatgttggtcatgctgtctacgcctgtggccgaggcaagagatttcccaaaagactttttggtccagttcaaggggatgtgctactttaccaatggaacagaacgtgtacggggtgttgctagatatatttataaccgggaggaatacggacgtttcgatagtgacgtgggggagtttcaggcggtgacagagctaggtcgctccatcgaagactggaacaattacaaagatttcctggagcaagagcgagcggccgtggataaagtctgtaggcataattatgaggcagagcttaggaccacgcttcagcgtcaggtcgaacccaccgtgaccatcagcccatcccgcaccgaagctctcaatcaccataatctgctggtctgtagtgtaacggacttttatcccgctcaaataaaggtcaggtggttcagaaatgatcaagaggaaactgcaggagttgtgtcaacaagcttgatcaggaatggcgactggaccttccaaattctagtgatgctggagatcacaccccagagaggggacatttacacatgtcaggtggaacacccatccctgcaatcccccataactgttgagtggagagctcagagtgaatctgcgcagagtaagatgctctccggcatcggcggattcgtactgggcctcatctttctgggtctggggctgattatccgacaccgcgggcagaaagggccccgaggaccccccccggctgggctactgcattag

SEQ ID NO: 112652 - DNA, 795 bp, Artificial Sequence
  derived and/or modified sequence
atggccctgcaaatccccggagggttctgggccgcagcagtgactgtaatgcttgtcatgctctccactcctgttgcagaggccagagatttcccaaaagactttctggttcagttcaaggggatgtgctactttacgaacggtacggagagggttaggggggtggctcgctacatctacaacagagaagaatacggacgtttcgactcggatgtgggagagtttcaagctgtgactgaacttggtcgcagtatagaggactggaataactacaaggattttttggaacaggagcgtgcggcagtcgataaagtatgtcgccataactacgaggccgagttgagaacgactctccaacgccaggtggaacctacagtaaccatcagcccgtcacggactgaagccctgaaccatcacaacctcctggtgtgctctgttacagatttttatcctgcacagattaaagtgcggtggttcagaaacgaccaggaagaaacagcaggcgtggtgtctacttccctaattagaaacggagattggaccttccaaatcctggtgatgctcgagataactccgcaacgaggcgatatctatacatgtcaggtggaacatcctagtctgcaatctccaattaccgtagagtggagagcccagtccgagtctgcgcagagcaagatgctttccggtatcggcggattcgtgctgggcctgatcttcctgggcctggggctcataatcagacacagaggacaaaaggggccacgcggaccacctcccgcaggacttctgcattag

SEQ ID NO: 112653 - DNA, 795 bp, Artificial Sequence
  derived and/or modified sequence
atggccctacaaatacctggaggattttgggcagccgcagttaccgtgatgctggttatgctgagtaccccagtggctgaagccagggattttccgaaggattttctcgtgcagtttaaaggtatgtgctacttcaccaacgggacagagagggtgcgcggagtggccagatacatctacaatcgggaggagtatggccgattcgactccgacgtgggagaattccaggcagtcaccgagttgggacgctctatagaagattggaacaactacaaagacttccttgaacaggagcgagcagcagtagataaagtatgccgacacaactacgaggccgagctccgtacaaccttgcagagacaagtagaaccaaccgttacaatcagccctagccggacagaggctctgaaccatcacaatctgcttgtgtgtagcgtgactgatttttacccagcccaaattaaggttcgatggtttaggaacgatcaggaagagaccgctggtgtggtatctacctccctaatacgtaacggggattggacttttcaaatcctagttatgctggagataacaccacaacgcggtgacatatatacatgccaagtcgagcacccgagcctgcagagccctatcacagttgaatggcgggctcagagcgagtctgcccagagtaagatgctatccggcattgggggtttcgtactggggctcattttcctgggcctcggactgattattagacacagagggcagaaaggcccaaggggaccacctcccgctggtctgttgcactag

SEQ ID NO: 112654 - DNA, 795 bp, Artificial Sequence
  derived and/or modified sequence
atggctttgcagatcccgggaggattttgggctgcggcagtaacagttatgcttgttatgctttctacgcctgttgctgaagctagagattttcccaaggactttctcgttcagttcaaggggatgtgctactttacaaatgggactgagagagtacggggagtagctcgatacatctacaaccgtgaagagtatggcagattcgacagcgatgtcggggaatttcaagccgtaaccgagctgggccgatcaattgaagactggaacaattataaggatttcctagaacaggaaagggcggctgttgataaggtgtgtaggcataactacgaagctgagctgcgcaccacacttcagaggcaagtggaacccacagtgacaatctccccctccagaacagaggccctgaaccaccataaccttctcgtgtgctcagtcaccgacttctacccggcacaaatcaaagttcgatggttcagaaatgatcaagaagaaactgccggagttgtctccaccagcctcattcgaaatggggactggactttccagattctggtaatgctggagatcacgccgcagaggggagacatttatacctgccaggtggagcacccttctctgcaatcacctatcaccgtagagtggcgggctcagagcgagagcgcccagtcaaagatgctgagtggtattggcggattcgttctcggcctaatattcttgggactgggcctaattataaggcacagagggcagaagggacctagaggacctccacctgcgggactcctccattag

SEQ ID NO: 112655 - DNA, 795 bp, Artificial Sequence
  derived and/or modified sequence
atggccttgcaaattccgggtggattctgggccgcagccgtgacagtaatgctcgtaatgctgagtacccctgttgccgaggcccgagactttccaaaggactttctagtgcagtttaagggtatgtgctacttcacaaacgggacggagcgggtgagaggagttgccagatatatctacaaccgagaagagtatggtagatttgactcggacgttggcgaattccaggcggtgactgaactcggcaggagtattgaggactggaacaactataaggacttcctggagcaggagcgggctgctgtcgataaggtgtgccggcacaattatgaagctgagctacgaaccactttgcagcgccaggttgaaccgactgtgaccatcagcccctcgcgcactgaggcgctgaaccaccacaatctgttggtttgctccgtcaccgatttttatcccgcacagatcaaagtcagatggttccgaaacgaccaggaggagaccgctggggtcgtatctacttccttgatacgtaatggagattggacttttcaaattcttgtaatgctagaaatcacaccccagaggggtgacatttatacctgccaggtggaacaccctagcttacaatctccaatcactgtcgagtggcgtgctcagagtgaatcagcgcagagtaaaatgctgagcggcatcggagggttcgtcctcggcctcatctttctcgggctcggactgattattaggcataggggacagaaggggcctcggggacccccacctgccggtctgctgcattag

SEQ ID NO: 112656 - protein, 726 aa, Artificial Sequence
  derived and/or modified sequence
MPINKSEKPESCDNVKVVVRCRPLNEREKSMCYKQAVSVDEMRGTITVHKTDSSNEPPKTFTFDTVFGPESKQLDVYNLTARPIIDSVLEGYNGTIFAYGQTGTGKTFTMEGVRAIPELRGIIPNSFAHIFGHIAKAEGDTRFLVRVSYLEIYNEEVRDLLGKDQTQRLEVKERPDVGVYIKDLSAYVVNNADDMDRIMTLGHKNRSVGATNMNEHSSRSHAIFTITIECSEKGIDGNMHVRMGKLHLVDLAGSERQAKTGATGQRLKEATKINLSLSTLGNVISALVDGKSTHVPYRNSKLTRLLQDSLGGNSKTMMCANIGPADYNYDETISTLRYANRAKNIKNKARINEDPKDALLRQFQKEIEELKKKLEEGEEISGSDISGSEEDDDEEGEVGEDGEKRKKRRGSSSSSSSDSTCSVIEKPLDKFLPIQIGKKKVSPDKMIEMQAKIDEERKALETKLDMEEEERNKARAELEKREKDLLKAQQEHQSLLEKLSALEKKVIVGGVDLLAKAEEQEKLLEESNMELEERRKRAEQLRRELEEKEQERLDIEEKYTSLQEEAQGKTKKLKKVWTMLMAAKSEMADLQQEHQREIEGLLENIRQLSRELRLQMLIIDNFIPRDYQEMIENYVHWNEDIGEWQLKCVAYTGNNMRKQTPVPDKKEKDPFEVDLSHVYLAYTEESLRQSLMKLERPRTSKGKARPKTGRRKRSAKPETVIDSLLQ

SEQ ID NO: 112657 - DNA, 2181 bp, Artificial Sequence
  derived and/or modified sequence
atgcccatcaacaagagcgagaagcccgagagctgcgacaacgtgaaggtggtggtgagatgcagacccctgaacgagagagagaagagcatgtgctacaagcaggccgtgagcgtggacgagatgagaggcaccatcaccgtgcacaagaccgacagcagcaacgagccccccaagaccttcaccttcgacaccgtgttcggccccgagagcaagcagctggacgtgtacaacctgaccgccagacccatcatcgacagcgtgctggagggctacaacggcaccatcttcgcctacggccagaccggcaccggcaagaccttcaccatggagggcgtgagagccatccccgagctgagaggcatcatccccaacagcttcgcccacatcttcggccacatcgccaaggccgagggcgacaccagattcctggtgagagtgagctacctggagatctacaacgaggaggtgagagacctgctgggcaaggaccagacccagagactggaggtgaaggagagacccgacgtgggcgtgtacatcaaggacctgagcgcctacgtggtgaacaacgccgacgacatggacagaatcatgaccctgggccacaagaacagaagcgtgggcgccaccaacatgaacgagcacagcagcagaagccacgccatcttcaccatcaccatcgagtgcagcgagaagggcatcgacggcaacatgcacgtgagaatgggcaagctgcacctggtggacctggccggcagcgagagacaggccaagaccggcgccaccggccagagactgaaggaggccaccaagatcaacctgagcctgagcaccctgggcaacgtgatcagcgccctggtggacggcaagagcacccacgtgccctacagaaacagcaagctgaccagactgctgcaggacagcctgggcggcaacagcaagaccatgatgtgcgccaacatcggccccgccgactacaactacgacgagaccatcagcaccctgagatacgccaacagagccaagaacatcaagaacaaggccagaatcaacgaggaccccaaggacgccctgctgagacagttccagaaggagatcgaggagctgaagaagaagctggaggagggcgaggagatcagcggcagcgacatcagcggcagcgaggaggacgacgacgaggagggcgaggtgggcgaggacggcgagaagagaaagaagagaagaggcagcagcagcagcagcagcagcgacagcacctgcagcgtgatcgagaagcccctggacaagttcctgcccatccagatcggcaagaagaaggtgagccccgacaagatgatcgagatgcaggccaagatcgacgaggagagaaaggccctggagaccaagctggacatggaggaggaggagagaaacaaggccagagccgagctggagaagagagagaaggacctgctgaaggcccagcaggagcaccagagcctgctggagaagctgagcgccctggagaagaaggtgatcgtgggcggcgtggacctgctggccaaggccgaggagcaggagaagctgctggaggagagcaacatggagctggaggagagaagaaagagagccgagcagctgagaagagagctggaggagaaggagcaggagagactggacatcgaggagaagtacaccagcctgcaggaggaggcccagggcaagaccaagaagctgaagaaggtgtggaccatgctgatggccgccaagagcgagatggccgacctgcagcaggagcaccagagagagatcgagggcctgctggagaacatcagacagctgagcagagagctgagactgcagatgctgatcatcgacaacttcatccccagagactaccaggagatgatcgagaactacgtgcactggaacgaggacatcggcgagtggcagctgaagtgcgtggcctacaccggcaacaacatgagaaagcagacccccgtgcccgacaagaaggagaaggaccccttcgaggtggacctgagccacgtgtacctggcctacaccgaggagagcctgagacagagcctgatgaagctggagagacccagaaccagcaagggcaaggccagacccaagaccggcagaagaaagagaagcgccaagcccgagaccgtgatcgacagcctgctgcagtag

SEQ ID NO: 112658 - DNA, 2181 bp, Artificial Sequence
  derived and/or modified sequence
atgcctattaacaagagtgaaaagcctgagtcctgcgacaacgtcaaagtagtggtccggtgtcgtccgctgaacgaacgcgagaaatctatgtgttacaaacaggctgtgtctgtcgacgagatgcggggaactatcacggtgcacaagaccgatagttctaacgagccaccaaaaactttcacttttgacacagtgttcggccccgaaagcaagcagcttgatgtgtataacctgacagccagaccaatcatcgacagcgtactcgagggatataacggcaccatcttcgcatacgggcagacaggtaccggtaaaacctttaccatggagggggtgcgggccatacccgagttgcggggcattattccaaatagttttgcccatattttcggacacatagcaaaagccgaaggtgatacgcgctttctcgtccgtgtttcctaccttgagatttataacgaggaagtcagagacctcctggggaaggatcaaacacagagactcgaagttaaagaaagacctgacgtgggcgtgtacataaaagacctgtcagcgtacgtggttaataacgccgatgatatggataggataatgacactcgggcacaaaaataggagcgtaggagcaacaaatatgaatgagcactcttcccgatcccatgctatttttaccatcactattgaatgctccgagaaaggcatcgacggcaacatgcatgtgaggatgggaaaattgcatctagtcgacctggctggcagcgaacgccaggctaagactggagctactggtcagaggctgaaggaggcaacaaagatcaatctttccttatccacactcggtaatgtgatttccgctcttgtcgacggtaaaagtacacacgttccgtatagaaatagcaaactgacccgattactccaggacagcctgggtggtaattcaaaaacgatgatgtgcgcaaacattggcccagcagactacaactatgacgagacaatttcaaccttgagatacgccaaccgcgccaagaacatcaagaacaaggctagaataaatgaagacccaaaggacgccctgctgcgccagtttcagaaagagattgaggaactgaagaaaaagctggaggagggcgaagagatcagcggaagcgacatatcaggttctgaagaggacgacgacgaggaaggcgaagtgggggaggacggggagaagaggaagaaaaggaggggcagctctagttccagctccagcgacagtacatgctccgtgattgagaagccccttgataagttcctcccgatccaaataggaaaaaagaaggtatctcccgataaaatgattgagatgcaggcaaagatcgacgaggagcgcaaagctttggagaccaaactcgatatggaagaggaagagagaaataaagcccgcgcggagttggagaaacgcgaaaaagacctactgaaggcccagcaggaacatcaaagccttctggagaaattgagcgctttggaaaagaaagtgatcgtaggcggcgttgatctgttggcgaaggcagaggagcaagaaaaactattagaggaaagcaacatggaactcgaggagcggcgaaagagggccgaacagcttcgcagggaactggaggagaaggagcaggaacggttggatattgaagagaaatatacctccctgcaggaagaggcccaaggcaagactaaaaaactgaagaaggtgtggacgatgttgatggccgccaagtctgaaatggcggacctacagcaggagcaccagcgcgaaatcgagggacttctggaaaacatacgccaactcagtagagagctcaggctgcagatgctaatcatcgacaactttattccccgagactaccaagagatgatagaaaattacgtgcattggaacgaggacatcggagagtggcaactgaaatgtgttgcatacacagggaataatatgaggaagcaaacaccagtgccagacaaaaaggagaaagatccatttgaggtggatcttagtcatgtttatctcgcttataccgaagaatcactgaggcaaagcctaatgaaactggaaaggccccgcacatccaaagggaaagcaagaccaaagacaggccgccgaaaaaggtccgccaagcctgagaccgtgatcgatagtcttctacagtag

SEQ ID NO: 112659 - DNA, 2181 bp, Artificial Sequence
  derived and/or modified sequence
atgcccatcaacaagtctgagaagccagagagctgtgacaacgtgaaggtggtggtgcgctgccggcccctgaatgaaagagagaagtccatgtgctacaagcaggccgtgtctgtggatgagatgaggggcaccatcaccgtgcacaagacagacagcagcaatgaaccacccaagaccttcacctttgacacagtgtttggacctgagagcaagcagctggatgtgtacaacctgacagcccggcccatcattgattctgtgctggagggctacaacggcaccatctttgcctacggccagacaggcaccgggaagaccttcaccatggagggcgtgcgggccatccctgagctgcggggcatcatccccaacagctttgcccacatcttcggccacatcgccaaggccgagggggacacccgcttcctggtgcgggtgtcctacctggagatctacaatgaggaggtgcgggacctgctgggcaaggaccagacccagaggctggaggtgaaggagaggccagatgtgggcgtgtacatcaaggacctgagcgcctacgtggtgaacaatgctgatgacatggaccgcatcatgaccctgggccacaagaacagatctgtgggcgccaccaacatgaatgagcacagcagccgcagccacgccatcttcaccatcaccattgaatgttctgagaagggcattgatggcaacatgcacgtgaggatgggcaagctgcacctggtggacctggccggcagcgagcggcaggccaagacaggagccaccggccagaggctgaaggaggccaccaagatcaacctgagcctgagcaccctgggcaatgtcatcagcgccctggtggatggcaagagcacccacgtgccctacagaaacagcaagctgacccggctgctgcaggacagcctgggcggcaacagcaagaccatgatgtgtgccaacatcggccctgctgactacaactatgatgagaccatcagcaccctgcgctatgccaacagagccaagaacatcaagaacaaggcccgcatcaatgaagaccccaaggatgccctgctgcggcagttccagaaggagattgaggagctgaagaagaagctggaggagggggaggagatcagcggcagtgacatcagcggcagcgaggaggatgatgatgaggagggggaggtgggggaggatggagagaagaggaagaagaggcggggcagcagcagcagcagcagcagtgacagcacctgcagcgtcatcgagaagcccctggacaagttcctgcccatccagatcggcaagaagaaggtgtccccagacaagatgattgagatgcaggccaagattgatgaggagaggaaggccctggagaccaagctggacatggaggaggaggagaggaacaaggcccgggcagagctggagaagcgggagaaggacctgctgaaggcccagcaggagcaccagagcctgctggagaagctgagcgccctggagaagaaggtgattgtgggcggcgtggacctgctggccaaggccgaggagcaggagaagctgctggaggagagcaacatggagctggaggagaggaggaagagagctgagcagctgcggcgggagctggaggagaaggagcaggagcggctggacatcgaggagaagtacaccagcctgcaggaggaggcccagggcaagaccaagaagctgaagaaggtgtggaccatgctgatggccgccaagtctgagatggctgacctgcagcaggagcaccagcgggagattgagggcctgctggagaacatccggcagctgagccgggagctgcggctgcagatgctgatcatcgacaacttcatcccccgggactaccaggagatgattgagaactacgtgcactggaatgaagatattggagagtggcagctgaagtgtgtggcctacacaggcaacaacatgaggaagcagacccctgtgcctgacaagaaggagaaggacccctttgaggtggacctgagccacgtgtacctggcctacacagaggagagcctgcggcagagcctgatgaagctggagcggcccaggaccagcaagggcaaggcccggcccaagacaggccgcaggaagaggtctgccaagccagagaccgtgattgacagcctgctgcagtag

SEQ ID NO: 112660 - DNA, 2181 bp, Artificial Sequence
  derived and/or modified sequence
atgcccatcaacaagagcgagaagcccgagagctgcgacaacgtgaaggtagtggtgcgctgccggccactgaatgagagagaaaaaagcatgtgttataagcaagccgtttccgtggatgagatgaggggcacgatcactgtacacaagacagattctagcaacgagcctccgaagaccttcacctttgacacagtgtttggtcccgagtcaaagcaactggatgtgtataatttaaccgctcggccaataatcgacagcgtacttgagggatacaacggcaccatctttgcctatggacagactggcacaggaaaaaccttcactatggagggcgtgcgcgctatacccgagctgagggggataattccaaacagcttcgcccatatattcgggcacattgcaaaggcagagggggatacccggtttctcgtgcgcgtgtcttatctggagatctacaacgaagaagtcagggatctgctcgggaaagatcaaacgcaaaggcttgaagtgaaggaaaggcccgatgtgggcgtctacatcaaagacctgagtgcttacgtggtgaacaatgccgacgatatggatcgaattatgacattgggtcacaagaaccggagcgttggagccactaacatgaatgaacattcatcccgcagtcatgcaatcttcactattacaatcgagtgtagtgaaaaaggcattgacggtaacatgcacgtgcggatgggcaagttacacttggtggacctggcgggttccgaacggcaggctaagacaggagctacagggcagagactcaaagaggccacaaaaatcaacctgagcctaagtacccttggcaatgttatttccgctctcgttgacggaaaaagcacccacgtgccctaccgtaatagcaaacttactagactgttgcaggacagcctcggcgggaatagtaagaccatgatgtgcgctaatattggtcctgcagactacaactacgacgagaccattagcactttgcgctatgctaacagggccaagaatatcaagaacaaggcgcggattaatgaagacccaaaggacgccctgctacgacaattccaaaaggagattgaggaactgaaaaagaagttggaggagggtgaggaaatttctggaagcgatattagtggatcagaagaagacgacgacgaggaaggggaggtgggagaagacggggaaaaacggaagaaaaggcggggctctagcagttcatcatcgagtgactccacttgttctgtgattgaaaagcccctggacaaattcctccctattcagattggcaagaagaaagtaagcccagataaaatgatagaaatgcaggccaagatcgacgaagagcgtaaagcactggagacaaaactggatatggaagaggaggagagaaacaaagctcgggccgagcttgaaaaaagggagaaagacctgcttaaagcccaacaggagcatcaaagcttgctagagaaactgagtgccttggagaaaaaggttatagtcggcggagtggatttattggcaaaagctgaggagcaggagaaactgctggaggagtccaacatggaacttgaggaacgtcggaaacgcgcagaacaactgcggcgcgagctggaggagaaggaacaggaaagattggacatcgaagagaagtacactagcctgcaggaagaagctcaagggaagacgaaaaagttgaaaaaagtatggaccatgctcatggccgctaagagcgagatggctgatctgcagcaggaacatcagagagagatcgaggggctactcgaaaacattcgacagttgagtcgggaacttcggcttcagatgctgatcatcgataattttatcccgcgagactaccaggaaatgatcgagaactatgtacattggaacgaggacattggggagtggcagctgaagtgtgtcgcttacactgggaacaacatgagaaaacagacccctgtgcccgataagaaagagaaagatccgttcgaggtggatctcagccatgtgtacctggcttacaccgaagagtctttgaggcagagtctgatgaagttggaaaggcccaggacttctaaggggaaagcgagacctaagacaggccgacggaaaaggtcagctaagcctgagactgtgatagatagcctcctgcaatag

SEQ ID NO: 112661 - DNA, 2181 bp, Artificial Sequence
  derived and/or modified sequence
atgccaattaacaagtctgaaaagcccgagtcttgcgacaatgtgaaggtagtggtgcggtgtcggcctctcaacgaacgggagaaaagtatgtgttacaagcaggctgtgtcagtcgacgagatgcgaggcaccatcacagtgcataagaccgactcttcgaatgaacctcccaaaacttttacctttgacacggtttttggaccagagagcaagcagctggacgtgtataatttgaccgctagacccataatcgacagtgtgttagaaggctataatgggaccattttcgcttatggacagactggcacagggaagacatttaccatggagggagtgagagctattcctgagctcaggggtattatccctaattccttcgctcacatcttcggacatattgccaaggccgagggggatacccgcttcctagtcagggtgtcctacttagaaatctacaacgaagaagtgagagacttactgggcaaagatcagacacagcggctcgaggtgaaggagagaccagacgtgggtgtgtacatcaaagacctcagcgcttatgtcgtcaacaacgctgacgacatggaccgaatcatgaccctaggacacaagaatagaagtgtgggagccaccaatatgaatgagcactcgtcacgatctcatgcaatctttacgatcacgatagagtgctcagagaaagggatcgacgggaatatgcacgtgcggatgggtaaactccacctggtagacttggcaggctctgagcgtcaggccaaaaccggtgccacagggcaacgattgaaagaagctacgaaaataaacttgtccctctccactttaggcaacgttatctcagccttagtcgacgggaagtcaacccacgtcccttacagaaattccaaactcacgcggctcttacaagattccctcggcggaaatagcaagacaatgatgtgtgccaatatcgggccagccgattacaattacgacgagacaatctctactctgagatacgcaaacagggccaagaacattaagaacaaagcacgcatcaatgaagaccctaaggacgccctgctgcgccagtttcagaaagagatcgaggagctgaagaaaaagctcgaagagggagaggaaatctccggctccgatattagcggctccgaggaggacgatgacgaggagggggaggtgggcgaggatggcgagaaaagaaagaaaagaaggggaagctcttccagctccagcagtgactccacctgcagtgtcatcgagaagcctctcgataagttcctgcctattcagatcggcaagaagaaagtgagtcctgacaaaatgatagagatgcaggctaagattgacgaagaacgcaaggctctagaaacaaagctggacatggaggaggaggaacgcaacaaggctcgggcagagctcgagaagcgagagaaagacctgctcaaggcacagcaggaacatcagagcttattggaaaaattgagtgccttggaaaagaaagtgattgttggtggggtggacctgctggccaaggcagaggagcaggagaagttgcttgaagagtctaatatggagttagaagagcggcgtaaacgagctgagcagttgagacgcgagctcgaggagaaagagcaggagcgtctcgacatcgaggagaagtatacctctctacaggaggaagcacagggcaaaacaaaaaagctgaagaaggtctggactatgctcatggccgcaaaatcagagatggcggacctccagcaggagcatcagcgtgagattgagggcctgctagaaaatatcaggcagctctcccgggaactccggttgcagatgctgattattgacaattttatcccacgcgactatcaggagatgattgagaactatgttcactggaatgaagatatcggagagtggcagcttaaatgcgtggcatatactggtaataacatgcggaagcaaacgccagtccccgataaaaaagagaaggatccatttgaagtggatctgtcccacgtgtatctcgcatacactgaagaaagcttacgacagtctctcatgaagctggagcggccacgtacaagtaaaggaaaagccagaccgaaaactgggaggcgcaaaaggtccgcgaagccagagaccgtgatcgattccttgcttcagtag

SEQ ID NO: 112662 - DNA, 2653 bp, Artificial Sequence
  derived and/or modified sequence
agtctcgagagcgtcaacgaggtgtttcggtagtctctggccatcctttctgcgcacccggtgtcgctgggctgcaccccgggcggggacgtccgccgggcacgggagggggccaagatgccgatcaataaatcagagaagccagaaagctgcgataatgtgaaggttgttgttaggtgccggcccctcaatgagagagagaaatcaatgtgctacaaacaggctgtcagtgtggatgagatgaggggaactatcactgtacataagactgattcttccaatgaacctccaaagacatttacttttgatactgtttttggaccagagagtaaacaacttgatgtttataacttaactgcaagacctattattgattctgtacttgaaggctacaatgggactatttttgcatatggacaaaccggaacaggcaaaacttttaccatggaaggtgttcgagctattcctgaacttagaggaataattcccaattcatttgctcacatatttggtcatattgcaaaagcggagggtgatacaagatttttggttcgagtgtcttatttggaaatatataatgaagaagttcgtgaccttttgggcaaggatcagacacaaaggttagaggttaaagaaagacctgatgtgggagtttatatcaaagatttatcagcttatgtggtaaataatgctgatgatatggatagaattatgacgctaggccacaaaaatcgttctgttggtgcaactaatatgaacgaacatagttcccgttcccatgccatctttacaattactatagaatgcagtgaaaaaggcattgatggtaacatgcatgtcaggatggggaagctccatcttgtagatcttgctggttcagaaagacaggcaaaaactggagctactggacagcgcctaaaggaagctacaaaaatcaatctttcactttccacccttggtaatgtaatttctgccttggttgatggaaaaagcactcatgtgccttatcgtaactctaaactgactcgtcttcttcaggattccttaggaggaaattcaaaaaccatgatgtgtgcaaatattgggccagcagattacaattatgatgaaactatcagtacattacggtatgccaatcgtgctaagaatattaaaaataaagctagaattaatgaagatccaaaggatgctttgctgcgtcagttccagaaagaaatagaagaactgaaaaagaagcttgaagaaggagaagaaatatcaggctctgatatcagtgggtcagaggaagatgatgatgaagagggtgaggttggagaagatggagagaaaaggaaaaaaagaaggggcagtagcagcagcagtagttcagactccacatgttctgtcatagagaaacctctggataagttcttgcctattcaaataggaaaaaagaaagtctccccagacaagatgattgaaatgcaagcaaaaattgatgaggagagaaaagcacttgaaacaaagctcgacatggaagaagaagaaagaaacaaggctagagctgaattagagaaacgggaaaaagatcttcttaaagcccaacaagagcatcagtctttgctggaaaaattatctgccctggaaaagaaggtaattgttggtggggttgacttgttggccaaagctgaggaacaagagaaacttcttgaagaatctaacatggaactggaagaaaggaggaaaagagcagagcaacttcgcagagaacttgaggaaaaagagcaagaacgcttggatattgaagaaaaatataccagtttgcaagaggaagcacagggaaagaccaagaagttaaagaaagtttggactatgctgatggctgcaaagtcagagatggctgatctccaacaagaacatcagagggaaattgaaggcctactggagaacattcggcaacttagccgggagcttcgacttcagatgcttattattgataactttatacctcgggattatcaggaaatgattgaaaactatgtccattggaatgaagacataggagaatggcagctaaaatgtgttgcttatacaggaaataacatgaggaagcaaaccccagtacctgataaaaaggagaaagatccctttgaggtggacctttctcacgtgtatcttgcctatactgaggagagtctgcgtcagtctttgatgaaactagaaagaccacgaacttcaaaggggaaagcaaggccaaagacagggagaagaaagcgttctgcaaagcctgaaactgtaattgactctttactgcagtaaatgttacagacttaaagtcacaataaaaattagtgatattctcatgcctggacaaaatctttaattaaaacagtgaagacttctctataatttcaattaatggaagttgtagatcaatgaataagactggaaataataatttgcttaagaacttttagtctacatatattaatataacattaaaattgtacaactggtgattgttcaaattgttgtactactactcttcaattgtactgtgcagggaagttgggggaacagttcatactatagagagttacagtttagatgtatgtgtaaatcgattagctatttatccaactactgtatatttaggtaactagaatttcaaaat

SEQ ID NO: 112663 - protein, 702 aa, Artificial Sequence
  derived and/or modified sequence
MPINKSEKPESCDNVKVVVRCRPLNEREKSMCYKQAVSVDEMRGTITVHKTDSSNEPPKTFTFDTVFGPESKQLDVYNLTARPIIDSVLEGYNGTIFAYGQTGTGKTFTMEGVRAIPELRGIIPNSFAHIFGHIAKAEGDTRFLVRVSYLEIYNEEVRDLLGKDQTQRLEVKERPDVGVYIKDLSAYVVNNADDMDRIMTLGHKNRSVGATNMNEHSSRSHAIFTITIECSEKGIDGNMHVRMGKLHLVDLAGSERQAKTGATGQRLKEATKINLSLSTLGNVISALVDGKSTHVPYRNSKLTRLLQDSLGGNSKTMMCANIGPADYNYDETISTLRYANRAKNIKNKARINEDPKDALLRQFQKEIEELKKKLEEGEEISGSDISGSEEDDDEEGEVGEDGEKRKKRRDQAGKKKVSPDKMIEMQAKIDEERKALETKLDMEEEERNKARAELEKREKDLLKAQQEHQSLLEKLSALEKKVIVGGVDLLAKAEEQEKLLEESNMELEERRKRAEQLRRELEEKEQERLDIEEKYTSLQEEAQGKTKKLKKVWTMLMAAKSEMADLQQEHQREIEGLLENIRQLSRELRLQMLIIDNFIPRDYQEMIENYVHWNEDIGEWQLKCVAYTGNNMRKQTPVPDKKEKDPFEVDLSHVYLAYTEESLRQSLMKLERPRTSKGKARPKTGRRKRSAKPETVIDSLLQ

SEQ ID NO: 112664 - DNA, 2109 bp, Artificial Sequence
  derived and/or modified sequence
atgcccatcaacaagagcgagaagcccgagagctgcgacaacgtgaaggtggtggtgagatgcagacccctgaacgagagagagaagagcatgtgctacaagcaggccgtgagcgtggacgagatgagaggcaccatcaccgtgcacaagaccgacagcagcaacgagccccccaagaccttcaccttcgacaccgtgttcggccccgagagcaagcagctggacgtgtacaacctgaccgccagacccatcatcgacagcgtgctggagggctacaacggcaccatcttcgcctacggccagaccggcaccggcaagaccttcaccatggagggcgtgagagccatccccgagctgagaggcatcatccccaacagcttcgcccacatcttcggccacatcgccaaggccgagggcgacaccagattcctggtgagagtgagctacctggagatctacaacgaggaggtgagagacctgctgggcaaggaccagacccagagactggaggtgaaggagagacccgacgtgggcgtgtacatcaaggacctgagcgcctacgtggtgaacaacgccgacgacatggacagaatcatgaccctgggccacaagaacagaagcgtgggcgccaccaacatgaacgagcacagcagcagaagccacgccatcttcaccatcaccatcgagtgcagcgagaagggcatcgacggcaacatgcacgtgagaatgggcaagctgcacctggtggacctggccggcagcgagagacaggccaagaccggcgccaccggccagagactgaaggaggccaccaagatcaacctgagcctgagcaccctgggcaacgtgatcagcgccctggtggacggcaagagcacccacgtgccctacagaaacagcaagctgaccagactgctgcaggacagcctgggcggcaacagcaagaccatgatgtgcgccaacatcggccccgccgactacaactacgacgagaccatcagcaccctgagatacgccaacagagccaagaacatcaagaacaaggccagaatcaacgaggaccccaaggacgccctgctgagacagttccagaaggagatcgaggagctgaagaagaagctggaggagggcgaggagatcagcggcagcgacatcagcggcagcgaggaggacgacgacgaggagggcgaggtgggcgaggacggcgagaagagaaagaagagaagagaccaggccggcaagaagaaggtgagccccgacaagatgatcgagatgcaggccaagatcgacgaggagagaaaggccctggagaccaagctggacatggaggaggaggagagaaacaaggccagagccgagctggagaagagagagaaggacctgctgaaggcccagcaggagcaccagagcctgctggagaagctgagcgccctggagaagaaggtgatcgtgggcggcgtggacctgctggccaaggccgaggagcaggagaagctgctggaggagagcaacatggagctggaggagagaagaaagagagccgagcagctgagaagagagctggaggagaaggagcaggagagactggacatcgaggagaagtacaccagcctgcaggaggaggcccagggcaagaccaagaagctgaagaaggtgtggaccatgctgatggccgccaagagcgagatggccgacctgcagcaggagcaccagagagagatcgagggcctgctggagaacatcagacagctgagcagagagctgagactgcagatgctgatcatcgacaacttcatccccagagactaccaggagatgatcgagaactacgtgcactggaacgaggacatcggcgagtggcagctgaagtgcgtggcctacaccggcaacaacatgagaaagcagacccccgtgcccgacaagaaggagaaggaccccttcgaggtggacctgagccacgtgtacctggcctacaccgaggagagcctgagacagagcctgatgaagctggagagacccagaaccagcaagggcaaggccagacccaagaccggcagaagaaagagaagcgccaagcccgagaccgtgatcgacagcctgctgcagtag

SEQ ID NO: 112665 - DNA, 2109 bp, Artificial Sequence
  derived and/or modified sequence
atgcccatcaacaagagtgagaagccggaatcgtgtgacaatgttaaggtcgttgtgcggtgtcgccctcttaatgagagagagaagtctatgtgctataagcaggccgtctcagtggatgagatgcgggggacaattacagtgcacaagactgatagctcgaatgagccaccaaaaaccttcacttttgatactgttttcggcccagagagcaagcagctggatgtctacaacctgactgctagacccattattgactcagtgttggagggctataatgggactattttcgcgtatgggcagacggggaccggcaagacatttaccatggaaggggtcagagcaatccccgagttaagaggcattatccccaacagcttcgcacacatatttggccacatcgcaaaggcggagggggatacccgctttctagttcgcgtgtcgtatctggaaatctataatgaggaggtacgagatttgctgggaaaggatcagacccagcgccttgaggtcaaagagcggcctgatgtgggcgtttacattaaagacctgtccgcctatgtggtcaacaatgcagatgacatggataggatcatgaccctggggcacaaaaatagatctgtaggcgccacgaacatgaatgagcacagctcaagatctcacgccatctttaccataactattgagtgtagtgagaaaggaatcgacggtaacatgcacgtccgcatgggcaaattgcacttggtggatctggctggtagcgagcggcaggcgaagactggagccactggtcagagactgaaggaagcaaccaaaatcaatctaagcttatcaactctgggaaatgtgatttccgcgctagtggacgggaagtccacccatgtgccatataggaattccaagctgaccaggctgctccaggactcccttggcggaaattccaagacaatgatgtgtgccaatatcggccctgccgactacaactatgacgaaaccataagtaccctgaggtatgctaatagggcgaagaacattaagaacaaagcccgaatcaatgaagaccctaaagacgcccttttgcgtcaattccagaaggaaatcgaggaactcaagaaaaagttagaggagggcgaagaaatcagcggttccgatatttcaggatctgaagaggacgatgacgaagaaggagaagtgggagaagatggagaaaagcgaaagaagcgacgcgaccaagcaggcaaaaaaaaggtgagtccagacaagatgattgagatgcaggcaaaaatagatgaggagcgtaaggcactggaaacaaagctggatatggaggaggaagagcgaaacaaagctcgagccgagcttgaaaagagagaaaaagacctgctcaaggcacagcaggaacatcagagcttgttagaaaaactgagcgcactggagaaaaaggttattgtaggcggagtggacctcctggctaaggcggaggagcaagagaagctgctcgaggaaagcaatatggagttggaggagaggagaaagcgagccgaacagttgcgcagggaattggaggaaaaagaacaggagagattggacatagaggaaaagtacacatccctacaggaagaagcacaggggaagactaaaaaattgaagaaggtatggactatgttgatggccgctaaatcagagatggccgatcttcaacaggaacatcaacgtgagatcgagggtctgctggagaacattaggcaactctctcgggagttgaggttgcaaatgctcatcattgataacttcattccccgcgattaccaggagatgatcgagaactacgtccattggaacgaagacatcggggaatggcagcttaaatgcgtagcctatacaggcaacaacatgagaaaacaaactcctgtccctgacaagaaagaaaaagaccctttcgaggtggatctgtcccacgtgtatctggcctatacggaagagtccttacgtcaaagtttaatgaagctggaacgcccacgaacgtccaagggcaaagccagacccaagacaggccggcggaagagatcagctaagccggaaacagttatcgattcactcttgcagtag

SEQ ID NO: 112666 - DNA, 2109 bp, Artificial Sequence
  derived and/or modified sequence
atgcccatcaacaagtctgagaagccagagagctgtgacaacgtgaaggtggtggtgcgctgccggcccctgaatgaaagagagaagtccatgtgctacaagcaggccgtgtctgtggatgagatgaggggcaccatcaccgtgcacaagacagacagcagcaatgaaccacccaagaccttcacctttgacacagtgtttggacctgagagcaagcagctggatgtgtacaacctgacagcccggcccatcattgattctgtgctggagggctacaacggcaccatctttgcctacggccagacaggcaccgggaagaccttcaccatggagggcgtgcgggccatccctgagctgcggggcatcatccccaacagctttgcccacatcttcggccacatcgccaaggccgagggggacacccgcttcctggtgcgggtgtcctacctggagatctacaatgaggaggtgcgggacctgctgggcaaggaccagacccagaggctggaggtgaaggagaggccagatgtgggcgtgtacatcaaggacctgagcgcctacgtggtgaacaatgctgatgacatggaccgcatcatgaccctgggccacaagaacagatctgtgggcgccaccaacatgaatgagcacagcagccgcagccacgccatcttcaccatcaccattgaatgttctgagaagggcattgatggcaacatgcacgtgaggatgggcaagctgcacctggtggacctggccggcagcgagcggcaggccaagacaggagccaccggccagaggctgaaggaggccaccaagatcaacctgagcctgagcaccctgggcaatgtcatcagcgccctggtggatggcaagagcacccacgtgccctacagaaacagcaagctgacccggctgctgcaggacagcctgggcggcaacagcaagaccatgatgtgtgccaacatcggccctgctgactacaactatgatgagaccatcagcaccctgcgctatgccaacagagccaagaacatcaagaacaaggcccgcatcaatgaagaccccaaggatgccctgctgcggcagttccagaaggagattgaggagctgaagaagaagctggaggagggggaggagatcagcggcagtgacatcagcggcagcgaggaggatgatgatgaggagggggaggtgggggaggatggagagaagaggaagaagaggcgggaccaggccggcaagaagaaggtgtccccagacaagatgattgagatgcaggccaagattgatgaggagaggaaggccctggagaccaagctggacatggaggaggaggagaggaacaaggcccgggcagagctggagaagcgggagaaggacctgctgaaggcccagcaggagcaccagagcctgctggagaagctgagcgccctggagaagaaggtgattgtgggcggcgtggacctgctggccaaggccgaggagcaggagaagctgctggaggagagcaacatggagctggaggagaggaggaagagagctgagcagctgcggcgggagctggaggagaaggagcaggagcggctggacatcgaggagaagtacaccagcctgcaggaggaggcccagggcaagaccaagaagctgaagaaggtgtggaccatgctgatggccgccaagtctgagatggctgacctgcagcaggagcaccagcgggagattgagggcctgctggagaacatccggcagctgagccgggagctgcggctgcagatgctgatcatcgacaacttcatcccccgggactaccaggagatgattgagaactacgtgcactggaatgaagatattggagagtggcagctgaagtgtgtggcctacacaggcaacaacatgaggaagcagacccctgtgcctgacaagaaggagaaggacccctttgaggtggacctgagccacgtgtacctggcctacacagaggagagcctgcggcagagcctgatgaagctggagcggcccaggaccagcaagggcaaggcccggcccaagacaggccgcaggaagaggtctgccaagccagagaccgtgattgacagcctgctgcagtag

SEQ ID NO: 112667 - DNA, 2109 bp, Artificial Sequence
  derived and/or modified sequence
atgcccatcaacaagagcgagaagcccgagagctgcgacaacgtgaaggtagtggtacgatgcaggccccttaatgagcgggaaaagtccatgtgctacaagcaggccgtttccgtggacgagatgcgcggcacaattactgttcacaagacagatagtagcaacgagccccccaaaacgttcacgtttgatactgtgttcgggcctgaatctaaacagctcgatgtgtacaaccttaccgcccggccaatcattgattccgtgctcgaggggtacaacgggaccattttcgcttacggccagacggggacaggaaagacatttaccatggagggcgtgcgagccattcccgagttacgcggcatcattcccaactcatttgctcatatttttggacatatcgcaaaggctgagggtgacacacggtttttggtccgagtctcatatctggagatctacaacgaggaggtgagagacctgttgggtaaggaccagacccaacgactcgaggtcaaggaaaggcccgacgtgggcgtgtacatcaaggacctgtccgcgtatgtggttaacaacgccgatgatatggatcgcattatgacactggggcataagaatcggtcagtgggcgccacgaacatgaacgaacactccagccgcagccatgctatcttcacgatcacgatagaatgtagtgagaaggggatcgacggaaacatgcatgtccggatgggcaaattgcaccttgttgacctggcgggttcggagcgacaggctaagactggcgccacaggacagagactgaaggaggcaactaaaatcaatctctctctgtccaccttgggaaatgtaatctctgccctcgtggacggaaaatctacccacgtcccttacagaaacagcaagctgacaaggctactacaggattccctaggtggcaattcgaagacaatgatgtgcgcgaatattggaccagccgactacaactacgacgaaacaattagcaccctgcgatacgctaatcgagcaaagaacattaaaaataaagcaagaattaacgaggacccgaaggatgccttattgcgccagtttcagaaggaaatcgaagagcttaaaaaaaaattagaggaaggagaggagatctccggctcagacatttccggaagcgaagaagatgatgacgaagaaggagaggttggcgaggatggagaaaaaaggaaaaaaaggcgggatcaggccggtaagaagaaggtgagcccagacaagatgatcgaaatgcaggccaaaatagatgaggagcggaaggccctggaaaccaaattggatatggaagaggaagagaggaataaggcccgcgccgagctggagaaacgcgagaaagatctgctcaaggcccaacaggagcaccagtccttacttgagaagctctcagctctggagaaaaaggttatcgtcggcggggtcgatttgcttgcgaaggccgaagaacaggaaaaattgctggaggagagcaacatggagctggaggaaagacgaaagcgggctgagcagttgagaagggagctcgaagagaaggaacaggagcgcctggatatcgaggaaaagtatacttcactccaggaagaagcccaaggtaagacaaagaaacttaagaaagtgtggaccatgctgatggccgctaaatctgaaatggccgacctgcaacaggagcaccagcgcgagattgaagggctgctggagaacatccgtcagctctctagggaactgcgattgcagatgttgatcattgataatttcatccctcgcgattatcaagagatgattgaaaactatgtgcattggaacgaggacattggggagtggcaactcaagtgcgtggcctataccggaaataatatgaggaagcaaacccccgttccggataaaaaggagaaggatccattcgaagtggacctctctcacgtatacttggcctataccgaggagtcactccggcagagcctaatgaagttagagcgtcccagaacaagtaaaggaaaggcccgccccaaaacaggccgtcgcaaaaggtccgccaaacccgagactgtgatcgatagtctactgcagtag

SEQ ID NO: 112668 - DNA, 2109 bp, Artificial Sequence
  derived and/or modified sequence
atgccaattaacaaaagcgaaaagccagaatcctgcgacaacgtcaaggtggtagttagatgtagaccccttaatgaacgcgaaaaatccatgtgttataagcaggctgtcagcgtcgatgaaatgagggggaccattacagtgcataaaacagattcttcaaacgagccaccgaagacctttacatttgatacagtgtttggtcctgagtccaagcaactggacgtgtacaacctgactgctcggccaattatcgacagcgtcttagagggctacaatggcacgatcttcgcatatggacaaacagggactggcaaaaccttcaccatggagggggtcagggcaattcctgagctgaggggaattatccccaattctttcgcccacatctttgggcatatagccaaggctgaaggcgataccaggttcttggtgagagtatcataccttgagatttacaacgaggaagttagggacctgcttggaaaagatcagacacagcggctggaggtcaaagaacgacccgatgtgggggtgtatataaaggatttgtcagcctacgttgtgaacaatgctgatgatatggacaggataatgacattaggccacaaaaatcggagcgtcggagctacaaacatgaacgagcactccagccgctcacatgctatctttacgatcacaatcgaatgttctgagaaagggatcgacggcaatatgcacgtcaggatgggtaagttgcatctggtcgatctggctggaagcgaaagacaggccaagacaggggctaccggccagcggttgaaggaagcgaccaagatcaacctttccctgtcaaccctgggaaacgtgattagcgccctcgtggacgggaagtctactcatgttccttaccgtaatagcaaattaacccggttgctgcaggatagtcttggcggaaacagtaagacaatgatgtgcgctaatatagggcctgccgattataattacgatgaaacaatctctacactccgctacgccaacagggctaaaaatataaaaaataaagccagaattaacgaagaccctaaggatgctttgttgagacagtttcagaaagaaattgaagaattaaaaaaaaaactcgaagagggcgaagagatcagtgggtccgacatcagcggctcagaagaagatgatgatgaagagggtgaagttggagaagatggagaaaaacggaagaaaagaagggatcaagctgggaagaagaaagtgtcccctgataaaatgatcgaaatgcaggctaaaatcgacgaggagagaaaggctctggagactaagctcgatatggaggaggaggaaagaaacaaggctcgcgcagaattagaaaagagggagaaggatctcttaaaagcccaacaagagcaccagagcctcttagagaaactctcggcgctggaaaagaaggtgatagtgggcggtgttgaccttcttgctaaggccgaagagcaagagaaactgctcgaagagagtaatatggaattggaagaaagacgcaagagggctgagcagttacgcagagagcttgaagaaaaggagcaggagcgcttggacattgaggaaaaatataccagtctccaggaggaagcacagggcaagacaaagaaactgaagaaagtgtggactatgctcatggccgcaaagtctgagatggccgatttacagcaggagcatcagcgcgagatcgagggcctgctggagaacattcgccagctgtcccgagaactgagactgcagatgttgatcatcgacaatttcattccacgagattaccaggagatgattgagaattatgtacactggaacgaagacattggcgaatggcaactcaagtgtgtcgcctacaccggaaataacatgagaaagcagactccagtaccagacaagaaggagaaggatccattcgaagtggatctttcccatgtgtacctggcatacaccgaggagtcactgcgccagagtctgatgaaactcgaacgccctagaacttcgaaggggaaggcacggccaaagacaggtcgcaggaagaggtcagccaaaccagagaccgtgatcgactcactattacagtag

SEQ ID NO: 112669 - DNA, 3266 bp, Artificial Sequence
  derived and/or modified sequence
cggctgcgcactgggcgctctcgcccgagaagccgcagtctcgagagcgtcaacgaggtgtttcggtagtctctggccatcctttctgcgcacccggtgtcgctgggctgcaccccgggcggggacgtccgccgggcacgggagggggccaagatgccgatcaataaatcagagaagccagaaagctgcgataatgtgaaggttgttgttaggtgccggcccctcaatgagagagagaaatcaatgtgctacaaacaggctgtcagtgtggatgagatgaggggaactatcactgtacataagactgattcttccaatgaacctccaaagacatttacttttgatactgtttttggaccagagagtaaacaacttgatgtttataacttaactgcaagacctattattgattctgtacttgaaggctacaatgggactatttttgcatatggacaaaccggaacaggcaaaacttttaccatggaaggtgttcgagctattcctgaacttagaggaataattcccaattcatttgctcacatatttggtcatattgcaaaagcggagggtgatacaagatttttggttcgagtgtcttatttggaaatatataatgaagaagttcgtgaccttttgggcaaggatcagacacaaaggttagaggttaaagaaagacctgatgtgggagtttatatcaaagatttatcagcttatgtggtaaataatgctgatgatatggatagaattatgacgctaggccacaaaaatcgttctgttggtgcaactaatatgaacgaacatagttcccgttcccatgccatctttacaattactatagaatgcagtgaaaaaggcattgatggtaacatgcatgtcaggatggggaagctccatcttgtagatcttgctggttcagaaagacaggcaaaaactggagctactggacagcgcctaaaggaagctacaaaaatcaatctttcactttccacccttggtaatgtaatttctgccttggttgatggaaaaagcactcatgtgccttatcgtaactctaaactgactcgtcttcttcaggattccttaggaggaaattcaaaaaccatgatgtgtgcaaatattgggccagcagattacaattatgatgaaactatcagtacattacggtatgccaatcgtgctaagaatattaaaaataaagctagaattaatgaagatccaaaggatgctttgctgcgtcagttccagaaagaaatagaagaactgaaaaagaagcttgaagaaggagaagaaatatcaggctctgatatcagtgggtcagaggaagatgatgatgaagagggtgaggttggagaagatggagagaaaaggaaaaaaagaagggatcaagcaggaaaaaagaaagtctccccagacaagatgattgaaatgcaagcaaaaattgatgaggagagaaaagcacttgaaacaaagctcgacatggaagaagaagaaagaaacaaggctagagctgaattagagaaacgggaaaaagatcttcttaaagcccaacaagagcatcagtctttgctggaaaaattatctgccctggaaaagaaggtaattgttggtggggttgacttgttggccaaagctgaggaacaagagaaacttcttgaagaatctaacatggaactggaagaaaggaggaaaagagcagagcaacttcgcagagaacttgaggaaaaagagcaagaacgcttggatattgaagaaaaatataccagtttgcaagaggaagcacagggaaagaccaagaagttaaagaaagtttggactatgctgatggctgcaaagtcagagatggctgatctccaacaagaacatcagagggaaattgaaggcctactggagaacattcggcaacttagccgggagcttcgacttcagatgcttattattgataactttatacctcgggattatcaggaaatgattgaaaactatgtccattggaatgaagacataggagaatggcagctaaaatgtgttgcttatacaggaaataacatgaggaagcaaaccccagtacctgataaaaaggagaaagatccctttgaggtggacctttctcacgtgtatcttgcctatactgaggagagtctgcgtcagtctttgatgaaactagaaagaccacgaacttcaaaggggaaagcaaggccaaagacagggagaagaaagcgttctgcaaagcctgaaactgtaattgactctttactgcagtaaatgttacagacttaaagtcacaataaaaattagtgatattctcatgcctggacaaaatctttaattaaaacagtgaagacttctctataatttcaattaatggaagttgtagatcaatgaataagactggaaataataatttgcttaagaacttttagtctacatatattaatataacattaaaattgtacaactggtgattgttcaaattgttgtactactactcttcaattgtactgtgcagggaagttgggggaacagttcatactatagagagttacagtttagatgtatgtgtaaatcgattagctatttatccaactactgtatatttaggtaactagaatttcaaaatagaaaaaaaaaaactgtgtcctgttttgcacatagaaagaagcagatcagattgtcctatgttgcgctgttatatatgaatgtttggactgtacatctaaagaatgattccgtcctaacacccacccagcctgtttgaacacattctaattgtctaacatttgttgcattttaagtatgagatgactgatcttatgaatgttttgtagaaaatgttataatttaacagtctttgcgagtatacatgttttttaacaagttgaaaatgtttcatctgaacctttcctaacttttttttgccagtttgagttcaaatcaaatacaccttaagttctggtttcatgttctcttgaaacattgaattgtacgtaaatataaaggatctactgttgcggaaaattaagaagctaaatactgctcagttatctttgcctgcgtgtatatttttaaaaattcactctgaagtgttatggatgcttttctttgagttctaaattttggtgggaattactttatgtctcccagttaagaagagtctccattttccagaaaatacagctaagcaagaaaaatatcttttaaatactttgcctttaaaacacttttttattttgtttttctattttaaaaataaaatattattttctgaa

SEQ ID NO: 112670 - DNA, 387 bp, Artificial Sequence
  derived and/or modified sequence
atgttcgacgtaacttcccgggtgacttacaaaaacgttcccaactggcatagagatttagtccgagtatgcgagaacattcctatagttctgtgcggtaataaagtggatataaaggaccgaaaagtgaaagctaaatcaatagtattccataggaagaagaacttacagtactatgatatctctgccaagagcaattacaacttcgaaaagcctttcctttggttagcgaggaagctgattggggatcccaaccttgagttcgttgccatgcccgctttagcaccccccgaagtagtcatggacccggctcttgccgctcagtacgaacacgaccttgaggttgctcagactaccgccttgccggatgaggacgacgacttgtag

SEQ ID NO: 112671 - DNA, 387 bp, Artificial Sequence
  derived and/or modified sequence
atgtttgacgtgacgagtagagttacttacaagaatgttccaaattggcacagggatttagtgcgagtttgcgagaacattccaattgttctttgtggcaataaggtggatatcaaggacaggaaagtaaaagctaaaagcatcgtttttcaccggaaaaagaatctacagtactatgacattagtgccaagagcaactataactttgaaaaacccttcctgtggctcgcccggaagctgataggcgaccccaatctcgagtttgtcgccatgccagccttagcccctccagaggttgttatggatcccgcgttggcggctcagtacgaacacgaccttgaggtcgcccaaaccaccgccctgccagacgaggacgacgacctatag

SEQ ID NO: 112672 - DNA, 387 bp, Artificial Sequence
  derived and/or modified sequence
atgtttgatgtgaccagccgggtgacctacaagaatgtgcccaactggcaccgggacctggtgcgggtgtgtgagaacatccccatcgtgctgtgtggcaacaaggtggacatcaaggacaggaaggtgaaggccaagagcatcgtgttccacaggaagaagaacctgcagtactatgacatcagcgccaagagcaactacaactttgagaagcccttcctgtggctggccaggaagctgattggagaccccaacctggagtttgtggccatgcctgccctggcccctcctgaggtggtgatggaccctgccctggccgcccagtatgaacatgacctggaggtggcccagaccacagccctgcctgatgaagatgatgacctgtag

SEQ ID NO: 112673 - DNA, 387 bp, Artificial Sequence
  derived and/or modified sequence
atgttcgacgtgaccagccgggtgacctacaagaacgtgcccaactggcaccgggatctggtccgggtgtgtgaaaatattcccattgtcttatgcggcaacaaggttgatattaaagacaggaaagtgaaagctaagtctattgtcttccacagaaaaaaaaatctgcagtattacgatatttccgcaaagtccaactataatttcgagaaacctttcctgtggctagcgaggaagttaatcggcgacccaaaccttgagttcgtggcgatgcctgctcttgctcccccagaggtagtaatggacccagccctcgcggctcagtacgagcacgacttagaggttgcccaaacaaccgcgctgccagacgaggacgatgatctatag

SEQ ID NO: 112674 - DNA, 387 bp, Artificial Sequence
  derived and/or modified sequence
atgttcgacgtgaccagccgggtgacctacaagaacgtgcccaactggcaccgtgatcttgtcagggtttgcgaaaacattcctatagttctttgcggcaacaaagtcgacatcaaggatcggaaagtcaaggcaaaaagcattgtttttcacagaaaaaagaacctccagtactatgatatcagtgccaaaagcaattacaatttcgagaagcccttcctatggctcgccagaaaacttatcggcgaccccaatctcgagtttgtggcgatgccagctctcgctccgcccgaggtggttatggatccagctttggcggctcagtacgagcatgacctcgaggttgcccagacaactgccctgcccgacgaggatgatgacctttag

SEQ ID NO: 112675 - DNA, 387 bp, Artificial Sequence
  derived and/or modified sequence
atgtttgatgtgacctctcgagtgacttacaagaatgttcctaattggcatcgcgacctcgtgagggtttgtgagaatattccaattgtcttgtgcgggaacaaagttgatatcaaagaccggaaggtgaaggctaagtctatcgtcttccaccgcaaaaaaaatctgcagtattatgatatcagcgccaaatccaactataattttgagaaaccgttcctgtggctggctcgcaagcttattggcgatccgaacctcgagtttgtcgccatgccagcgctggcacccccagaggtggtgatggacccagcactggcagcccaatatgagcacgacttggaagtcgctcagactactgccttaccagacgaagacgacgatctgtag

SEQ ID NO: 112676 - DNA, 387 bp, Artificial Sequence
  derived and/or modified sequence
atgtttgatgtcacgtctagggtcacctataagaatgtacctaactggcacagggatctagtcagagtgtgcgagaacattccgatcgtactgtgcgggaataaggtcgatattaaggaccgaaaagtgaaggcaaaaagcatagtgtttcatagaaagaagaaccttcagtactatgatattagcgccaaatccaattataacttcgagaagccatttttatggctcgcccgaaagctcattggcgacccaaatctggagtttgttgccatgcccgcactggcccctcctgaagtggttatggacccggcactcgcagcccaatatgagcatgacctggaggtcgcccagacaactgcgctaccggatgaggacgacgatctgtag

SEQ ID NO: 112677 - DNA, 387 bp, Artificial Sequence
  derived and/or modified sequence
atgttcgacgtgaccagcagagtgacctacaagaacgtgcccaactggcacagagacctggtgagagtgtgcgagaacatccccatcgtgctgtgcggcaacaaggtggacatcaaggacagaaaggtgaaggccaagagcatcgtgttccacagaaagaagaacctgcagtactacgacatcagcgccaagagcaactacaacttcgagaagcccttcctgtggctggccagaaagctgatcggcgaccccaacctggagttcgtggccatgcccgccctggccccccccgaggtggtgatggaccccgccctggccgcccagtacgagcacgacctggaggtggcccagaccaccgccctgcccgacgaggacgacgacctgtag

SEQ ID NO: 112678 - DNA, 714 bp, Artificial Sequence
  derived and/or modified sequence
atgggcagaaagagcagcaaggccaaggagaagaagcagaagagactggaggagagagccgccatggacgccgtgtgcgccaaggtggacgccgccaacagactgggcgaccccctggaggccttccccgtgttcaagaagtacgacagaaacggcctgaacgtgagcatcgagtgcaagagagtgagcggcctggagcccgccaccgtggactgggccttcgacctgaccaagaccaacatgcagaccatgtacgagcagagcgagtggggctggaaggacagagagaagagagaggagatgaccgacgacagagcctggtacctgatcgcctgggagaacagcagcgtgcccgtggccttcagccacttcagattcgacgtggagtgcggcgacgaggtgctgtactgctacgaggtgcagctggagagcaaggtgagaagaaagggcctgggcaagttcctgatccagatcctgcagctgatggccaacagcacccagatgaagaaggtgatgctgaccgtgttcaagcacaaccacggcgcctaccagttcttcagagaggccctgcagttcgagatcgacgacagcagccccagcatgagcggctgctgcggcgaggactgcagctacgagatcctgagcagaagaaccaagttcggcgacagccaccacagccacgccggcggccactgcggcggctgctgccactag

SEQ ID NO: 112679 - DNA, 594 bp, Artificial Sequence
  derived and/or modified sequence
atgcccttcgtgcccaagtggaccctgcccaccggcctgaacgtgagcatcgagtgcaagagagtgagcggcctggagcccgccaccgtggactgggccttcgacctgaccaagaccaacatgcagaccatgtacgagcagagcgagtggggctggaaggacagagagaagagagaggagatgaccgacgacagagcctggtacctgatcgcctgggagaacagcagcgtgcccgtggccttcagccacttcagattcgacgtggagtgcggcgacgaggtgctgtactgctacgaggtgcagctggagagcaaggtgagaagaaagggcctgggcaagttcctgatccagatcctgcagctgatggccaacagcacccagatgaagaaggtgatgctgaccgtgttcaagcacaaccacggcgcctaccagttcttcagagaggccctgcagttcgagatcgacgacagcagccccagcatgagcggctgctgcggcgaggactgcagctacgagatcctgagcagaagaaccaagttcggcgacagccaccacagccacgccggcggccactgcggcggctgctgccactag

SEQ ID NO: 112680 - DNA, 714 bp, Artificial Sequence
  derived and/or modified sequence
atggggcgaaaaagctccaaggccaaggaaaagaagcagaagcgcctagaagaacgagctgccatggatgccgtgtgcgctaaggtcgacgcagccaatagactcggcgaccccctggaggctttccctgtcttcaagaagtacgaccgtaatggtttaaacgtttctatagaatgtaagagggtctctggcctcgagccagccactgtcgactgggcttttgacctgactaaaactaacatgcagacaatgtacgagcagtccgagtggggctggaaggatagggagaaacgggaggagatgactgacgaccgagcctggtatctgatcgcttgggagaactctagcgtgcccgtcgcgttctcccactttagatttgatgttgagtgtggggacgaagttctgtattgttacgaggtacaattggagagtaaagtacgtagaaaaggcctgggcaaattcctcatacaaatcctgcaactgatggcgaattctacccagatgaaaaaagtgatgttaacagtctttaagcataaccacggcgcctatcagttcttccgagaagccctgcagtttgaaatcgatgacagctctccaagcatgagcggctgctgcggagaggattgcagctacgagattctgtcgaggaggacgaagtttggggacagccaccactctcacgctggcgggcattgcggaggatgctgccattag

SEQ ID NO: 112681 - DNA, 594 bp, Artificial Sequence
  derived and/or modified sequence
atgcctttcgtgcccaagtggacactgcctaccggactgaacgttagcatcgaatgcaagcgggtctccggcttggaacccgccacagtggactgggcattcgacctgactaagaccaacatgcagactatgtacgagcagagtgaatggggctggaaagaccgcgaaaaaagagaggagatgacagacgatcgcgcatggtacctgattgcttgggagaacagcagtgtaccagtggcctttagtcacttcagatttgatgttgagtgcggtgatgaggttctgtattgctatgaggttcagcttgagagcaaagtccgaaggaagggcttaggcaagtttctgattcagatacttcaacttatggcgaatagtacccagatgaaaaaagtaatgctaactgtcttcaagcataaccacggggcctaccagttctttagagaagcccttcaattcgaaatcgatgatagttcccccagcatgagcgggtgttgtggagaagactgcagctatgagatcttatccaggcgtactaagttcggggattcccaccactcccatgcaggggggcattgtggcggctgctgtcattag

SEQ ID NO: 112682 - DNA, 714 bp, Artificial Sequence
  derived and/or modified sequence
atgggcaggaagagcagcaaggccaaggagaagaagcagaagaggctggaggagcgggccgccatggatgctgtgtgtgccaaggtggatgctgccaaccggctgggggaccccctggaggccttccctgtgttcaagaagtatgacagaaatggcctgaatgtgtccattgagtgcaagagggtgtctggcctggagcccgccaccgtggactgggcctttgacctgaccaagaccaacatgcagaccatgtatgagcagagcgagtggggctggaaggaccgggagaagcgggaggagatgacagatgaccgggcctggtacctgattgcctgggagaacagctctgtgcctgtggccttcagccacttccgctttgatgtggagtgtggagatgaggtgctgtactgctatgaggtgcagctggagagcaaggtgcggaggaagggcctgggcaagttcctgatccagatcctgcagctgatggccaacagcacccagatgaagaaggtgatgctgaccgtcttcaagcacaaccacggggcctaccagttcttccgggaggccctgcagtttgaaattgatgacagcagccccagcatgagcggctgctgcggggaggactgcagctatgagatcctgagcaggaggaccaagtttggagacagccaccacagccacgccggcggccactgcggcggctgctgccactag

SEQ ID NO: 112683 - DNA, 594 bp, Artificial Sequence
  derived and/or modified sequence
atgccctttgtgcccaagtggaccctgcccaccggcctgaatgtgtccattgagtgcaagagggtgtctggcctggagcccgccaccgtggactgggcctttgacctgaccaagaccaacatgcagaccatgtatgagcagagcgagtggggctggaaggaccgggagaagcgggaggagatgacagatgaccgggcctggtacctgattgcctgggagaacagctctgtgcctgtggccttcagccacttccgctttgatgtggagtgtggagatgaggtgctgtactgctatgaggtgcagctggagagcaaggtgcggaggaagggcctgggcaagttcctgatccagatcctgcagctgatggccaacagcacccagatgaagaaggtgatgctgaccgtcttcaagcacaaccacggggcctaccagttcttccgggaggccctgcagtttgaaattgatgacagcagccccagcatgagcggctgctgcggggaggactgcagctatgagatcctgagcaggaggaccaagtttggagacagccaccacagccacgccggcggccactgcggcggctgctgccactag

SEQ ID NO: 112684 - DNA, 714 bp, Artificial Sequence
  derived and/or modified sequence
atgggccggaagagcagcaaggccaaggagaagaagcagaagcggttggaggaaagagccgccatggacgctgtatgtgctaaggttgatgcagctaatcgtctcggcgatcccctagaagccttcccagttttcaagaagtacgacaggaacggactgaacgtctcgatcgaatgcaagcgggtgagtggcctcgagcctgccacagtcgattgggcattcgacctgacaaagacaaacatgcaaacaatgtacgagcaatcagagtgggggtggaaggatcgggagaaaagggaggagatgaccgacgaccgtgcctggtacctgattgcctgggaaaactccagcgtacctgtcgccttttcccacttcagattcgatgtagagtgcggtgacgaggtcctgtattgttacgaagttcaactcgaatctaaagtgcgccggaaaggtctgggtaagttcctgattcagatccttcagctgatggcaaattccacacaaatgaagaaagtgatgctgacagtattcaagcacaaccatggcgcttatcagtttttccgtgaggctctgcagttcgaaatcgacgacagctcccctagtatgagtggctgttgcggagaggactgtagctacgagattctgagtaggcgcacaaagtttggagactctcaccattcccacgctggcgggcactgcggtggatgttgtcactag

SEQ ID NO: 112685 - DNA, 594 bp, Artificial Sequence
  derived and/or modified sequence
atgcccttcgtgcccaagtggaccctgcccaccggcctgaacgtgtccatcgagtgcaaaagagtaagtggtctcgaaccagcaaccgtcgattgggctttcgatcttactaaaacaaacatgcagaccatgtacgaacaatccgaatggggatggaaagatcgagagaagagggaggaaatgactgacgatagagcatggtatctcattgcctgggaaaattcgtcagtcccagtagcattctcccacttccggttcgatgtagaatgcggcgatgaggtactgtactgttacgaggtgcagttagaaagtaaagtaagaaggaaggggttgggtaaattccttatccaaattctccaattaatggccaactcaacccagatgaaaaaggtcatgcttaccgtgttcaagcataatcacggcgcataccaattcttccgagaagccttacagttcgaaatcgacgacagtagcccctccatgagcggatgctgtggagaagactgttcatacgaaatcctgagcagaagaaccaaattcggagattcccatcattctcacgctgggggtcattgcggcggttgttgccactag

SEQ ID NO: 112686 - DNA, 3664 bp, Artificial Sequence
  derived and/or modified sequence
agggccgtccgctctgctgccgccgctgttgcagccaccgccgttgccgcctccctgccggcaagtgtgtgaagaagaagctgagcgttgtcgccgccgctatggggagaaagtcaagcaaagccaaggagaagaagcagaagcggttggaggagcgagcagccatggatgccgtttgtgccaaagtggacgctgccaacaggcttggagaccctctggaggctttcccagtgttcaagaaatatgatagaaacgggttgaatgtctccattgaatgtaagcgagtgtctggactggagccagccaccgtggattgggccttcgacctgaccaaaacgaatatgcaaaccatgtatgagcagagcgagtggggctggaaggaccgagagaaacgggaggaaatgacagatgaccgagcctggtacctcatcgcgtgggaaaacagctccgtccctgttgccttttctcacttccggtttgacgtggagtgtggggatgaagtcctgtactgctatgaagtgcagttggaaagcaaggtgcggcggaaaggcctggggaagttcctcatacagatcctgcagctcatggccaacagcacacagatgaagaaggttatgttaacagtatttaaacacaatcatggtgcctaccagttcttcagagaagcgttgcaatttgaaattgatgactcttcccccagcatgtccggttgctgtggggaggattgctcctatgagatcctgagccggaggaccaagtttggggacagccatcactcccacgcgggtgggcactgtggtggctgctgccactgaactctcagagccactttcaagtcacaatgctctctcctaaggcctttcctctttcctggtctcactgttcaccgggtgtcctcagagctgtggcctccccagccctgcacgtgccaggctgcgccctgagagcacagaaccctggggagaagtggtatcagctgctcctcctctcctaggagaccagagtgctagaagggaatgaaagggagagggaagagtaggtggggccgggcagtgaagctcatcctccacagtggctgcctcctcatttggctcctggggcctgcagtggaggttctcgcacctctgcagcccctagattcctggcaacctcccctcccctgacacatacacacttggacaaatggaatgtttatgtccacctttatgaaagttctggagtcctgggtctggggtttgctggtccccaaagaggaacacactgggtgtaagatctgggtgtagagggcggcttcagagagactcacgcttgcgcagttggaattgctgttaacggagactgggaagatcttttgtgccaagatgcagggaaatgaagaaagctctttccagctgtttttatggattcatggagtgggctcatgttgggaccagctgactctgggaggaagactgcctctccatcgctgtcagagagcctgaaaggaccaacaatgaggtgttcttgggacccgccatggggatgattgcttctctaggctcctggatgttgctgcattctaagcttaacctcctggtctcatggcagtgacttgagcttttgattcatagaagaaagccagaggttctgcttgttcttgtctgccagccctcgtcgttctttctcctctgcctctcacctctaccccaaatacctctgttcttagtctcaaggggagaataacatcagggagcccctcatcttccccagaaggacttctcgttcctcatgtagttaactccattgattttcctatcttggtgctgatagctctctaagggtagggcacacctccccacagccaccctccctcttcagagagcccccagccagcagcaggcccctctgcctgcactcctcaggcttgcccctcgctgcctcagtgaggcactagtgccactgccgtggcccagccgggccatagctcaggctgcagcagaaatgcctctcagtggccaacagttgcttttctctctggtgtcaccctgtggcaacaggctggagcaggggaaggagaaagccttcctcttctctcataggatagaaaggcaggctcagaactaatgctcatcctgatctctaggccttgttcctcttccagggaagaaaagccaaatccttatcaaggaaaaagcacctaacagctccctttggatatccctgagctctgctgtggggagtatcataaaggttctagccttcgtgaagttgttctcgtggaggtctgttggtccctctgacctcagcatctgctcacatcccaccctctgcccaactctggcagtctctcctggcagatctccccagagtggtccttgcttctcacctggattcctgcttgtgcaggagcctgtgtacacagggcctccctcacccagcctggcccctctgctgagcactttgcgctgctcttgatgggcagcagtgggactgggaactccttagagagggccttgcagctttacactggaataagtctgcctctgcctctgcctcaccctgctggctcctggtgggtttcatcccaggcagagttgacattgctggaggggtttggtggactcctaagaatcatgaaaccacaggagcatgtttaggaagagatttgtctctggtccctgtctctgaaaggacacagatgctaaatatttattgtcttagatcatggattcctgatacctctcactcaaggggaccaaaagggacccccccgtgttcatcccttgtaaggtgagttcagtctacgttgtctctttccagtcactggatacgtggcaccaactggtcaatgggtgcttggtgccataccctgctcaccctagtctctgcaggccatgtcctgaagggttcctcaggaggtcgggactagggtgggagaggcactatctgagacctgcaatcactcttgttggtcttgagcccattcatttccaaaacatccatctttctccacttcccccaggtcttggttttgagaaacagcaggcatggctgagtgcggtggcttacacctgtaatcccagcactttgggaggctgaggcaggcgggtcacctgaggtcaggagttcaagaccagcctggtcaacatggcaaaagcccatctctactaaaaaatacaaaaatcagccaggcgtggttgtggcctgtaatcccagctactcgggaggctgaggcaggagactcgcttgaacccaggaggtggaggttgtggtgagctgagatcacgccattgcactccagcctaggcgacagagtgagactccatctcaaaaaaaaaaaaaagagaaacatagcaggccttttttaccaggctttttgtgttttgtttgtttgtttggagcatgttaagatttttttaagatttttaaaattttagttatatccaccctatttcaggttatttttgttggtgtcaagtatgtataggacatgtgaatggttctttttaatttttttttaagaggaaatttggaagataaactccttgatatatatatatatatatatatttttttttttctttagcagcttgttatcactggaatcaaagggaaaaagtgatctcttcttgcattggttgtatttgtatgtcacaaataaaagacactttggtcagctgctgag

SEQ ID NO: 112687 - DNA, 958 bp, Artificial Sequence
  derived and/or modified sequence
agggccgtccgctctgctgccgccgctgttgcagccaccgccgttgccgcctccctgccggcaagtgtgtgaagaagaagctgagcgttgtcgccgccgctatggggagaaagtcaagcaaagccaaggagaagaagcagaagcggttggaggagcgagcagccatggatgccgtttgtgccaaagtggacgctgccaacagggttgaatgtctccattgaatgtaagcgagtgtctggactggagccagccaccgtggattgggccttcgacctgaccaaaacgaatatgcaaaccatgtatgagcagagcgagtggggctggaaggaccgagagaaacgggaggaaatgacagatgaccgagcctggtacctcatcgcgtgggaaaacagctccgtccctgttgccttttctcacttccggtttgacgtggagtgtggggatgaagtcctgtactgctatgaagtgcagttggaaagcaaggtgcggcggaaaggcctggggaagttcctcatacagatcctgcagctcatggccaacagcacacagatgaagaaggttatgttaacagtatttaaacacaatcatggtgcctaccagttcttcagagaagcgttgcaatttgaaattgatgactcttcccccagcatgtccggttgctgtggggaggattgctcctatgagatcctgagccggaggaccaagtttggggacagccatcactcccacgcgggtgggcactgtggtggctgctgccactgaactctcagagccactttcaagtcacaatgctctctcctaaggcctttcctctttcctggtctcactgttcaccgggtgtcctcagagctgtggcctccccagccctgcacgtgccaggctgcgccctgagagcacagaaccctggggagaagtggtatcagctgctcctcctctcctaggagaccagagtgctaga

SEQ ID NO: 112688 - DNA, 714 bp, Artificial Sequence
  derived and/or modified sequence
atgggtagaaagtccagtaaagcgaaggagaagaagcaaaaacgcctggaggaacgcgctgcaatggacgcagtgtgtgccaaagttgacgccgctaacagattgggagacccattagaggctttcccggtgttcaagaagtatgaccgtaatggattaaacgtgtcaatagagtgcaaacgagtctctggactggagccggcaacagtggattgggcattcgacttgacaaagacaaatatgcaaaccatgtatgaacagtcagagtgggggtggaaagatcgggaaaaacgggaggaaatgacagacgatcgggcttggtatctaatcgcctgggaaaacagctctgtccctgtggcgtttagtcacttccgcttcgacgtcgaatgtggcgatgaggtattatattgctatgaagttcaactggaaagcaaggtgcgtcggaaaggcttaggcaaattcctaattcagatccttcaattgatggccaattccactcagatgaaaaaggtcatgttgaccgttttcaagcacaaccacggcgcatatcagttctttagagaggctttgcagttcgaaatcgacgatagctctccaagcatgtccggctgttgtggcgaggactgtagctacgagatattatcacgccgaacaaaattcggcgactctcaccactcacacgctggaggtcactgcgggggatgctgtcattag

SEQ ID NO: 112689 - DNA, 594 bp, Artificial Sequence
  derived and/or modified sequence
atgccctttgtacccaaatggactctccctaccggcctgaatgtttcaattgaatgcaaaagagtctctggactggaacctgccaccgtcgattgggccttcgatctcaccaagaccaacatgcagaccatgtatgagcagtccgaatgggggtggaaggatagagaaaagagggaggagatgacagacgaccgggcttggtatttgattgcctgggagaactccagcgtacctgtagcattcagtcactttagatttgacgtggaatgtggcgacgaggttctgtattgctacgaagtgcagctggaaagcaaggttagaaggaagggactgggcaagttcctgattcagattctccagctcatggccaatagcacccagatgaagaaagtaatgttgacggtatttaaacacaatcatggggcttatcagttttttcgcgaggctctgcaattcgaaatcgacgattcctccccgtccatgtccggctgctgtggagaggactgttcttacgagatactgagtagacgtaccaaattcggcgattcgcaccacagccatgctggcggacactgcggtggctgttgccattag

SEQ ID NO: 112690 - protein, 765 aa, Artificial Sequence
  derived and/or modified sequence
MGDEDDDESCAVELRITEANLTGHEEKVSVENFELLKVLGTGAYGKVFLVRKAGGHDAGKLYAMKVLRKAALVQRAKTQEHTRTERSVLELVRQAPFLVTLHYAFQTDAKLHLILDYVSGGEMFTHLYQRQYFKEAEVRVYGGEIVLALEHLHKLGIIYRDLKLENVLLDSEGHIVLTDFGLSKEFLTEEKERTFSFCGTIEYMAPEIIRSKTGHGKAVDWWSLGILLFELLTGASPFTLEGERNTQAEVSRRILKCSPPFPPRIGPVAQDLLQRLLCKDPKKRLGAGPQGAQEVRNHPFFQGLDWVALAARKIPAPFRPQIRSELDVGNFAEEFTRLEPVYSPPGSPPPGDPRIFQGYSFVAPSILFDHNNAVMTDGLEAPGAGDRPGRAAVARSAMMQYELDLREPALGQGSFSVCRRCRQRQSGQEFAVKILSRRLEANTQREVAALRLCQSHPNVVNLHEVHHDQLHTYLVLELLRGGELLEHIRKKRHFSESEASQILRSLVSAVSFMHEEAGVVHRDLKPENILYADDTPGAPVKIIDFGFARLRPQSPGVPMQTPCFTLQYAAPELLAQQGYDESCDLWSLGVILYMMLSGQVPFQGASGQGGQSQAAEIMCKIREGRFSLDGEAWQGVSEEAKELVRGLLTVDPAKRLKLEGLRGSSWLQDGSARSSPPLRTPDVLESSGPAVRSGLNATFMAFNRGKREGFFLKSVENAPLAKRRKQKLRSATASRRGSPAPANPGRAPVASKGAPRRANGPLPPS

SEQ ID NO: 112691 - DNA, 1575 bp, Artificial Sequence
  derived and/or modified sequence
atgggcgacgaggacgacgacgagagctgcgccgtggagctgagaatcaccgaggccaacctgaccggccacgaggagaaggtgagcgtggagaacttcgagctgctgaaggtgctgggcaccggcgcctacggcaaggtgttcctggtgagaaaggccggcggccacgacgccggcaagctgtacgccatgaaggtgctgagaaaggccgccctggtgcagagagccaagacccaggagcacaccagaaccgagagaagcgtgctggagctggtgagacaggcccccttcctggtgaccctgcactacgccttccagaccgacgccaagctgcacctgatcctggactacgtgagcggcggcgagatgttcacccacctgtaccagagacagtacttcaaggaggccgaggtgagagtgtacggcggcgagatcgtgctggccctggagcacctgcacaagctgggcatcatctacagagacctgaagctggagaacgtgctgctggacagcgagggccacatcgtgctgaccgacttcggcctgagcaaggagttcctgaccgaggagaaggagagaaccttcagcttctgcggcaccatcgagtacatggcccccgagatcatcagaagcaagaccggccacggcaaggccgtggactggtggagcctgggcatcctgctgttcgagctgctgaccggcgccagccccttcaccctggagggcgagagaaacacccaggccgaggtgagcagaagaatcctgaagtgcagcccccccttcccccccagaatcggccccgtggcccaggacctgctgcagagactgctgtgcaaggaccccaagaagagactgggcgccggcccccagggcgcccaggaggtgagaaaccaccccttcttccagggcctggactgggtggccctggccgccagaaagatccccgcccccttcagaccccagatcagaagcgagctggacgtgggcaacttcgccgaggagttcaccagactggagcccgtgtacagcccccccggcagccccccccccggcgaccccagaatcttccagggctacagcttcgtggcccccagcatcctgttcgaccacaacaacgccgccgagatcatgtgcaagatcagagagggcagattcagcctggacggcgaggcctggcagggcgtgagcgaggaggccaaggagctggtgagaggcctgctgaccgtggaccccgccaagagactgaagctggagggcctgagaggcagcagctggctgcaggacggcagcgccagaagcagcccccccctgagaacccccgacgtgctggagagcagcggccccgccgtgagaagcggcctgaacgccaccttcatggccttcaacagaggcaagagagagggcttcttcctgaagagcgtggagaacgcccccctggccaagagaagaaagcagaagctgagaagcgccaccgccagcagaagaggcagccccgcccccgccaaccccggcagagcccccgtggccagcaagggcgcccccagaagagccaacggccccctgccccccagctag

SEQ ID NO: 112692 - DNA, 2298 bp, Artificial Sequence
  derived and/or modified sequence
atgggcgacgaggacgacgacgagagctgcgccgtggagctgagaatcaccgaggccaacctgaccggccacgaggagaaggtgagcgtggagaacttcgagctgctgaaggtgctgggcaccggcgcctacggcaaggtgttcctggtgagaaaggccggcggccacgacgccggcaagctgtacgccatgaaggtgctgagaaaggccgccctggtgcagagagccaagacccaggagcacaccagaaccgagagaagcgtgctggagctggtgagacaggcccccttcctggtgaccctgcactacgccttccagaccgacgccaagctgcacctgatcctggactacgtgagcggcggcgagatgttcacccacctgtaccagagacagtacttcaaggaggccgaggtgagagtgtacggcggcgagatcgtgctggccctggagcacctgcacaagctgggcatcatctacagagacctgaagctggagaacgtgctgctggacagcgagggccacatcgtgctgaccgacttcggcctgagcaaggagttcctgaccgaggagaaggagagaaccttcagcttctgcggcaccatcgagtacatggcccccgagatcatcagaagcaagaccggccacggcaaggccgtggactggtggagcctgggcatcctgctgttcgagctgctgaccggcgccagccccttcaccctggagggcgagagaaacacccaggccgaggtgagcagaagaatcctgaagtgcagcccccccttcccccccagaatcggccccgtggcccaggacctgctgcagagactgctgtgcaaggaccccaagaagagactgggcgccggcccccagggcgcccaggaggtgagaaaccaccccttcttccagggcctggactgggtggccctggccgccagaaagatccccgcccccttcagaccccagatcagaagcgagctggacgtgggcaacttcgccgaggagttcaccagactggagcccgtgtacagcccccccggcagccccccccccggcgaccccagaatcttccagggctacagcttcgtggcccccagcatcctgttcgaccacaacaacgccgtgatgaccgacggcctggaggcccccggcgccggcgacagacccggcagagccgccgtggccagaagcgccatgatgcagtacgagctggacctgagagagcccgccctgggccagggcagcttcagcgtgtgcagaagatgcagacagagacagagcggccaggagttcgccgtgaagatcctgagcagaagactggaggccaacacccagagagaggtggccgccctgagactgtgccagagccaccccaacgtggtgaacctgcacgaggtgcaccacgaccagctgcacacctacctggtgctggagctgctgagaggcggcgagctgctggagcacatcagaaagaagagacacttcagcgagagcgaggccagccagatcctgagaagcctggtgagcgccgtgagcttcatgcacgaggaggccggcgtggtgcacagagacctgaagcccgagaacatcctgtacgccgacgacacccccggcgcccccgtgaagatcatcgacttcggcttcgccagactgagaccccagagccccggcgtgcccatgcagaccccctgcttcaccctgcagtacgccgcccccgagctgctggcccagcagggctacgacgagagctgcgacctgtggagcctgggcgtgatcctgtacatgatgctgagcggccaggtgcccttccagggcgccagcggccagggcggccagagccaggccgccgagatcatgtgcaagatcagagagggcagattcagcctggacggcgaggcctggcagggcgtgagcgaggaggccaaggagctggtgagaggcctgctgaccgtggaccccgccaagagactgaagctggagggcctgagaggcagcagctggctgcaggacggcagcgccagaagcagcccccccctgagaacccccgacgtgctggagagcagcggccccgccgtgagaagcggcctgaacgccaccttcatggccttcaacagaggcaagagagagggcttcttcctgaagagcgtggagaacgcccccctggccaagagaagaaagcagaagctgagaagcgccaccgccagcagaagaggcagccccgcccccgccaaccccggcagagcccccgtggccagcaagggcgcccccagaagagccaacggccccctgccccccagctag

SEQ ID NO: 112693 - DNA, 1575 bp, Artificial Sequence
  derived and/or modified sequence
atgggtgatgaggacgacgatgagtcatgtgccgtcgaacttaggatcaccgaagctaatttgaccgggcatgaagaaaaggtgagcgttgaaaattttgaactgttgaaagtgcttggaactggagcctatggaaaagtgtttctggtgcggaaggccggaggtcacgacgctggaaagctgtatgctatgaaagtgctcagaaaagcagccctcgtccaaagggcaaaaacccaagaacacacccgaacagaaaggtcagtcctcgagctcgtgagacaggccccctttttggtgactctgcattacgcattccaaactgatgcaaagttgcacctgattctggattacgtatctggtggggaaatgttcacccatttataccagcgacagtacttcaaggaggctgaagttagagtttacgggggggagatcgtgctcgccctcgagcacctgcacaagctaggtatcatttatagagacctgaagctggagaacgtgctgctggatagtgaaggccacattgttctgacagattttgggctgagcaaggaattcctgacagaagagaaggagcgcacattcagcttctgtggcacaattgagtacatggctcctgagattatccgatcgaaaaccggacacggtaaggcagtggactggtggtctctagggatcttgctatttgaactgctaacaggggcatccccctttactcttgagggagaacgaaatacacaggccgaggtctctagacgtattttgaagtgctcacctcctttccctccccggattggccccgttgctcaggacctgttacagcggttgctgtgcaaggatcccaagaagcggctgggggcaggaccacaaggtgcacaggaagtgagaaaccaccctttttttcagggccttgattgggttgccctggctgcccggaaaatacccgctccttttagacctcaaatcagatccgaactcgatgttggcaacttcgctgaggagttcactagactcgaaccagtttatagtccacctgggagtccaccccccggggatccgcgtatctttcagggatacagttttgtggcccccagcatcctgtttgatcacaacaacgccgcagaaattatgtgcaagatccgggaaggccgcttctcactagacggagaggcctggcaaggggttagcgaagaagccaaggaactagtgcggggattactgacggttgatccagccaagaggctgaagctggagggtttgcgagggtccagctggttgcaagacgggagtgctaggtcatctcccccacttcggactccagacgtgctggagagtagtgggcccgcagttagaagcggactgaacgctactttcatggccttcaataggggtaagcgcgaaggttttttcctgaagagtgtggaaaacgccccactggccaagcgacggaaacagaaacttcggtccgccaccgcttctagacgcgggtcaccagctcccgcaaatcctggtagagctccagtagcttcaaagggagctccacgaagggccaatggaccgttgccacctagttag

SEQ ID NO: 112694 - DNA, 2298 bp, Artificial Sequence
  derived and/or modified sequence
atgggggatgaggacgatgacgaatcatgtgcagtggaactgcgaatcaccgaggctaatctgacaggccacgaggagaaggtgtcggttgaaaacttcgaactacttaaggtgctcggaacgggcgcctacgggaaagtctttcttgttaggaaggccggaggtcatgatgccgggaagctgtatgccatgaaggttctaaggaaagccgctctagttcaaagagccaagactcaggaacacactagaacagagagaagcgtgttagaactggtccgccaggccccatttctagtgactctgcactacgcctttcagacggatgccaagcttcaccttatcctggactatgtgtcagggggagagatgtttacgcacctctaccagcggcaatacttcaaagaagccgaggtcagagtttatggcggagagattgtgctggctctggagcacttacataaactgggtattatctaccgcgacttgaagttggaaaacgtactactcgattcagaagggcacatcgtgcttacagactttggcttgtctaaagagttcttgaccgaggagaaggaaaggacgttctctttttgcggaaccatcgagtatatggccccagaaataatccgttctaaaacaggccatggcaaagctgtcgactggtggtcactaggcatccttctcttcgagcttctgacaggagcctctccattcaccctagagggggagcggaacacgcaggctgaggtgtccaggagaatcctgaagtgtagtccaccttttccacctagaattgggccagttgcacaggacctcttgcagagactgctgtgtaaagacccaaagaaacggctaggcgccgggccccagggtgcccaggaggtacggaatcacccattctttcagggtctggactgggtggcgctggcggctcgtaagattcctgccccctttcgcccccagatccggtccgagttagatgttggcaacttcgcagaagagttcacgcgcctggagcccgtctattccccgccaggaagccccccccctggcgatccacggatcttccagggttatagttttgtggccccatctatactgttcgaccataacaatgcggtaatgaccgatgggctggaggctcccggcgccggcgatagacccgggcgtgctgcagtcgcaagaagtgcaatgatgcagtatgagttggacttacgcgagccggcccttggtcagggcagcttttcggtgtgtagacgctgtcgccagaggcagtccgggcaagagttcgccgttaagatcctgagccggcgcttggaggccaacactcagagagaggtggccgccctcagactttgtcaatcacatccaaatgtggtaaatctccatgaggtacaccacgaccagctgcatacttatctggtcctagagctgctccggggcggggagttgctggagcacatcaggaaaaagagacatttcagcgaaagtgaggcctcccagattcttcgaagtctggtctcagctgtgtcgtttatgcatgaggaagcaggagtcgtgcatcgcgatttgaagcccgagaatattctatatgcagatgacaccccaggtgcgcctgtcaagatcattgacttcggattcgctcggctgcggccccagagtccaggggtaccaatgcaaaccccttgcttcaccctgcagtatgccgcccctgagctattggcccagcagggttatgacgagagctgcgacctctggtcgctgggcgtcattttgtacatgatgctgtcaggccaagtgccattccagggcgccagcgggcaggggggccaatcccaggctgccgagatcatgtgcaaaatccgggagggccgtttcagcctcgatggcgaagcatggcagggcgtcagcgaagaagccaaggagctcgttcggggcctgctcacagtcgatccagctaagcgcttaaaactggagggacttcgaggcagctcctggctccaggatggttcagcgcgaagtagcccccctttacggacacctgacgtgctcgagtccagtggccccgccgtccgcagcggactcaatgccacctttatggctttcaatagagggaaaagggaaggtttctttttaaaaagcgttgaaaacgcacctctggctaaacggaggaaacagaaactccgtagtgcgaccgcatcgcggcgggggagtcccgcacccgctaaccccggccgtgcacctgtagcttccaaaggggcccctcggcgggcgaacggacctctccccccttcctag

SEQ ID NO: 112695 - DNA, 1575 bp, Artificial Sequence
  derived and/or modified sequence
atgggagatgaagatgatgatgagagctgtgctgtggagctgcgcatcacagaggccaacctgaccggccacgaggagaaggtgtctgtggagaactttgagctgctgaaggtgctgggcactggagcctacggcaaggtgttcctggtgaggaaggccggcggccatgatgctgggaagctgtatgccatgaaggtgctgaggaaggccgccctggtgcagagggccaagacccaggagcacaccaggacagagaggtctgtgctggagctggtgcggcaggcccccttcctggtgaccctgcactacgccttccagacagatgccaagctgcacctgatcctggactatgtgtctggaggagagatgttcacccacctgtaccagaggcagtacttcaaggaggccgaggtgcgggtgtatggaggagaaattgtgctggccctggagcacctgcacaagctgggcatcatctacagagacctgaagctggagaatgtgctgctggacagcgagggccacatcgtgctgacagactttggcctgagcaaggagttcctgacagaggagaaggagaggaccttctccttctgtggcaccatcgagtacatggcccctgagatcatccgcagcaagacaggccacggcaaggctgtggactggtggagcctgggcatcctgctgtttgagctgctgactggagccagccccttcaccctggagggggagaggaacacccaggccgaggtgagccgccgcatcctgaagtgcagcccccccttccccccaagaattggccctgtggcccaggacctgctgcagaggctgctgtgcaaggaccccaagaagaggctgggcgccggcccccagggcgcccaggaggtgaggaaccaccccttcttccagggcctggactgggtggccctggccgccaggaagatcccagcccccttccggccccagatccgctctgagctggatgtgggcaactttgctgaggagttcacccggctggagcctgtgtacagccccccaggcagccccccacctggggacccccgcatcttccagggctacagctttgtggcccccagcatcctgtttgaccacaacaatgctgctgagatcatgtgcaagatccgggagggccgcttcagcctggatggagaggcctggcagggcgtgtctgaggaggccaaggagctggtgcggggcctgctgactgtggaccctgccaagaggctgaagctggagggcctgcggggcagctcctggctgcaggacggcagcgcccggagcagcccccccctgcggaccccagatgtgctggagagcagcggccctgctgtgcgcagcggcctgaatgccaccttcatggccttcaacagaggcaagcgggagggcttcttcctgaagtctgtggagaatgcccccctggccaagaggaggaagcagaagctgcggagcgccacagccagccggcggggcagccctgccccagccaaccctggccgggcccctgtggccagcaaaggagccccccggcgggccaacggccccctgccccccagctag

SEQ ID NO: 112696 - DNA, 2298 bp, Artificial Sequence
  derived and/or modified sequence
atgggagatgaagatgatgatgagagctgtgctgtggagctgcgcatcacagaggccaacctgaccggccacgaggagaaggtgtctgtggagaactttgagctgctgaaggtgctgggcactggagcctacggcaaggtgttcctggtgaggaaggccggcggccatgatgctgggaagctgtatgccatgaaggtgctgaggaaggccgccctggtgcagagggccaagacccaggagcacaccaggacagagaggtctgtgctggagctggtgcggcaggcccccttcctggtgaccctgcactacgccttccagacagatgccaagctgcacctgatcctggactatgtgtctggaggagagatgttcacccacctgtaccagaggcagtacttcaaggaggccgaggtgcgggtgtatggaggagaaattgtgctggccctggagcacctgcacaagctgggcatcatctacagagacctgaagctggagaatgtgctgctggacagcgagggccacatcgtgctgacagactttggcctgagcaaggagttcctgacagaggagaaggagaggaccttctccttctgtggcaccatcgagtacatggcccctgagatcatccgcagcaagacaggccacggcaaggctgtggactggtggagcctgggcatcctgctgtttgagctgctgactggagccagccccttcaccctggagggggagaggaacacccaggccgaggtgagccgccgcatcctgaagtgcagcccccccttccccccaagaattggccctgtggcccaggacctgctgcagaggctgctgtgcaaggaccccaagaagaggctgggcgccggcccccagggcgcccaggaggtgaggaaccaccccttcttccagggcctggactgggtggccctggccgccaggaagatcccagcccccttccggccccagatccgctctgagctggatgtgggcaactttgctgaggagttcacccggctggagcctgtgtacagccccccaggcagccccccacctggggacccccgcatcttccagggctacagctttgtggcccccagcatcctgtttgaccacaacaatgctgtgatgacagatggcctggaggcccctggggccggggaccggcccggccgggctgctgtggcccggagcgccatgatgcagtatgagctggacctgcgggagcccgccctgggccagggcagcttctctgtgtgccgccgctgccggcagaggcagagcggccaggagtttgctgtgaagatcctgagccggcggctggaggccaacacccagcgggaggtggccgccctgcggctgtgccagagccaccccaacgtggtgaacctgcacgaggtgcaccacgaccagctgcacacctacctggtgctggagctgctgcggggcggggagctgctggagcacatcaggaagaagaggcacttcagcgagagcgaggccagccagatcctgcggagcctggtgtctgctgtgtccttcatgcatgaggaggccggcgtggtgcaccgggacctgaagccagagaacatcctgtatgcagatgacacccctggggcccctgtgaagatcatcgactttggatttgcccggctgcggccccagagccctggggtgcccatgcagaccccctgcttcaccctgcagtatgctgcccctgagctgctggcccagcagggctatgatgagagctgtgacctgtggagcctgggcgtcatcctgtacatgatgctgagcggccaggtgcccttccagggcgccagcggccagggcggccagagccaggccgctgagatcatgtgcaagatccgggagggccgcttcagcctggatggagaggcctggcagggcgtgtctgaggaggccaaggagctggtgcggggcctgctgactgtggaccctgccaagaggctgaagctggagggcctgcggggcagctcctggctgcaggacggcagcgcccggagcagcccccccctgcggaccccagatgtgctggagagcagcggccctgctgtgcgcagcggcctgaatgccaccttcatggccttcaacagaggcaagcgggagggcttcttcctgaagtctgtggagaatgcccccctggccaagaggaggaagcagaagctgcggagcgccacagccagcagaagaggcagccctgccccagccaaccctggccgggcccctgtggccagcaagggggccccccggcgggccaacggccccctgccccccagctag

SEQ ID NO: 112697 - DNA, 1575 bp, Artificial Sequence
  derived and/or modified sequence
atgggcgacgaggacgacgacgagagctgcgccgtggagctgcggatcacagaggcgaatctcacaggacacgaagaaaaggtgtctgttgaaaattttgagctgctaaaggtcttaggaaccggagcctacggcaaagtctttctcgtacgtaaggccggtgggcacgacgccggcaagctgtacgctatgaaggtcctgaggaaggcggctctggtgcagcgggcaaaaacgcaagaacacacccgcactgagaggtctgtcctggaacttgtccggcaggccccgttcttggtaacgcttcactatgcattccagactgacgccaagcttcacctgatcctggattatgtcagcggcggcgagatgtttacgcacctctaccagcgccagtacttcaaagaagctgaagtacgggtctacggcggcgagatcgtcctggctctggagcacctacacaaattggggatcatatatagagacttgaaattggaaaatgtgctgctggattctgaagggcatattgtgctgaccgacttcgggctctcaaaagagtttctaacagaagagaaagagcgcaccttctcattctgtggaactatagagtacatggctcctgagatcattcgctctaagaccggacacggaaaagctgtggactggtggtcactgggtatactgctttttgaactgctgaccggggcctctcctttcaccctcgagggagagcggaatacgcaggcggaagtttcgaggcgaattctcaaatgcagtcctccgttcccccccagaattggcccagtagcacaggatctcctccagcgcttactctgcaaggaccctaagaaacgcttaggagccggtcctcaaggagcccaagaggtgagaaatcaccctttcttccagggactcgactgggtagccctggcagctcggaagatccccgctccattccggccccagatccgctccgagctggacgttggtaactttgcggaagaatttactcggctcgaaccagtctacagccctcctggttcccctcccccaggggaccctcgcatctttcaaggctactcgttcgtggctccttccattctgtttgaccacaataacgccgcagaaattatgtgtaaaattcgtgaaggacgtttctcacttgatggcgaggcttggcagggcgtcagcgaggaagccaaggagcttgtgagggggctgttgactgtggaccccgccaaacgcttaaagttggaggggctaagaggctcatcatggctgcaggatggcagtgcccgatcatccccccccttgcgaacacctgacgtgctggagtcttctggccctgctgtgaggtctggcctcaatgcgacattcatggcttttaatagaggtaaaagagaaggctttttcctgaagtctgttgaaaacgctcccttggccaagcgaaggaaacaaaagctcaggtctgccacagctagccgacgcggttcccctgcacctgcaaatccaggcagagcaccagtggcctctaaaggcgctcctcggcgggccaacggcccgttgccccccagttag

SEQ ID NO: 112698 - DNA, 2298 bp, Artificial Sequence
  derived and/or modified sequence
atgggcgacgaggacgacgacgagagctgcgccgtggagctgcggattactgaggccaacttgaccggccatgaggagaaggtatcagtcgagaactttgagttactgaaggtgctgggcacaggggcctacggaaaagtgtttctcgtcaggaaggccggaggacatgacgccgggaagttatatgcaatgaaagtcctgagaaaagctgctctggtgcagcgggcgaagacccaagaacacacccggaccgaaagaagcgttctcgaacttgtcaggcaagctcccttcctcgtgacgctacactacgcattccaaaccgacgccaagctccatttgatattggattacgttagcggcggagagatgtttactcatttgtaccagagacagtatttcaaagaagccgaagtgcgcgtatacggtggagaaatcgtgcttgcacttgaacaccttcataaattggggataatctatcgtgacctgaaactcgagaatgtgctcctcgacagcgagggccatattgtgctcaccgatttcggtttatcaaaggagtttctcaccgaggagaaggagagaactttttctttttgcggaactattgaatacatggccccagaaatcatcagaagtaagaccggccacggtaaagcagtcgattggtggagccttggcatccttttattcgagctgcttactggggcctctccatttacactcgagggcgaacgtaatacccaagctgaggtgtctaggagaatcctgaagtgctccccccctttcccacccagaattggcccagttgctcaggacctgctgcagcggctcctttgcaaggaccccaagaagcgtcttggcgccggcccccagggggcccaggaagtgcgcaatcatccctttttccaggggctcgactgggtcgcgctggcggcaagaaagatacccgctccctttcgcccacagattagaagcgaattagatgtcggcaattttgcggaagagttcacacgcttggaacccgtgtacagccccccaggctcacctccgcctggtgaccctagaatcttccaggggtactcttttgttgctccatccatcctgtttgatcacaacaatgcggtgatgaccgacggcctggaggcccccggcgccggcgacaggcccgggagggccgctgtagctcgctccgcaatgatgcagtacgaactggatctgagagaacccgctctggggcagggaagcttttccgtctgtcgccggtgtaggcaacgtcagagtgggcaggaatttgccgtgaagatcctgtctagaagacttgaggctaacacacagcgtgaagtggcggcactgcgactatgccagagtcaccctaacgtggtaaatctccacgaggtccatcatgaccagctccacacctacctggtgttggagctgctgcgcggcggcgaactgctcgaacacatcagaaagaagcgccatttctccgagagtgaggcctcccagatcctcaggagcctcgtgtcggccgtgtcttttatgcatgaggaagcaggagtcgtgcatcgagaccttaagcctgagaacattttgtacgccgacgacactcccggggcccctgtgaagatcatcgatttcggtttcgcacggttgcggcctcagtctcccggcgttccaatgcaaaccccctgtttcacactccagtatgctgctcccgagctgctcgctcaacagggctacgatgagagctgtgacctctggagtctcggagttatactgtacatgatgctgagcggacaagtgcccttccaaggggctagcgggcagggcgggcagtctcaggcagccgagattatgtgcaagatccgtgaaggcaggttttccttggacggtgaggcctggcaaggggtgtccgaggaagccaaagagctcgtaagggggcttttgaccgtggatccagcgaaaagacttaagctcgaggggctgagggggtcatcatggctgcaggacgggtcggcccgctcttcccctccactgagaacgccggacgtgctcgaaagcagcggaccggccgttaggtctggactgaacgctacattcatggcatttaatcgtgggaagcgcgagggattcttccttaaatctgtagaaaacgctccgctcgcaaaaagaagaaaacaaaagttaaggtctgccaccgcatccagaagaggatcacccgcaccggccaaccctggacgggcccctgtagcttcgaagggcgcgccgaggagggcaaatggcccactgccaccatcctag

SEQ ID NO: 112699 - DNA, 1575 bp, Artificial Sequence
  derived and/or modified sequence
atgggggacgaagatgatgatgaaagctgcgcagttgagctccggattacggaagccaatcttaccgggcacgaagagaaggtcagcgtggagaattttgaactgctcaaggtgctcggcactggggcttacggaaaagtgtttctggtgaggaaggctggcggtcacgacgcagggaagttgtatgccatgaaggtgctcagaaaggccgctctggtgcaaagagcaaagacgcaggaacacaccaggaccgagcggagtgttctggagctggttagacaggcaccttttctcgttactcttcactatgctttccagactgatgcgaagctgcatttgatactggattacgtcagcgggggtgagatgtttacccatctgtaccaacgtcagtatttcaaagaagcagaggtacgcgtgtatggcggagagattgtcctggcgttggagcaccttcacaaactagggattatatacagagatctcaagcttgaaaacgttctgctcgactctgaaggccacattgtgctgacggacttcggcttatccaaggaatttttgactgaggaaaaggagagaacgttttccttctgcggcacgatcgaatacatggcgcctgagatcatcaggagtaaaacggggcacggcaaagcagtcgactggtggagtcttgggatcctgctgtttgagctcctaaccggggcaagtccattcaccctggaaggcgagaggaacacccaagcagaggtctctcggcgaattctgaaatgcagcccacctttccccccaagaatcgggccagtcgcccaggatttgctgcaaagactgctctgtaaggatcccaagaagaggcttggagccggtcctcaaggtgcccaagaggtgagaaatcaccccttcttccaaggattggattgggtagccctggctgccaggaaaatcccagcgccattcaggccacaaatcagaagcgagctggacgtgggaaacttcgctgaagaatttactagactggagcctgtatattctccccctggatcacctcctccaggtgacccacgtatcttccaaggttactcatttgtggcgccatcaattcttttcgatcataacaatgccgcagagatcatgtgtaagatcagggaaggacgcttttctctggacggagaagcttggcagggagttagtgaagaggccaaggagctagtccggggactgctgaccgtcgaccccgcaaagcgactgaagctagagggcttgcggggtagcagttggctccaagacggatctgcccgatcatccccccctttgaggacgcccgacgtgttagaatccagcgggcctgctgtgagaagcgggctcaacgctacgtttatggcgttcaaccgcggtaagagggaaggcttctttcttaagtccgtcgaaaatgccccactggccaagcggcgtaagcagaagttgaggagcgcgacagcgagcaggaggggatcccccgcacctgccaatcctggcagagcacccgtcgccagcaagggcgcaccgaggcgagcaaatggaccactgcctccaagctag

SEQ ID NO: 112700 - DNA, 2298 bp, Artificial Sequence
  derived and/or modified sequence
atgggagatgaagatgatgacgaaagctgcgccgtagagctgcggatcaccgaagctaatttgacaggccatgaggagaaggtctcagtagagaactttgaactcctaaaagtgctcggaactggagcttatggtaaagtgttcttagtgcgaaaggcaggtggccacgacgctggaaaactgtacgccatgaaggtgctcagaaaagcggctctggtgcagagagcgaagacacaggagcacacaaggacagaaagaagcgtgctggagcttgtgcgccaagctccttttctggtgaccctgcactatgcttttcagaccgacgccaagttgcacttaatactagactatgtgagcggaggtgagatgtttactcatctctatcagcggcagtactttaaggaggctgaggttcgcgtgtatggaggtgaaattgtgctggcgctggaacacctacacaagcttggaattatctaccgcgacctcaagctcgaaaatgtgctactggatagtgaggggcacattgttctaaccgatttcggtttatcgaaggagtttctcactgaggagaaggaacgaaccttctccttctgcggaaccatcgagtacatggctcccgagatcatccggtccaaaaccggccatggtaaggccgtggactggtggtccttggggattctgctgttcgaactgctgacaggggcttctccatttacactggagggcgagaggaatactcaagccgaggtgtcaagaaggatcttaaagtgctcccctcccttcccacccaggattggtcctgtggcccaggatctcctgcagcgtctgttgtgcaaagaccccaagaagaggctgggtgctggccctcagggtgcccaagaggttaggaatcatcccttctttcaaggtttggactgggttgccctcgcagctcgaaaaatccccgctccattcagaccccaaataaggtccgaactggatgttggcaacttcgctgaagaattcacacggcttgagccggtgtacagccctccaggttcacctccacctggagaccctaggatttttcaaggctacagctttgtggcaccaagcattctcttcgaccataacaatgccgttatgaccgatggccttgaagcgcctggcgcaggggacagacccggacgggcagccgtggcacgctcggcgatgatgcagtacgaactggatctgagagagccagctttgggtcagggctcatttagtgtgtgccgaaggtgccgccagcggcagtctggtcaggagttcgccgtgaaaatcctatcgcgccgtcttgaagcaaatacacaaagagaggttgccgcattacgtctgtgtcaatcacatcccaatgtcgttaatctgcacgaggtgcaccatgaccagctgcatacctatcttgtccttgaactgctgcgtgggggagaattgctcgagcacatccgcaaaaaacgtcatttttccgaatcggaagcttcgcaaatcctgagaagcctggttagtgctgtctctttcatgcacgaagaggctggcgtggtgcaccgtgacttgaagccagagaatattctctacgctgatgacacacctggagcgcctgtaaaaatcatagattttggcttcgcaagactgcggcctcaatccccaggcgtgccaatgcagactccctgttttaccctacagtatgccgctcctgagctcttagcccagcaggggtacgacgagagctgtgacctgtggagcctgggcgtgattctttatatgatgttgtctggccaggtgccttttcagggagcatcaggccaaggaggccagagccaagccgctgaaataatgtgcaagatccgtgagggacgtttctctctcgacggtgaagcgtggcagggcgtcagtgaggaggcaaaagagctggtgcggggtctgctcactgttgaccccgcaaaacgtttaaagctggagggactgagaggcagtagctggttgcaggacggaagtgctcgatcttccccccctctgcgaacccccgacgttttagagtctagcggaccagccgtgagaagtgggctgaacgccaccttcatggcgtttaaccggggaaagagagaaggcttttttctaaagagcgtcgaaaatgcccctttagccaagcgacggaaacagaaattgcgctccgccacagcttccagacgaggtagtcccgcacccgctaaccctggtagggccccagtagctagtaaaggagctcccaggcgcgctaacgggcctttaccccctagctag

SEQ ID NO: 112701 - DNA, 2371 bp, Artificial Sequence
  derived and/or modified sequence
gccgccatgtaaccggcgccgcccggagcccgagccgcgcgggccccagcgacccgcccgccatgggggacgaggacgacgatgagagctgcgccgtggagctgcggatcacagaagccaacctgaccgggcacgaggagaaggtgagcgtggagaacttcgagctgctcaaggtgctgggcacgggagcctacggcaaggtgttcctggtgcggaaggcgggcgggcacgacgcggggaagctgtacgccatgaaggtgctgcgcaaggcggcgctggtgcagcgcgccaagacgcaagagcacacgcgcaccgagcgctcggtgctggagctggtgcgccaggcgcccttcctggtcacgctgcactacgctttccagacggatgccaagctgcacctcatcctggactatgtgagcggcggggagatgttcacccacctctaccagcgccagtacttcaaggaggctgaggtgcgcgtgtatgggggtgagatcgtgctggccctggaacacctgcacaagctcggcatcatttaccgagacctgaaactggagaatgtgctgctggactccgagggccacattgtcctcacggacttcgggctgagcaaggagttcctgacggaggagaaagagcggaccttctccttctgtggcaccatcgagtacatggcccccgaaatcatccgtagcaagacggggcatggcaaggctgtggactggtggagcctgggcatcttgctcttcgagctgctgacgggggcctcgcccttcaccctggagggcgagaggaacacgcaggctgaggtgtctcgacggatcctgaagtgctcccctcccttcccccctcggatcgggcccgtggcgcaggacctgctgcagcggctgctttgtaaggatcctaagaagcgattgggcgcggggccccagggggcacaagaagtccggaaccatcccttcttccagggcctcgattgggtggctctggctgccaggaagattccagccccattccggccccaaatccgctcagagctggatgtgggcaactttgcggaggaattcactcggctggagcctgtctactcaccccctggcagccccccacctggggacccccgaatctttcagggatactcctttgtggcaccctccattctctttgaccacaacaacgcggccgagatcatgtgcaaaatccgcgaggggcgcttctcccttgacggggaggcctggcagggtgtatccgaggaagccaaggagctggtccgagggctcctgaccgtggaccccgccaagcggctgaagctcgagggactgcggggcagctcgtggctgcaggacggcagcgcgcgctcctcgcccccgctccggacgcccgacgtgctcgagtcctctgggcccgcagtgcgctcgggtctcaacgccaccttcatggcattcaaccggggcaagcgggagggcttcttcctgaagagcgtggagaatgcacccctggccaagcggcggaagcagaagctgcggagcgccaccgcctcccgccggggctcccctgcaccagccaacccgggccgagcccccgtcgcctccaaaggggccccccgccgagccaacggccccctgcccccctcctaatccccaccactgtgacccccttccctcataggggctgtgacctgggagcccggctcactcccggaggcctctgcctgcggctgacctgatccccaagggactgtcctttcctctcctaccccaccccactcccagacagagcagaagtatttttataagcagagaattttttatgtcttaccagatagagttgcagggaagggggggcctgctggggagtggggtttggggggccctctcccaggacactgcctcttctgggcagaaggcccctccagggggactgctccaacaggaaagagcccctcccccacttctaagcactgagttaggagtgctaactcctaaactgggaccccctaccctgttctcccctgaggccccgttcctgggaggggcacccctcaactgtcactttatggactgtctgtgcaattacgtccaccaaagacccgtgttgggggtactgaaggagaggccctgggggaccctctgaagcatttctgcctcactttatgtcatctgcttctcccctgttggggctaaggaaggagataggtggctcctaaaagaggaggccatcttctcacccaccccttcctctttggcacagctactcctggctgggggtggggccttgggggtctgggctgggcatccatggtcactgcctcagcccagccaggctgtgcctttgactttaaaataaaagtccacccagtgctgtgtgtggc

SEQ ID NO: 112702 - DNA, 3121 bp, Artificial Sequence
  derived and/or modified sequence
accaggaagcgcccgccccggccggagccgccatgtaaccggcgccgcccggagcccgagccgcgcgggccccagcgacccgcccgccatgggggacgaggacgacgatgagagctgcgccgtggagctgcggatcacagaagccaacctgaccgggcacgaggagaaggtgagcgtggagaacttcgagctgctcaaggtgctgggcacgggagcctacggcaaggtgttcctggtgcggaaggcgggcgggcacgacgcggggaagctgtacgccatgaaggtgctgcgcaaggcggcgctggtgcagcgcgccaagacgcaagagcacacgcgcaccgagcgctcggtgctggagctggtgcgccaggcgcccttcctggtcacgctgcactacgctttccagacggatgccaagctgcacctcatcctggactatgtgagcggcggggagatgttcacccacctctaccagcgccagtacttcaaggaggctgaggtgcgcgtgtatgggggtgagatcgtgctggccctggaacacctgcacaagctcggcatcatttaccgagacctgaaactggagaatgtgctgctggactccgagggccacattgtcctcacggacttcgggctgagcaaggagttcctgacggaggagaaagagcggaccttctccttctgtggcaccatcgagtacatggcccccgaaatcatccgtagcaagacggggcatggcaaggctgtggactggtggagcctgggcatcttgctcttcgagctgctgacgggggcctcgcccttcaccctggagggcgagaggaacacgcaggctgaggtgtctcgacggatcctgaagtgctcccctcccttcccccctcggatcgggcccgtggcgcaggacctgctgcagcggctgctttgtaaggatcctaagaagcgattgggcgcggggccccagggggcacaagaagtccggaaccatcccttcttccagggcctcgattgggtggctctggctgccaggaagattccagccccattccggccccaaatccgctcagagctggatgtgggcaactttgcggaggaattcactcggctggagcctgtctactcaccccctggcagccccccacctggggacccccgaatctttcagggatactcctttgtggcaccctccattctctttgaccacaacaacgcggtgatgaccgatgggctggaagcgcctggtgctggagaccggccaggtcgggcagcggtggccaggagcgctatgatgcagtacgagctggacctgcgggagcctgcgctgggccagggcagcttttctgtgtgtcgccgctgccgccagcgccagagcggccaggagttcgcagtcaagatcctcagtcgcaggctggaggcgaacacgcagcgcgaagtggctgccctgcgcctgtgccagtcacaccccaacgtggtgaatctgcacgaggtgcatcacgaccagctgcacacgtacctggtcctggagctgctgcggggcggggagctgctggagcacatccgcaagaagcggcacttcagcgagtcggaagcaagccagatcctgcgcagcctcgtgtcggccgtgagcttcatgcacgaggaggcgggcgtggtgcaccgcgacctcaagccggagaacatcctgtacgccgacgacacgcccggggccccggtgaaaatcatcgacttcgggttcgcgcggttgcggccgcagagtcccggggtgcccatgcagacgccctgcttcacgctgcagtacgctgcccccgagctgctggcgcagcagggctacgacgagtcctgcgacctctggagcctgggcgtcattctgtacatgatgctgtcggggcaggtccccttccagggggcctctggccagggcgggcagagccaggcggccgagatcatgtgcaaaatccgcgaggggcgcttctcccttgacggggaggcctggcagggtgtatccgaggaagccaaggagctggtccgagggctcctgaccgtggaccccgccaagcggctgaagctcgagggactgcggggcagctcgtggctgcaggacggcagcgcgcgctcctcgcccccgctccggacgcccgacgtgctcgagtcctctgggcccgcagtgcgctcgggtctcaacgccaccttcatggcattcaaccggggcaagcgggagggcttcttcctgaagagcgtggagaatgcacccctggccaagcggcggaagcagaagctgcggagcgccaccgcctcccgccggggctcccctgcaccagccaacccgggccgagcccccgtcgcctccaaaggggccccccgccgagccaacggccccctgcccccctcctaatccccaccactgtgacccccttccctcataggggctgtgacctgggagcccggctcactcccggaggcctctgcctgcggctgacctgatccccaagggactgtcctttcctctcctaccccaccccactcccagacagagcagaagtatttttataagcagagaattttttatgtcttaccagatagagttgcagggaagggggggcctgctggggagtggggtttggggggccctctcccaggacactgcctcttctgggcagaaggcccctccagggggactgctccaacaggaaagagcccctcccccacttctaagcactgagttaggagtgctaactcctaaactgggaccccctaccctgttctcccctgaggccccgttcctgggaggggcacccctcaactgtcactttatggactgtctgtgcaattacgtccaccaaagacccgtgttgggggtactgaaggagaggccctgggggaccctctgaagcatttctgcctcactttatgtcatctgcttctcccctgttggggctaaggaaggagataggtggctcctaaaagaggaggccatcttctcacccaccccttcctctttggcacagctactcctggctgggggtggggccttgggggtctgggctgggcatccatggtcactgcctcagcccagccaggctgtgcctttgactttaaaataaaagtccacccagtgctgtgtgtggca

SEQ ID NO: 112703 - protein, 246 aa, Artificial Sequence
  derived and/or modified sequence
MYQVSGQRPSGCDAPYGAPSAAPGPAQTLSLLPGLEVVTGSTHPAEAAPEEGSLEEAATPMPQGNGPGIPQGLDSTDLDVPTEAVTCQPQGNPLGCTPLLPNDSGHPSELGGTRRAGNGALGGPKAHRKLQTHPSLASQGSKKSKSSSKSTTSQIPLQAQEDCCVHCILSCLFCEFLTLCNIVLDCATCGSCSSEDSCLCCCCCGSGECADCDLPCDLDCGILDACCESADCLEICMECCGLCFSS

SEQ ID NO: 112704 - protein, 231 aa, Artificial Sequence
  derived and/or modified sequence
MYQVSGQRPSGCDAPYGAPSAAPGPAQTLSLLPGLEVVTGSTHPAEAAPEEGSLEEAATPMPQGNGPGIPQGLDSTDLDVPTEAVTCQPQGNPLGCTPLLPNDSGHPSELGGTRRAGNGALGGPKAHRKLQTHPSLASQGSKKSKSSSKSTTSQIPLQAQEDCCVHCILSCLFCEFLTLCNIVLDCATCGSCSSEDSCLCCCCCGSGECADCDLPCDLDCGILDACCESAD

SEQ ID NO: 112705 - protein, 213 aa, Artificial Sequence
  derived and/or modified sequence
MYQVSGQRPSGCDAPYGAPSAAPGPAQTLSLLPGLEVVTGSTHPAEAAPEEGSLEEAATPMPQGNGPGIPQGLDSTDLDVPTEAVTCQPQGNPLGCTPLLPNDSGHPSELGGTRRAGNGALGGPKAHRKLQTHPSLASQGSKKSKSSSKSTTSQIPLQAQEDCCVHCILSCLFCEFLTLCNIVLDCATCGSCSSEDSCLCCCCCGSGECADCD

SEQ ID NO: 112706 - protein, 98 aa, Artificial Sequence
  derived and/or modified sequence
MYQVSGQRPSGCDAPYGAPSAAPGPAQTLSLLPGLEVVTGSTHPAEAAPEEGSLEEAATPMPQGNGPGIPQGLDSTDLDVPTEAVTCQPQGNPLGCTP

SEQ ID NO: 112707 - protein, 128 aa, Artificial Sequence
  derived and/or modified sequence
MYQVSGQRPSGCDAPYGAPSAAPGPAQTLSLLPGLEVVTGSTHPAEAAPEEGSLEEAATPMPQGNGPGIPQGLDSTDLDVPTEAVTCQPQGNPLGCTPLLPNDSGHPSELGGTRRAGNGALGGPKAHR

SEQ ID NO: 112708 - DNA, 741 bp, Artificial Sequence
  derived and/or modified sequence
atgtatcaggtaagcggacagcgacccagcggttgtgacgcaccatatggcgcgccctctgccgctcccggtcctgctcagacccttagccttttacccgggttggaagtagtgaccgggtccacccacccagcagaggctgcaccggaggagggcagcctagaggaagccgccacacccatgccacagggcaatggtccaggcatcccccagggcctagattccactgatctcgatgtacctaccgaagccgtgacatgccagccgcaaggaaatcccctcggatgcacaccgctgctaccgaatgactccggccatccaagcgagctgggcggcacccgccgcgccggcaatggcgccttagggggaccgaaagcacatcggaagctccaaacacatccttccctggcctctcagggatctaaaaagagtaagtcatcctccaaaagtactacctcccagattcccctgcaggcccaggaggattgctgcgtgcattgcatactgtcctgcttattttgtgaattcctgacattgtgcaatattgtcctcgattgcgcaacttgcggcagttgcagctctgaagacagctgtctttgctgttgctgttgtggcagtggtgaatgcgctgactgtgacctgccctgcgatttagactgtgggatcttggacgcctgctgcgagtccgccgactgtctggagatctgcatggagtgctgtggcctctgtttctctagctag

SEQ ID NO: 112709 - DNA, 741 bp, Artificial Sequence
  derived and/or modified sequence
atgtaccaggtgtctggccagaggcccagcggctgtgatgccccctacggggcccccagcgctgcccctggccctgcccagaccctgagcctgctgcccggcctggaggtggtgacaggcagcacccaccctgctgaggccgcccctgaggagggcagcctggaggaggccgccacccccatgccccagggcaatggacctggcatcccccagggcctggacagcacagacctggatgtgcccacagaggccgtgacctgccagccccagggcaaccccctgggctgcacccccctgctgcccaatgacagcggccaccccagcgagctgggcggcacccggcgggctggaaatggagccctgggcggccccaaggcccacaggaagctgcagacccaccccagcctggccagccagggcagcaagaagagcaagagcagcagcaagagcaccaccagccagatccccctgcaggcccaggaggactgctgcgtgcactgcatcctgagctgcctcttctgtgagttcctgaccctgtgcaacatcgtgctggactgtgccacctgtggcagctgcagcagcgaggacagctgcctgtgctgctgctgctgcggcagcggggagtgtgccgactgtgacctgccctgtgacctggactgtggcatcctggatgcctgctgtgagagcgctgactgcctggagatctgcatggagtgctgcggcctgtgcttcagcagctag

SEQ ID NO: 112710 - DNA, 741 bp, Artificial Sequence
  derived and/or modified sequence
atgtaccaggtgagcggccagcggcccagcggctgcgacgccccctatggcgctcccagcgcagccccagggccagcacagaccttgtctttgctgccggggctggaagtcgtgaccggatctacacatccagcggaagcagctcccgaggaaggcagtctagaagaagcggcaacgcctatgccccaggggaacgggcccggtatcccccagggtctggactccacagacctggacgtgcctaccgaggctgtaacttgccaaccgcaagggaacccgctcgggtgtactcctttgctaccgaatgattccggccaccctagcgagctcgggggtaccagacgcgccggcaatggtgccttgggcggtccaaaagctcatcgcaagctgcagacgcacccaagccttgcctcccagggctctaaaaaatccaagtcgagttctaagagcacaacttcccaaattcccttgcaggcgcaggaggattgttgcgtgcactgtattctgagttgtttgttttgtgagtttctgaccctgtgcaatatcgtgttagactgcgcaacatgcggctcatgtagctccgaggattcatgcctctgctgctgttgctgcgggagtggcgaatgtgctgattgcgacctgccatgcgatctggattgcggcatcctggacgcatgttgtgagtccgctgactgcctcgagatttgtatggagtgctgtggactgtgtttcagttcatag

SEQ ID NO: 112711 - DNA, 741 bp, Artificial Sequence
  derived and/or modified sequence
atgtatcaggtctcaggccagcgtccaagcggatgcgacgctccctatggcgcacccagtgcagcaccgggaccagcacaaaccctgtctctcctgccgggactggaggttgtcactggctcaacccaccctgccgaggcggcacctgaggagggatccttggaagaggccgctactcccatgccccagggtaatggccctgggataccgcagggattagactccactgacttagacgtccccacagaagctgtcacatgtcagccacagggcaaccccctgggatgcacgccgctgctgccgaatgactctggtcatccttctgaactcggcggaactcgtcgagccggtaatggcgctcttggcggtcctaaggctcaccgcaagcttcagacgcacccctctttagcctcccaagggagcaagaagtctaaaagctcctcgaagtcaaccacttcccagataccactgcaggcacaggaagactgttgtgttcactgtatactgtcctgcctcttctgtgagttcctgacactctgcaacatcgtactcgattgcgctacttgtggctcctgctcatccgaagattcttgtctgtgctgttgctgttgcggatccggcgagtgtgctgactgcgatctcccttgtgacctagattgtggtatattggatgcgtgttgtgagagcgctgactgtcttgaaatttgcatggaatgttgtggtctgtgcttttcttcatag

SEQ ID NO: 112712 - DNA, 741 bp, Artificial Sequence
  derived and/or modified sequence
atgtaccaggtgagcggccagagacccagcggctgcgacgccccctacggcgcccccagcgccgcccccggccccgcccagaccctgagcctgctgcccggcctggaggtggtgaccggcagcacccaccccgccgaggccgcccccgaggagggcagcctggaggaggccgccacccccatgccccagggcaacggccccggcatcccccagggcctggacagcaccgacctggacgtgcccaccgaggccgtgacctgccagccccagggcaaccccctgggctgcacccccctgctgcccaacgacagcggccaccccagcgagctgggcggcaccagaagagccggcaacggcgccctgggcggccccaaggcccacagaaagctgcagacccaccccagcctggccagccagggcagcaagaagagcaagagcagcagcaagagcaccaccagccagatccccctgcaggcccaggaggactgctgcgtgcactgcatcctgagctgcctgttctgcgagttcctgaccctgtgcaacatcgtgctggactgcgccacctgcggcagctgcagcagcgaggacagctgcctgtgctgctgctgctgcggcagcggcgagtgcgccgactgcgacctgccctgcgacctggactgcggcatcctggacgcctgctgcgagagcgccgactgcctggagatctgcatggagtgctgcggcctgtgcttcagcagctag

SEQ ID NO: 112713 - DNA, 741 bp, Artificial Sequence
  derived and/or modified sequence
atgtatcaagtttccggccagcgcccttccggatgtgacgccccctacggggctccaagcgcagccccaggcccagcccagaccctgagtctcttgcccggtctggaggttgtgactggttcgacccaccctgccgaggcagccccagaggaagggtctctcgaagaagcggccacaccgatgccacaggggaatggacccgggatcccacagggattggacagcaccgacctcgatgtaccaacggaggcagtaacttgtcagccccagggcaaccccttagggtgtacacctcttttgcccaacgactcagggcaccctagtgagctcggaggaactcgccgtgccgggaacggagctctggggggacctaaagctcaccggaaactccaaacacacccatctctcgcttcgcagggctcgaaaaagagcaagagctcttctaaatcaaccacttcacaaatcccgttgcaagctcaggaggattgttgcgtgcactgcatcctgtcttgccttttctgtgagttcctcacactctgtaatatcgtgctcgactgtgccacttgcggcagctgctcctcagaggattcatgtctttgttgctgctgctgcggaagtggagaatgtgctgactgtgacttgccctgtgacctggactgcggcattctggatgcttgttgtgagtcggccgattgtttggagatctgtatggagtgttgtggcctctgtttcagttcctag

SEQ ID NO: 112714 - DNA, 696 bp, Artificial Sequence
  derived and/or modified sequence
atgtaccaggtgagcggacagcgtcccagcgggtgcgacgctccttacggtgcccccagcgctgccccgggtcccgcacagacactgtcccttctgccggggctcgaggttgtgactggcagcacacatcccgcagaggccgctcctgaagaaggcagcctggaagaggccgcgacccccatgccacaaggcaatggccccggtatcccacagggcttagactccaccgacctggacgtccccactgaagccgtgacgtgtcagcctcaaggcaaccccctcgggtgcactcccttactaccgaacgattctgggcatccgtcggagctaggtgggacacggagggctggtaatggcgcccttggtggacccaaagcgcataggaaactccagactcaccccagcctggcctcacagggcagtaaaaagtctaagtcatcatctaagtccaccacctcacagattcctctgcaagcccaggaagactgctgtgtgcactgtatcctatcttgcctcttttgcgagtttctgaccttgtgcaacatcgtgttagactgcgccacatgcgggagttgctctagtgaagattcatgcctgtgttgctgctgctgcggaagtggagaatgtgccgactgtgatttgccatgtgacctcgactgcggaatcctggatgcctgttgcgagagcgcagattag

SEQ ID NO: 112715 - DNA, 642 bp, Artificial Sequence
  derived and/or modified sequence
atgtaccaagtctccgggcagcgaccatcagggtgcgacgccccttacggagctcccagcgccgcccccggtcccgctcagaccctcagtctgctgccagggctggaggtggtgacaggatcaacccatccggcagaggctgcaccagaggagggctccctggaagaggcggccacacccatgccgcaggggaacggtccgggaatccctcaaggactggacagcacggatctggatgtgcccaccgaggccgtcacctgccagccgcagggaaatccactgggttgcacaccactgctccctaatgattcaggtcatccatccgaactcgggggaactagacgtgcgggtaacggagccctggggggtcctaaggctcatcggaagttacagacacacccttccctagcaagccaaggatccaaaaagtctaaaagttcctctaagtctaccactagccagattcccctgcaggcacaggaagactgctgtgtacactgtatcctgtcttgcctgttttgtgagttcctgaccctatgcaacatcgtcctcgactgtgctacatgtggaagctgttcatctgaggactcgtgtctatgctgctgctgttgcggctcgggtgaatgcgctgattgtgactag

SEQ ID NO: 112716 - DNA, 297 bp, Artificial Sequence
  derived and/or modified sequence
atgtatcaggttagcggtcagcggccttccggttgcgatgccccttacggcgcaccatcagccgccccagggcctgcccaaacccttagtttgctccctggtttggaggtggtcactgggagtactcacccagcagaagcggcgcccgaggagggctcattagaggaagccgctacaccaatgccgcaaggtaatgggccaggtatccctcaaggccttgacagcactgatcttgacgtacctacggaggcagttacctgtcagccacaggggaatccacttgggtgtacgccttag

SEQ ID NO: 112717 - DNA, 387 bp, Artificial Sequence
  derived and/or modified sequence
atgtaccaggtgagtggtcagcggccctccggctgtgacgcaccctacggtgccccttctgctgcacccggccccgctcaaaccctgtcgcttttgcctggactcgaggtggtcaccggttctacacaccccgccgaggccgctccagaggagggttcgctcgaggaggctgctacccccatgccacagggcaatggacctggcataccacaggggcttgacagtacagacctcgacgtgccaacggaggctgtcacctgccagccccagggtaacccactggggtgcacacccctcctgccaaacgatagcggacatccttctgagcttggaggcactagacgggccggcaatggagctctaggcgggcccaaggcacacaggtag

SEQ ID NO: 112718 - DNA, 741 bp, Artificial Sequence
  derived and/or modified sequence
atgtaccaggtgtccggccaacgtcccagcggttgcgacgccccgtacggcgctccatcggctgctcccgggccggcacagaccctcagtctgttgcccgggctggaagttgtaactggcagtacacatcccgccgaagccgcaccagaggagggctcactggaggaggcagcaacgcctatgccccagggcaacggacccggcatcccgcagggccttgattccacggatctggatgtcccgactgaggctgtgacttgtcagccacaggggaatcctctcggctgtacccctctgttgcccaatgactctggtcatccaagtgagctcggtggaacccgacgggccggcaatggcgccctgggcggcccaaaagctcaccgaaagctacagacgcacccttcgcttgcctcacagggcagcaagaagagcaagtcttcgagcaaatcgaccacctcacaaatccctctgcaggcccaagaggactgctgcgtgcactgcatcctgagctgtctgttctgtgaattcttgaccctgtgtaacattgtgctggactgtgctacctgtggcagttgttcatctgaagacagctgtctttgttgctgctgttgcggcagcggggaatgtgcagattgtgatcttccttgcgatctcgattgcggcatactggacgcttgctgtgaatcggccgactgcctggaaatctgcatggagtgttgcggtctctgcttctcatcatag

SEQ ID NO: 112719 - DNA, 696 bp, Artificial Sequence
  derived and/or modified sequence
atgtaccaggtgtctggccagaggcccagcggctgtgatgccccctacggggcccccagcgctgcccctggccctgcccagaccctgagcctgctgcccggcctggaggtggtgacaggcagcacccaccctgctgaggccgcccctgaggagggcagcctggaggaggccgccacccccatgccccagggcaatggacctggcatcccccagggcctggacagcacagacctggatgtgcccacagaggccgtgacctgccagccccagggcaaccccctgggctgcacccccctgctgcccaatgacagcggccaccccagcgagctgggcggcacccggcgggctggaaatggagccctgggcggccccaaggcccacaggaagctgcagacccaccccagcctggccagccagggcagcaagaagagcaagagcagcagcaagagcaccaccagccagatccccctgcaggcccaggaggactgctgcgtgcactgcatcctgagctgcctcttctgtgagttcctgaccctgtgcaacatcgtgctggactgtgccacctgtggcagctgcagcagcgaggacagctgcctgtgctgctgctgctgcggcagcggggagtgtgccgactgtgacctgccctgtgacctggactgtggcatcctggatgcctgctgtgagagcgctgactag

SEQ ID NO: 112720 - DNA, 642 bp, Artificial Sequence
  derived and/or modified sequence
atgtaccaggtgtctggccagaggcccagcggctgtgatgccccctacggggcccccagcgctgcccctggccctgcccagaccctgagcctgctgcccggcctggaggtggtgacaggcagcacccaccctgctgaggccgcccctgaggagggcagcctggaggaggccgccacccccatgccccagggcaatggacctggcatcccccagggcctggacagcacagacctggatgtgcccacagaggccgtgacctgccagccccagggcaaccccctgggctgcacccccctgctgcccaatgacagcggccaccccagcgagctgggcggcacccggcgggctggaaatggagccctgggcggccccaaggcccacaggaagctgcagacccaccccagcctggccagccagggcagcaagaagagcaagagcagcagcaagagcaccaccagccagatccccctgcaggcccaggaggactgctgcgtgcactgcatcctgagctgcctcttctgtgagttcctgaccctgtgcaacatcgtgctggactgtgccacctgtggcagctgcagcagcgaggacagctgcctgtgctgctgctgctgcggcagcggggagtgtgccgactgtgactag

SEQ ID NO: 112721 - DNA, 297 bp, Artificial Sequence
  derived and/or modified sequence
atgtaccaggtgtctggccagaggcccagcggctgtgatgccccctacggggcccccagcgctgcccctggccctgcccagaccctgagcctgctgcccggcctggaggtggtgacaggcagcacccaccctgctgaggccgcccctgaggagggcagcctggaggaggccgccacccccatgccccagggcaatggacctggcatcccccagggcctggacagcacagacctggatgtgcccacagaggccgtgacctgccagccccagggcaaccccctgggctgcaccccctag

SEQ ID NO: 112722 - DNA, 387 bp, Artificial Sequence
  derived and/or modified sequence
atgtaccaggtgtctggccagaggcccagcggctgtgatgccccctacggggcccccagcgctgcccctggccctgcccagaccctgagcctgctgcccggcctggaggtggtgacaggcagcacccaccctgctgaggccgcccctgaggagggcagcctggaggaggccgccacccccatgccccagggcaatggacctggcatcccccagggcctggacagcacagacctggatgtgcccacagaggccgtgacctgccagccccagggcaaccccctgggctgcacccccctgctgcccaatgacagcggccaccccagcgagctgggcggcacccggcgggctggaaatggagccctgggcggccccaaggcccacaggtag

SEQ ID NO: 112723 - DNA, 1629 bp, Artificial Sequence
  derived and/or modified sequence
ggggctggagggagagaaggaagaaggaaggggcgaacggcgtgagctggcgccgaaatgggagaaagcagcgagtgagaggggaaggggcgccaggcgagcacccgggagccagcgggacctgggcaggggcgcccggagcaggcgcgcatggcgggccccgcgcggggatccggctggaagagagcgtagcacggctcgcacgagtccggggccgatgtaccaggtgagcggccagcgcccctctggctgcgacgcgccctatggagcccccagcgcagccccgggcccagcccagaccctatccctccttcctgggctggaggtagtaacaggatccactcaccctgcggaggcagcaccagaggagggctccctggaggaggcggcaacccccatgccccaaggcaatggccctggcatcccccagggcctggacagcactgacctcgacgtccccacagaagctgtgacatgccagcctcaggggaaccccttgggctgcaccccacttctgccgaatgactctggccacccctcagagctgggcggcaccagacgggcggggaatggtgccctgggtggccccaaggcccaccggaagttgcagacacacccatctctcgccagccagggcagcaagaagagtaagagcagcagcaaatccaccacctcccagatccccctccaggcacaggaagactgctgtgtccactgcatcctgtcctgcctgttctgcgagttcctgacgctgtgcaacatcgtcctggactgcgccacctgtggctcctgcagctcggaggactcgtgcctctgctgctgctgctgtggctctggcgagtgtgccgactgcgacctgccctgcgacctggactgcggcatcctggatgcctgctgcgagtccgcggactgcctggagatctgcatggagtgctgtgggctctgcttctcctcctgagcctctgtcgggggctaagccagcctggcgcccctgcagattccagcagggtccctctgagtggggccaggcccaggactgtcacacaaggcttgagaagccccctctccctggtcctctcctacccacccatgtcctctcagaaccccagccttgaaaatagtggggggcactcagaggggccacctcctcagccgtgggtggtgggcccatggcagagaagcctgaactctttactgggttaccaggttcatacattgctgaggacctgacaggacaacctaggggcagggctggggtggggaccgcagggggcagccagggctggggaacactgtgaaagttacttggggagggtgggccggtggggccgtagctctctacctctccctgctcctggtgcctgcctctctcctccaccccaggcttagaggacagaaaaatgtgaagagacgccccacccaccctcagccagccctctccagtctcctttcctaggcttttttgggggcctaacccacgcagtgaccccagagggcagggctaggcgagagcctggggtggggcgggagggggaacagtatggaaaagactggaaggggaaaggaagggaagggagggagggtctgttctatctgttgctgtaaataaagatatttgtccatctcaga

SEQ ID NO: 112724 - DNA, 1622 bp, Artificial Sequence
  derived and/or modified sequence
ctcctggggcactaggacagacccccgcggctagcagcccggcctggggggcggaacactctcttcttgtcccgccccaccttcctccgggccgcaaccaccccagcccatcgctgggacgtggccgcgggtgccgagagcgctgccggcgccgtgggggccatcccggtcctggccccgacggcgccccaggacctgcgatagccgtccggggccgatgtaccaggtgagcggccagcgcccctctggctgcgacgcgccctatggagcccccagcgcagccccgggcccagcccagaccctatccctccttcctgggctggaggtagtaacaggatccactcaccctgcggaggcagcaccagaggagggctccctggaggaggcggcaacccccatgccccaaggcaatggccctggcatcccccagggcctggacagcactgacctcgacgtccccacagaagctgtgacatgccagcctcaggggaaccccttgggctgcaccccacttctgccgaatgactctggccacccctcagagctgggcggcaccagacgggcggggaatggtgccctgggtggccccaaggcccaccggaagttgcagacacacccatctctcgccagccagggcagcaagaagagtaagagcagcagcaaatccaccacctcccagatccccctccaggcacaggaagactgctgtgtccactgcatcctgtcctgcctgttctgcgagttcctgacgctgtgcaacatcgtcctggactgcgccacctgtggctcctgcagctcggaggactcgtgcctctgctgctgctgctgtggctctggcgagtgtgccgactgcgacctgccctgcgacctggactgcggcatcctggatgcctgctgcgagtccgcggactgcctggagatctgcatggagtgctgtgggctctgcttctcctcctgagcctctgtcgggggctaagccagcctggcgcccctgcagattccagcagggtccctctgagtggggccaggcccaggactgtcacacaaggcttgagaagccccctctccctggtcctctcctacccacccatgtcctctcagaaccccagccttgaaaatagtggggggcactcagaggggccacctcctcagccgtgggtggtgggcccatggcagagaagcctgaactctttactgggttaccaggttcatacattgctgaggacctgacaggacaacctaggggcagggctggggtggggaccgcagggggcagccagggctggggaacactgtgaaagttacttggggagggtgggccggtggggccgtagctctctacctctccctgctcctggtgcctgcctctctcctccaccccaggcttagaggacagaaaaatgtgaagagacgccccacccaccctcagccagccctctccagtctcctttcctaggcttttttgggggcctaacccacgcagtgaccccagagggcagggctaggcgagagcctggggtggggcgggagggggaacagtatggaaaagactggaaggggaaaggaagggaagggagggagggtctgttctatctgttgctgtaaataaagatatttgtcca

SEQ ID NO: 112725 - DNA, 1183 bp, Artificial Sequence
  derived and/or modified sequence
tccagagctcccggacagcagccggatcccggccggctcctggggcactaggacagacccccgcggctagcagcccggcctggggggcggaacactctcttcttgtcccgccccaccttcctccgggccgcaaccaccccagcccatcgctgggacgtggccgcgggtgccgagagcgctgccggcgccgtgggggccatcccggtcctggccccgacggcgccccaggacctgcgatagccaaacttttgcagagtttggacaggcaaaggaaaacgtgcagcccgcggatctccgggcctcagagagcagggagtcggggagactgaggccccgctccgagagcgcggaggaagcgcgcccagccggcttcctgtgggggctcgggcctcgggcgccccgcggacagacgtgtccggctcctggctgggccaagcccggcgcgggggaggggacccgcagaggggcgactgagaaggtccggggccgatgtaccaggtgagcggccagcgcccctctggctgcgacgcgccctatggagcccccagcgcagccccgggcccagcccagaccctatccctccttcctgggctggaggtagtaacaggatccactcaccctgcggaggcagcaccagaggagggctccctggaggaggcggcaacccccatgccccaaggcaatggccctggcatcccccagggcctggacagcactgacctcgacgtccccacagaagctgtgacatgccagcctcaggggaaccccttgggctgcaccccacttctgccgaatgactctggccacccctcagagctgggcggcaccagacgggcggggaatggtgccctgggtggccccaaggcccaccggaagttgcagacacacccatctctcgccagccagggcagcaagaagagtaagagcagcagcaaatccaccacctcccagatccccctccaggcacaggaagactgctgtgtccactgcatcctgtcctgcctgttctgcgagttcctgacgctgtgcaacatcgtcctggactgcgccacctgtggctcctgcagctcggaggactcgtgcctctgctgctgctgctgtggctctggcgagtgtgccgactgcgacctgccctgcgacctggactgcggcatcctggatgcctgctgcgagtccgcggact

SEQ ID NO: 112726 - DNA, 703 bp, Artificial Sequence
  derived and/or modified sequence
agacggtgaggattgccttcggaggtgggtgaggcccagcgtgcgcgcccaggtccggggccgatgtaccaggtgagcggccagcgcccctctggctgcgacgcgccctatggagcccccagcgcagccccgggcccagcccagaccctatccctccttcctgggctggaggtagtaacaggatccactcaccctgcggaggcagcaccagaggagggctccctggaggaggcggcaacccccatgccccaaggcaatggccctggcatcccccagggcctggacagcactgacctcgacgtccccacagaagctgtgacatgccagcctcaggggaaccccttgggctgcaccccacttctgccgaatgactctggccacccctcagagctgggcggcaccagacgggcggggaatggtgccctgggtggccccaaggcccaccggaagttgcagacacacccatctctcgccagccagggcagcaagaagagtaagagcagcagcaaatccaccacctcccagatccccctccaggcacaggaagactgctgtgtccactgcatcctgtcctgcctgttctgcgagttcctgacgctgtgcaacatcgtcctggactgcgccacctgtggctcctgcagctcggaggactcgtgcctctgctgctgctgctgtggctctggcgagtgtgccgactgcgacc

SEQ ID NO: 112727 - DNA, 353 bp, Artificial Sequence
  derived and/or modified sequence
ggagcgaggggggctggagggagagaaggaagaaggaaggggcgaacggtccggggccgatgtaccaggtgagcggccagcgcccctctggctgcgacgcgccctatggagcccccagcgcagccccgggcccagcccagaccctatccctccttcctgggctggaggtagtaacaggatccactcaccctgcggaggcagcaccagaggagggctccctggaggaggcggcaacccccatgccccaaggcaatggccctggcatcccccagggcctggacagcactgacctcgacgtccccacagaagctgtgacatgccagcctcaggggaaccccttgggctgcacccca

SEQ ID NO: 112728 - DNA, 635 bp, Artificial Sequence
  derived and/or modified sequence
ccgaaatgggagaaagcagcgagtgagaggggaaggggcgccaggcgagcacccgggagccagcgggacctgggcaggggcgcccggagcaggcgcgcatggcgggccccgcgcggggatccggctggaagagagcgtagcacggctcgcacgagtgagtggacgtgggaggcgcgcatctgcgggggaatcgccccttgcccgcctccggcgccgcccgctgagccctgttttccgcaggtccggggccgatgtaccaggtgagcggccagcgcccctctggctgcgacgcgccctatggagcccccagcgcagccccgggcccagcccagaccctatccctccttcctgggctggaggtagtaacaggatccactcaccctgcggaggcagcaccagaggagggctccctggaggaggcggcaacccccatgccccaaggcaatggccctggcatcccccagggcctggacagcactgacctcgacgtccccacagaagctgtgacatgccagcctcaggggaaccccttgggctgcaccccacttctgccgaatgactctggccacccctcagagctgggcggcaccagacgggcggggaatggtgccctgggtggccccaaggcccaccgg

SEQ ID NO: 112729 - DNA, 1449 bp, Artificial Sequence
  derived and/or modified sequence
gagaaggaagaaggaaggggcgaacggcgtgagctggcgccgaaatgggagaaagcagcgagtgagaggggaaggggcgccaggcgagcacccgggagccagcgggacctgggcaggggcgcccggagcaggcgcgcatggcgggccccgcgcggggatccggctggaagagagcgtagcacggctcgcacgagtgagtggacgtgggaggcgcgcatctgcgggggaatcgccccttgcccgcctccggcgccgcccgctgagccctgttttccgcaggtccggggccgatgtaccaggtgagcggccagcgcccctctggctgcgacgcgccctatggagcccccagcgcagccccgggcccagcccagaccctatccctccttcctgggctggaggtagtaacaggatccactcaccctgcggaggcagcaccagaggagggctccctggaggaggcggcaacccccatgccccaaggcaatggccctggcatcccccagggcctggacagcactgacctcgacgtccccacagaagctgtgacatgccagcctcaggggaaccccttgggctgcaccccacttctgccgaatgactctggccacccctcagagctgggcggcaccagacgggcggggaatggtgccctgggtggccccaaggcccaccggaagttgcagacacacccatctctcgccagccagggcagcaagaagagtaagagcagcagcaaatccaccacctcccagatccccctccaggcacaggaagactgctgtgtccactgcatcctgtcctgcctgttctgcgagttcctgacgctgtgcaacatcgtcctggactgcgccacctgtggctcctgcagctcggaggactcgtgcctctgctgctgctgctgtggctctggcgagtgtgccgactgcgacctgccctgcgacctggactgcggcatcctggatgcctgctgcgagtccgcggactgcctggagatctgcatggagtgctgtgggctctgcttctcctcctgagcctctgtcgggggctaagccagcctggcgcccctgcagattccagcagggtccctctgagtggggccaggcccaggactgtcacacaaggcttgagaagccccctctccctggtcctctcctacccacccatgtcctctcagaaccccagccttgaaaatagtggggggcactcagaggggccacctcctcagccgtgggtggtgggcccatggcagagaagcctgaactctttactgggttaccaggttcatacattgctgaggacctgacaggacaacctaggggcagggctaggcgagagcctggggtggggcgggagggggaacagtatggaaaagactggaaggggaaaggaagggaagggagggagggtctgttctatctgttgctgtaaataaagatatttgtccatctc

SEQ ID NO: 112730 - DNA, 741 bp, Artificial Sequence
  derived and/or modified sequence
atgtaccaggtgagcggccagcggcccagcggctgcgacgccccctatggagccccgtctgctgctcccggtccagcccagacattgtctttgttgcccggtcttgaagtcgtgacgggcagtacgcatccagcagaagctgcccccgaagaggggtcactggaggaggcggcaacaccaatgccacaggggaacggtcccggcatcccccagggcctagattcgacggatctggatgtgccgaccgaagcggtgacctgccagccgcagggcaatccgctgggatgcacgcccttactgcccaacgatagcggccatccctcagagttgggcgggaccaggcgagccgggaacggggcactgggcggcccgaaggcacatcgaaagctgcagacacacccatcattagcatcacaggggtccaagaagtccaaaagttcaagtaaatctaccacttcgcagatccccctgcaagcccaagaagattgctgtgttcactgtattctgtcctgtctcttctgcgaattcctgaccctttgtaatattgtgctggactgtgccacctgcggatcatgttcctccgaagactcgtgcctgtgctgctgttgttgtggttctggcgaatgtgccgattgtgacctgccatgcgacctggattgcggcattttggacgcatgttgtgagagtgctgactgtcttgagatttgtatggaatgctgcgggctgtgtttctcaagctag

SEQ ID NO: 112731 - DNA, 696 bp, Artificial Sequence
  derived and/or modified sequence
atgtaccaggtgagcggccagcggcccagcggctgcgacgccccctacggggcacccagcgccgcccctggccctgcccagacactgtcccttttgccaggactggaagtggtcacagggtctacccacccagccgaagccgcccctgaagaagggtcactcgaggaggcggcaacacctatgccccagggcaatggcccggggatccctcagggcttagacagtacagacctcgacgtccccactgaggccgtgacctgccagccgcaagggaaccctctcgggtgcaccccgcttttacccaacgactctggtcatccttcggagctagggggcacaaggcgggctgggaacggagctctgggcggacccaaggctcaccggaagctgcagacccacccctctctggccagccaggggtccaagaagtctaaatcaagttctaaaagtactacatctcagatcccactacaggctcaggaggattgttgcgtgcattgcatcctgagttgcttgttctgcgagtttttaacactgtgcaacatagtgctcgattgcgccacctgtggtagctgttcctcggaagacagctgcctgtgctgctgctgctgtggctccggcgaatgcgccgactgtgaccttccctgcgaccttgattgcggcattttggacgcctgctgcgaaagtgcagattag

SEQ ID NO: 112732 - DNA, 642 bp, Artificial Sequence
  derived and/or modified sequence
atgtaccaggtgagcggccagcggcccagcggctgcgacgccccctacggtgcccctagcgccgcccctggccccgcccagacactgtccttgctccctggcctggaggtggttaccgggtcaacccatccagctgaggccgctcccgaagaagggagcctggaggaagcggcaacccccatgccccaggggaatggacccggcatccctcaagggcttgatagcacggaccttgatgtacctactgaggctgtcacatgtcagccccagggcaatcccctgggatgtaccccgctgctccctaacgactcagggcacccctctgaactgggggggactcgccgggctggtaacggcgccctgggcggacccaaggctcacagaaagctgcaaacacatcctagtctcgcgtctcaggggtctaaaaagtccaaatccagtagcaagagcactacgtcccagatcccgttacaggcacaggaggattgttgtgtgcactgcattttaagttgcctgttttgcgagtttttgaccctgtgcaatattgtgctggactgtgctacatgcggatcatgctcgtcagaagactcctgcttgtgttgttgctgctgcggatctggcgaatgcgctgactgtgactag

SEQ ID NO: 112733 - DNA, 297 bp, Artificial Sequence
  derived and/or modified sequence
atgtaccaggtgagcggccagcggcccagcggctgcgacgccccctatggtgccccttccgccgctcccggacctgctcaaaccctgtccctgctgccagggctcgaagtggtgactggctccacgcaccccgcagaggccgcacccgaagagggatcacttgaagaggcagcaactcccatgcctcagggcaatggcccgggtatcccacagggtttggacagcacggatctggacgtacccaccgaagccgttacctgtcagccccagggtaatcctctcggctgcacaccatag

SEQ ID NO: 112734 - DNA, 387 bp, Artificial Sequence
  derived and/or modified sequence
atgtaccaggtgagcggccagcggcccagcggctgcgacgccccctatggggccccctccgctgctccgggccctgctcagaccctgtcactcctcccaggactggaagtagtgaccggaagtacacacccagccgaggctgcaccagaggaaggatccctggaggaagctgccacccccatgcctcagggaaacggaccaggtatcccacagggcctggattctaccgaccttgacgtgcctacagaggccgtcacctgccaaccacaaggcaatccacttgggtgcactcccttgctgcctaacgatagcggacacccttctgagcttggtgggactcgccgcgctggaaacggagctctcgggggccctaaggcccacaggtag

SEQ ID NO: 112735 - DNA, 741 bp, Artificial Sequence
  derived and/or modified sequence
atgtaccaggtgagcggccagcggcccagcggctgcgacgccccctacggggcccctagtgcagccccgggaccagcccagaccctttccctgcttccgggtctcgaagtggtcacaggtagcactcacccagccgaggcggcccccgaggaaggatctttggaggaagcggctacacctatgccacaggggaacggccctggcatccctcagggcttggattcaaccgatttggacgtgccgacagaagctgtaacctgtcagccccagggcaacccgctcggatgcacgcccctcctgcccaacgacagcgggcaccctagcgagctgggggggactcgccgagcagggaatggcgcgttgggaggtcctaaagcacacagaaaactgcagacacatccgagtttggcttcacaggggtctaaaaagtccaagtctagctcaaaatcaacgaccagccagattccactccaggcccaggaagactgttgtgtgcactgcatcctgtcttgcctcttctgcgaatttctaacactatgcaacatcgttctcgactgtgccacatgtggttcatgttcatctgaggattcttgtctatgttgctgctgttgcggttccggcgaatgcgcagactgtgacttgccatgcgacctcgactgcggtatcctggacgcatgctgcgagtcagctgattgcctggagatatgcatggagtgttgcggtttgtgctttagcagctag

SEQ ID NO: 112736 - DNA, 741 bp, Artificial Sequence
  derived and/or modified sequence
atgtatcaagtgtctggacagcgtcccagtggctgcgatgctccatacggcgcacccagcgccgcacctggccctgctcagacactttccctcctgccaggcctagaggttgtcacagggagcacccaccccgctgaagccgcaccagaggaggggagcctcgaggaggctgcgacaccgatgccgcaggggaatggacccggaataccccagggactcgactcgactgacctcgacgtcccaaccgaggctgtgacttgccagcctcaggggaatccacttgggtgtacgccactattgccaaacgactcgggccatccttctgagttgggaggcactaggagggccggaaacggagctcttgggggtcccaaggcacatcgaaaactgcagacccacccatctcttgcgtcacagggatccaagaagagcaagagctcctcaaaatctacaacctctcaaatccctctacaggcacaggaagattgttgcgttcactgcatcctcagttgtctgttttgcgaattcctcactctgtgtaacattgttctggactgcgctacatgcggatcgtgtagttctgaggattcgtgtctttgttgttgttgctgtggaagtggcgagtgtgctgactgtgatctgccctgtgacttggactgtggaattttggatgcatgttgtgagagtgccgactgcctcgagatctgcatggaatgctgcggcctctgtttctctagttag

SEQ ID NO: 112737 - DNA, 696 bp, Artificial Sequence
  derived and/or modified sequence
atgtaccaggtgtccggacaaagacccagcggctgtgatgccccatacggcgctccctccgcagcccctgggccagcccagacactgtctttgctgcccggactggaggtggttaccggttctactcatcccgctgaggctgctcctgaagagggctccctggaggaggcagctactccgatgccgcagggtaatggacccggtatcccgcaagggctggattctactgacctggatgtgcccacagaggcagtgacatgtcaaccacaaggcaatccacttggttgcacaccgttgcttccaaatgattccggccacccaagcgagcttgggggtaccagacgcgctgggaacggcgcacttgggggacctaaggcccatcgcaaattgcagacgcacccctccctggcatcccagggtagtaagaaatctaagtccagctcgaaatccacaacgagccagatccctcttcaggctcaggaagattgctgcgttcattgtattctgtcttgtctgttttgtgaattcctcaccctatgcaacatcgtgctggactgcgccacctgcgggagctgttcaagtgaggattcctgcctgtgttgttgttgttgcggaagtggggaatgcgctgactgtgacctcccttgcgacctcgattgcggtatcctggacgcctgctgcgagtctgctgactag

SEQ ID NO: 112738 - DNA, 642 bp, Artificial Sequence
  derived and/or modified sequence
atgtaccaagtgagcggacagcggccttcaggttgcgacgcaccctacggcgcaccatcagcagcccctggaccagcccagaccctaagtctgctaccaggcctggaggtggttactggcagtacgcaccccgctgaagccgctcctgaagaggggtccctggaagaagcagccactccaatgccacaaggcaatgggccaggaataccgcagggacttgacagtactgatttggacgttccaactgaagcagtaacgtgccagcctcaggggaatcctttggggtgtacccccctgttgcccaatgattcagggcatccctctgaactcggcggaacacgtagagccggaaatggagccctcggcggaccgaaagcccatcgcaaactccaaacccacccttcactcgcctcccagggcagcaagaagtccaagtcaagctctaagagcactaccagccagatccccctccaggctcaggaggattgttgcgttcactgcattctgtcctgtctgttctgcgaatttctaactctctgtaacattgtgctcgattgtgctacatgcggctcttgcagctctgaagatagttgtctgtgttgctgttgctgtggtagcggggagtgtgcagattgtgactag

SEQ ID NO: 112739 - DNA, 297 bp, Artificial Sequence
  derived and/or modified sequence
atgtatcaagtatctgggcaacggccaagcggatgtgacgccccatacggggcacctagcgccgctccgggaccagctcagaccctatcactattacccggactggaagtggtcacgggatccacccatcctgcagaagcggcacccgaggaggggtccctggaagaagcagccactcctatgcctcagggcaatggacccggaattcctcaagggctggactcgaccgatctcgacgtaccgacagaggccgttacatgccagcctcaaggtaaccctctggggtgtactccgtag

SEQ ID NO: 112740 - DNA, 387 bp, Artificial Sequence
  derived and/or modified sequence
atgtaccaggtgtccggacagaggcccagtggatgtgacgccccatacggggctccttctgccgcacctggaccggcacagacactgagcctgctcccaggcttggaggtcgtcactggctccacccaccctgcggaggcagcacccgaggaaggatcgctggaggaggctgccactcctatgccccaggggaacgggccaggaataccacagggtctggattctaccgatcttgatgtcccaacagaagctgtcacgtgtcagccgcaaggaaacccgctcgggtgcaccccactgctacctaacgattcgggccacccatccgagttggggggaacgagacgggctggtaacggggcactgggcggacccaaagcccatagatag

SEQ ID NO: 112741 - DNA, 741 bp, Artificial Sequence
  derived and/or modified sequence
atgtatcaggtctccggtcagaggccgagtggctgtgatgctccctatggagcaccatccgcagccccaggacccgctcaaaccctctctttgcttccgggactggaagtcgtaaccgggagcacccatccggcagaagcagcccctgaggagggctccctggaagaagcagccacccctatgccacaaggaaacggtcctggaatcccacaaggactagactctactgacttggacgtccccaccgaagccgtgacatgccagccgcaaggtaaccccctggggtgtacgccactgctcccaaatgactccggacatccatccgaattgggcggaacgcgcagggcaggaaacggcgcactgggaggaccaaaggcccataggaagcttcaaacacatcctagtctggccagtcagggctctaaaaaaagcaaatcgtccagcaaaagcaccacatctcagattccgctgcaggcccaagaggactgttgcgtgcattgcatcttgtcctgtctgttctgcgaattccttactctctgtaatatcgtactcgactgcgccacttgcggctcttgttcgagcgaggatagctgtctctgctgctgttgctgcggaagcggagaatgtgcggattgtgaccttccatgtgacctcgactgcggtatcctggatgcctgctgtgagagtgccgactgccttgagatttgtatggaatgctgcggtctctgcttttcaagttag

SEQ ID NO: 112742 - DNA, 696 bp, Artificial Sequence
  derived and/or modified sequence
atgtaccaggtgagcggccagagacccagcggctgcgacgccccctacggcgcccccagcgccgcccccggccccgcccagaccctgagcctgctgcccggcctggaggtggtgaccggcagcacccaccccgccgaggccgcccccgaggagggcagcctggaggaggccgccacccccatgccccagggcaacggccccggcatcccccagggcctggacagcaccgacctggacgtgcccaccgaggccgtgacctgccagccccagggcaaccccctgggctgcacccccctgctgcccaacgacagcggccaccccagcgagctgggcggcaccagaagagccggcaacggcgccctgggcggccccaaggcccacagaaagctgcagacccaccccagcctggccagccagggcagcaagaagagcaagagcagcagcaagagcaccaccagccagatccccctgcaggcccaggaggactgctgcgtgcactgcatcctgagctgcctgttctgcgagttcctgaccctgtgcaacatcgtgctggactgcgccacctgcggcagctgcagcagcgaggacagctgcctgtgctgctgctgctgcggcagcggcgagtgcgccgactgcgacctgccctgcgacctggactgcggcatcctggacgcctgctgcgagagcgccgactag

SEQ ID NO: 112743 - DNA, 642 bp, Artificial Sequence
  derived and/or modified sequence
atgtaccaggtgagcggccagagacccagcggctgcgacgccccctacggcgcccccagcgccgcccccggccccgcccagaccctgagcctgctgcccggcctggaggtggtgaccggcagcacccaccccgccgaggccgcccccgaggagggcagcctggaggaggccgccacccccatgccccagggcaacggccccggcatcccccagggcctggacagcaccgacctggacgtgcccaccgaggccgtgacctgccagccccagggcaaccccctgggctgcacccccctgctgcccaacgacagcggccaccccagcgagctgggcggcaccagaagagccggcaacggcgccctgggcggccccaaggcccacagaaagctgcagacccaccccagcctggccagccagggcagcaagaagagcaagagcagcagcaagagcaccaccagccagatccccctgcaggcccaggaggactgctgcgtgcactgcatcctgagctgcctgttctgcgagttcctgaccctgtgcaacatcgtgctggactgcgccacctgcggcagctgcagcagcgaggacagctgcctgtgctgctgctgctgcggcagcggcgagtgcgccgactgcgactag

SEQ ID NO: 112744 - DNA, 297 bp, Artificial Sequence
  derived and/or modified sequence
atgtaccaggtgagcggccagagacccagcggctgcgacgccccctacggcgcccccagcgccgcccccggccccgcccagaccctgagcctgctgcccggcctggaggtggtgaccggcagcacccaccccgccgaggccgcccccgaggagggcagcctggaggaggccgccacccccatgccccagggcaacggccccggcatcccccagggcctggacagcaccgacctggacgtgcccaccgaggccgtgacctgccagccccagggcaaccccctgggctgcaccccctag

SEQ ID NO: 112745 - DNA, 387 bp, Artificial Sequence
  derived and/or modified sequence
atgtaccaggtgagcggccagagacccagcggctgcgacgccccctacggcgcccccagcgccgcccccggccccgcccagaccctgagcctgctgcccggcctggaggtggtgaccggcagcacccaccccgccgaggccgcccccgaggagggcagcctggaggaggccgccacccccatgccccagggcaacggccccggcatcccccagggcctggacagcaccgacctggacgtgcccaccgaggccgtgacctgccagccccagggcaaccccctgggctgcacccccctgctgcccaacgacagcggccaccccagcgagctgggcggcaccagaagagccggcaacggcgccctgggcggccccaaggcccacagatag

SEQ ID NO: 112746 - protein, 295 aa, Artificial Sequence
  derived and/or modified sequence
MVFKVQFLSSRPSLSHTQDVDCAYLRKSDLEANVEALVEESSFLRRLYEEEIRVLQAHISDTSVIVKMDNSRDLNMDCIIAEIKAQYDDVASRSRAEAESWYRSKCEEMKATVIRHGETLRRTKEEINELNRMIQRLTAEIENAKCQRAKLEAAVAEAEQQGEAALSDARCKLAELEGALQKAKQDMACLLKEYQEVMNSKLGLDIEIATYRRLLEGEEHRLCEGVGSVNVCVSSSRGGVSCGGLSYSTTPGRQITSGPSAIGGSITVVAPDSCAPCQPRSSSFSCGSSRSVRFA

SEQ ID NO: 112747 - DNA, 888 bp, Artificial Sequence
  derived and/or modified sequence
atggtgttcaaggtgcaattcttaagttctcggccctcacttagtcacactcaggacgtggactgtgcctacttgcgcaaaagcgatctagaggctaacgtcgaagcccttgtcgaggagtcttcttttctgaggagattatacgaggaagagatccgcgtcctgcaagcccatattagtgatacttccgttattgtcaagatggacaatagcagagatcttaatatggattgcattatagccgagattaaagcacagtacgacgatgttgcctcacgctctagggccgaggcagagtcgtggtatcggtcaaagtgcgaggaaatgaaggccaccgtgataagacacggcgagaccctgaggcgaaccaaggaggagatcaatgagctaaatcgtatgatccagaggctcacagcggaaattgaaaacgccaagtgccagagggcaaagctcgaggctgcagttgcggaagctgagcagcaaggcgaggccgctctttctgacgctaggtgcaagcttgcagaactcgagggggcacttcagaaggcaaagcaggatatggcctgtctgctcaaagagtaccaggaagtcatgaactccaagttaggtctggacatcgagattgctacatacagacgattgcttgagggggaggaacaccgcctatgtgagggcgtggggagtgtgaatgtgtgcgttagcagttccagaggcggagtcagctgtgggggtctgtcctactcaacaaccccaggccggcagataacatcaggccctagcgccattgggggctctatcaccgtggttgcacccgactcatgtgctccctgccaaccaagatcatctagctttagctgcggatccagtagaagcgtgcggtttgcttag

SEQ ID NO: 112748 - DNA, 1387 bp, Artificial Sequence
  derived and/or modified sequence
acagatgattttagacttgggggaaggaatgtgcattcctaaccccatctcagaggcagaaggactgcggcggaatgaagccaggctaggacaagggctggcccatgaataatacaaaaaatagatcctggaggggccaagacaacatctggaggggattaatcccttttcaatccccggaagaacttgcccaggagttgggatggtattcaaggtccagtttctcagctccagaccttctctctcccacacccaggacgtggactgtgcctacctgcggaaatcagacctggaggccaatgtggaggccctggtggaggagtctagcttcctgaggcgcctctatgaagaggagatccgcgttctccaagcccacatctcagacacctcggtcatagtcaagatggacaacagccgagacctgaacatggactgcatcatcgctgagatcaaggctcagtatgacgatgttgccagccgcagccgggccgaggctgagtcctggtaccgtagcaagtgtgaggagatgaaggccacggtgatcaggcatggggagaccctgcgccgcaccaaggaggagatcaacgagctgaaccgcatgatccagaggctgacggccgagattgagaatgccaagtgccagcgtgccaagctggaggctgctgtggctgaggcagagcagcagggtgaggcggccctcagcgatgcccgctgcaagctggctgagctggagggcgccctgcagaaggccaagcaggacatggcctgcctgctcaaggagtaccaggaggtgatgaactccaagctgggcctggacatcgagatcgccacctacaggcgcctgctggagggcgaggaacacaggctgtgtgaaggtgtgggctctgtgaatgtctgtgtcagcagctcccgtggtggagtctcctgtgggggcctctcctacagcaccaccccagggcgccagatcacttctggcccctcagccataggcggcagcatcacggtggtggcccctgactcctgtgccccctgccagcctcgttcctccagcttcagctgcgggagtagccggtcggtccgctttgcctagtagagtcatggagccagggcttcctgccaagcacctgcctgcctgcatcactgcactgaatggcatgtgaatggaaaatgtgtgcttgcttccagaatcttctggatgttcctacagagggaaagacctacagagggaaagaccctcgggccgctcccctgcgccttttcatgctagggagatgcatcctagttgtcctcctggcagctgttttcagaggcattcccagcccttcacttaactcctacttagctccaaaatacctgtatccaatttgtattattcccccagctctca

SEQ ID NO: 112749 - DNA, 888 bp, Artificial Sequence
  derived and/or modified sequence
atggtgttcaaggtgcagttcctgagcagccggcccagcctgagccacacccaggatgtggactgtgcctacctgaggaagagtgacctggaggccaacgtggaggccctggtggaggagagcagcttcctgcggcggctgtatgaggaggagatccgggtgctgcaggcccacatcagtgacacctctgtgattgtgaagatggacaacagccgggacctgaacatggactgcatcatcgccgagatcaaggcccagtatgatgatgtggccagccgcagcagagctgaggccgagagctggtaccgcagcaaatgtgaggagatgaaggccaccgtcatccgccacggggagaccctgcggaggaccaaggaggagatcaatgagctgaacaggatgatccagaggctgacagctgagattgaaaatgccaagtgccagagggccaagctggaggccgctgtggccgaggccgagcagcagggcgaggccgccctgagtgatgcccgctgcaagctggccgagctggagggcgccctgcagaaggccaagcaggacatggcctgcctgctgaaggagtaccaggaggtgatgaacagcaagctgggcctggacatcgagatcgccacctaccgccgcctgctggagggggaggagcaccggctgtgtgaaggagtgggctctgtgaatgtgtgtgtgagcagcagccggggcggcgtgtcctgtggcggcctgagctacagcaccaccccaggccggcagatcaccagcggccccagcgccatcggcggcagcatcaccgtggtggccccagacagctgtgccccctgccagcccaggagcagcagcttcagctgtggcagcagccgctctgtgcgctttgcctag

SEQ ID NO: 112750 - DNA, 888 bp, Artificial Sequence
  derived and/or modified sequence
atggtgttcaaggtgcagttcctgagcagccggcccagcctgagccacacacaggacgtcgattgcgcttacttgcgcaaatctgaccttgaagccaacgtcgaagcgttggtggaagagtcatctttcctgcgtaggctttacgaggaggagatcagggtgctgcaagcccatatctctgacactagcgtgattgtcaagatggacaactcgagagacctcaatatggactgcatcatcgcagagattaaagcacagtacgacgacgtggcttcaagatctcgtgccgaggccgaaagctggtatcgatcaaaatgtgaggagatgaaggcaaccgtcattagacatggcgagaccttgagacgcacgaaggaggaaataaacgagttgaaccgtatgatccagcggctgacagctgaaatcgagaacgccaaatgccagagagctaagcttgaagccgctgttgctgaggctgaacagcagggcgaggctgccctctccgacgccagatgcaaactggccgagctggaaggggctcttcagaaggctaaacaggacatggcatgtctcttgaaggaataccaggaggtcatgaactcaaagctgggactggacatcgaaatcgccacctaccggcgtcttctggaaggagaggagcaccgcctttgtgagggggttggcagcgttaacgtgtgcgttagtagttcccgagggggggtaagctgcggtggcttgtcctattccaccaccccaggcagacagattacaagtgggcccagcgctatcggcggaagcatcacggtggtcgcaccggactcatgtgcaccttgtcagccgcggtctagtagtttttcctgtggatcttccagaagtgtgagatttgcctag

SEQ ID NO: 112751 - DNA, 888 bp, Artificial Sequence
  derived and/or modified sequence
atggtcttcaaggtgcagttcctgtcctctcggccaagcctgagccacacacaagacgtcgattgcgcttatctccgtaagagcgatttggaagctaacgttgaggcgctcgtggaggagtcgtcttttctccggaggttatacgaggaagagatccgcgtgctgcaggctcacatcagcgatacatctgtgatcgttaaaatggacaactcacgcgatctgaacatggattgtatcatcgccgaaataaaggcgcaatatgacgatgtcgcctctcgttcacgggctgaggctgaatcctggtaccgctccaagtgcgaagaaatgaaggctacagtgattcgtcatggggaaactctgaggcgcaccaaggaggaaattaatgagttgaacagaatgattcagagattgactgctgagatcgagaacgccaaatgtcagcgtgctaagttggaggccgcagtcgcggaagccgagcagcagggtgaagctgccctgtccgatgctaggtgcaaacttgccgagttggaaggcgctttgcaaaaagcgaagcaggacatggcatgcttactgaaggaatatcaagaggtgatgaactcaaagttgggactcgacatagagatcgcaacgtatcgcaggcttctggaaggtgaggagcatcgcctctgcgagggcgtcgggtccgtgaacgtctgtgtgagctcaagtagaggcggagtatcatgcggcggactgagctactctaccacccctggaagacagataacgtcaggacctagcgccattggtggctcaatcaccgtcgtcgcccctgactcctgtgccccttgccagcccaggagctcgtcctttagctgtgggagttccaggagtgtgagattcgcctag

SEQ ID NO: 112752 - DNA, 888 bp, Artificial Sequence
  derived and/or modified sequence
atggtgttcaaggtgcagttcctgagcagcagacccagcctgagccacacccaggacgtggactgcgcctacctgagaaagagcgacctggaggccaacgtggaggccctggtggaggagagcagcttcctgagaagactgtacgaggaggagatcagagtgctgcaggcccacatcagcgacaccagcgtgatcgtgaagatggacaacagcagagacctgaacatggactgcatcatcgccgagatcaaggcccagtacgacgacgtggccagcagaagcagagccgaggccgagagctggtacagaagcaagtgcgaggagatgaaggccaccgtgatcagacacggcgagaccctgagaagaaccaaggaggagatcaacgagctgaacagaatgatccagagactgaccgccgagatcgagaacgccaagtgccagagagccaagctggaggccgccgtggccgaggccgagcagcagggcgaggccgccctgagcgacgccagatgcaagctggccgagctggagggcgccctgcagaaggccaagcaggacatggcctgcctgctgaaggagtaccaggaggtgatgaacagcaagctgggcctggacatcgagatcgccacctacagaagactgctggagggcgaggagcacagactgtgcgagggcgtgggcagcgtgaacgtgtgcgtgagcagcagcagaggcggcgtgagctgcggcggcctgagctacagcaccacccccggcagacagatcaccagcggccccagcgccatcggcggcagcatcaccgtggtggcccccgacagctgcgccccctgccagcccagaagcagcagcttcagctgcggcagcagcagaagcgtgagattcgcctag

SEQ ID NO: 112753 - protein, 1298 aa, Artificial Sequence
  derived and/or modified sequence
MSAPAGSSHPAASARIPPKFGGAAVSGAAAPAGPGAGPAPHQQNETGFHHVAQASLELLDPSNLPASASQIAGSTGPAQNQMQVPSGYGLHHQNYIAPSGHYSQGPGKMTSLPLDTQCGDYYSALYTVPTQNVTPNTVNQQPGAQQLYSRGPPAPHIVGSTLGSFQGAASSASHLHTSASQPYSSFVNHYNSPAMYSASSSVASQGFPSTCGHYAMSTVSNAAYPSVSYPSLPAGDTYGQMFTSQNAPTVRPVKDNSFSGQNTAISHPSPLPPLPSQQHHQQQSLSGYSTLTWSSPGLPSTQDNLIRNHTGSLAVANNNPTITVADSLSCPVMQNVQPPKSSPVVSTVLSGSSGSSSTRTPPTANHPVEPVTSVTQPSELLQQKGVQYGEYVNNQASSAPTPLSSTSDDEEEEEEDEEAGVDSSSTTSSASPMPNSYDALEGGSYPDMLSSSASSPAPDPAPEPDPASAPAPASAPAPVVPQPSKMAKPFGYGYPTLQPGYQNATAPLISGVQPSNPVYSGFQQYPQYPGVNQLSSSIGGLSLQSSPQPESLRPVNLTQERNILPMTPVWAPVPNLNADLKKLNCSPDSFRCTLTNIPQTQALLNKAKLPLGLLLHPFRDLTQLPVITSNTIVRCRSCRTYINPFVSFIDQRRWKCNLCYRVNDVPEEFMYNPLTRSYGEPHKRPEVQNSTVEFIASSDYMLRPPQPAVYLFVLDVSHNAVEAGYLTILCQSLLENLDKLPGDSRTRIGFMTFDSTIHFYNLQEGLSQPQMLIVSDIDDVFLPTPDSLLVNLYESKELIKDLLNALPNMFTNTRETHSALGPALQAAFKLMSPTGGRVSVFQTQLPSLGAGLLQSREDPNQRSSTKVVQHLGPATDFYKKLALDCSGQQTAVDLFLLSSQYSDLASLACMSKYSAGCIYYYPSFHYTHNPSQAEKLQKDLKRYLTRKIGFEAVMRIRCTKGLSMHTFHGNFFVRSTDLLSLANINPDAGFAVQLSIEESLTDTSLVCFQTALLYTSSKGERRIRVHTLCLPVVSSLADVYAGVDVQAAICLLANMAVDRSVSSSLSDARDALVNAVVDSLSAYGSTVSNLQHSALMAPSSLKLFPLYVLALLKQKAFRTGTSTRLDDRVYAMCQIKSQPLVHLMKMIHPNLYRIDRLTDEGAVHVNDRIVPQPPLQKLSAEKLTREGAFLMDCGSVFYIWVGKGCDNNFIEDVLGYTNFASIPQKMTHLPELDTLSSERARSFITWLRDSRPLSPILHIVKDESPAKAEFFQHLIEDRTEAAFSYYEFLLHVQQQICK

SEQ ID NO: 112754 - DNA, 3897 bp, Artificial Sequence
  derived and/or modified sequence
atgagcgcccccgccggcagcagccaccccgccgccagcgccagaatcccccccaagttcggcggcgccgccgtgagcggcgccgccgcccccgccggccccggcgccggccccgccccccaccagcagaacgagaccggcttccaccacgtggcccaggccagcctggagctgctggaccccagcaacctgcccgccagcgccagccagatcgccggcagcaccggccccgcccagaaccagatgcaggtgcccagcggctacggcctgcaccaccagaactacatcgcccccagcggccactacagccagggccccggcaagatgaccagcctgcccctggacacccagtgcggcgactactacagcgccctgtacaccgtgcccacccagaacgtgacccccaacaccgtgaaccagcagcccggcgcccagcagctgtacagcagaggcccccccgccccccacatcgtgggcagcaccctgggcagcttccagggcgccgccagcagcgccagccacctgcacaccagcgccagccagccctacagcagcttcgtgaaccactacaacagccccgccatgtacagcgccagcagcagcgtggccagccagggcttccccagcacctgcggccactacgccatgagcaccgtgagcaacgccgcctaccccagcgtgagctaccccagcctgcccgccggcgacacctacggccagatgttcaccagccagaacgcccccaccgtgagacccgtgaaggacaacagcttcagcggccagaacaccgccatcagccaccccagccccctgccccccctgcccagccagcagcaccaccagcagcagagcctgagcggctacagcaccctgacctggagcagccccggcctgcccagcacccaggacaacctgatcagaaaccacaccggcagcctggccgtggccaacaacaaccccaccatcaccgtggccgacagcctgagctgccccgtgatgcagaacgtgcagccccccaagagcagccccgtggtgagcaccgtgctgagcggcagcagcggcagcagcagcaccagaaccccccccaccgccaaccaccccgtggagcccgtgaccagcgtgacccagcccagcgagctgctgcagcagaagggcgtgcagtacggcgagtacgtgaacaaccaggccagcagcgcccccacccccctgagcagcaccagcgacgacgaggaggaggaggaggaggacgaggaggccggcgtggacagcagcagcaccaccagcagcgccagccccatgcccaacagctacgacgccctggagggcggcagctaccccgacatgctgagcagcagcgccagcagccccgcccccgaccccgcccccgagcccgaccccgccagcgcccccgcccccgccagcgcccccgcccccgtggtgccccagcccagcaagatggccaagcccttcggctacggctaccccaccctgcagcccggctaccagaacgccaccgcccccctgatcagcggcgtgcagcccagcaaccccgtgtacagcggcttccagcagtacccccagtaccccggcgtgaaccagctgagcagcagcatcggcggcctgagcctgcagagcagcccccagcccgagagcctgagacccgtgaacctgacccaggagagaaacatcctgcccatgacccccgtgtgggcccccgtgcccaacctgaacgccgacctgaagaagctgaactgcagccccgacagcttcagatgcaccctgaccaacatcccccagacccaggccctgctgaacaaggccaagctgcccctgggcctgctgctgcaccccttcagagacctgacccagctgcccgtgatcaccagcaacaccatcgtgagatgcagaagctgcagaacctacatcaaccccttcgtgagcttcatcgaccagagaagatggaagtgcaacctgtgctacagagtgaacgacgtgcccgaggagttcatgtacaaccccctgaccagaagctacggcgagccccacaagagacccgaggtgcagaacagcaccgtggagttcatcgccagcagcgactacatgctgagacccccccagcccgccgtgtacctgttcgtgctggacgtgagccacaacgccgtggaggccggctacctgaccatcctgtgccagagcctgctggagaacctggacaagctgcccggcgacagcagaaccagaatcggcttcatgaccttcgacagcaccatccacttctacaacctgcaggagggcctgagccagccccagatgctgatcgtgagcgacatcgacgacgtgttcctgcccacccccgacagcctgctggtgaacctgtacgagagcaaggagctgatcaaggacctgctgaacgccctgcccaacatgttcaccaacaccagagagacccacagcgccctgggccccgccctgcaggccgccttcaagctgatgagccccaccggcggcagagtgagcgtgttccagacccagctgcccagcctgggcgccggcctgctgcagagcagagaggaccccaaccagagaagcagcaccaaggtggtgcagcacctgggccccgccaccgacttctacaagaagctggccctggactgcagcggccagcagaccgccgtggacctgttcctgctgagcagccagtacagcgacctggccagcctggcctgcatgagcaagtacagcgccggctgcatctactactaccccagcttccactacacccacaaccccagccaggccgagaagctgcagaaggacctgaagagatacctgaccagaaagatcggcttcgaggccgtgatgagaatcagatgcaccaagggcctgagcatgcacaccttccacggcaacttcttcgtgagaagcaccgacctgctgagcctggccaacatcaaccccgacgccggcttcgccgtgcagctgagcatcgaggagagcctgaccgacaccagcctggtgtgcttccagaccgccctgctgtacaccagcagcaagggcgagagaagaatcagagtgcacaccctgtgcctgcccgtggtgagcagcctggccgacgtgtacgccggcgtggacgtgcaggccgccatctgcctgctggccaacatggccgtggacagaagcgtgagcagcagcctgagcgacgccagagacgccctggtgaacgccgtggtggacagcctgagcgcctacggcagcaccgtgagcaacctgcagcacagcgccctgatggcccccagcagcctgaagctgttccccctgtacgtgctggccctgctgaagcagaaggccttcagaaccggcaccagcaccagactggacgacagagtgtacgccatgtgccagatcaagagccagcccctggtgcacctgatgaagatgatccaccccaacctgtacagaatcgacagactgaccgacgagggcgccgtgcacgtgaacgacagaatcgtgccccagccccccctgcagaagctgagcgccgagaagctgaccagagagggcgccttcctgatggactgcggcagcgtgttctacatctgggtgggcaagggctgcgacaacaacttcatcgaggacgtgctgggctacaccaacttcgccagcatcccccagaagatgacccacctgcccgagctggacaccctgagcagcgagagagccagaagcttcatcacctggctgagagacagcagacccctgagccccatcctgcacatcgtgaaggacgagagccccgccaaggccgagttcttccagcacctgatcgaggacagaaccgaggccgccttcagctactacgagttcctgctgcacgtgcagcagcagatctgcaagtag

SEQ ID NO: 112755 - DNA, 3897 bp, Artificial Sequence
  derived and/or modified sequence
atgtcagctcctgccggctcctcacacccagctgccagcgctcgcatccctccaaagttcggaggagctgccgtaagcggggctgccgcaccagcaggacctggagcgggcccggctccccaccagcagaacgaaacagggttccaccacgtcgcgcaggcatcccttgaacttctagacccttccaatctcccagcgtctgcaagtcagattgccggatccacaggtccagctcaaaaccagatgcaggtgccgtctgggtatggcctgcaccatcagaattacatcgccccttccggccactactctcaagggccaggcaagatgacctcattgcctttagacacacagtgcggcgactattactctgctctttatactgtgcccacccaaaatgtaacccccaacaccgtgaaccaacagcctggagctcagcagctatattcaagaggacctccggccccacacatagtgggttctaccctcgggtcattccagggtgcggccagttctgccagtcacttgcacacatccgctagtcagccttattcttccttcgtgaatcactataattctcctgccatgtactctgcctccagtagcgtggcatcacaaggctttccctccacgtgtgggcactatgctatgtccaccgtgtcaaatgctgcatatccaagcgtgtcctatccgtcactccccgctggtgacacttacggtcagatgtttacatcgcaaaacgctcccaccgtaagacccgtgaaggacaacagtttttccgggcagaataccgccatcagtcaccctagccccctcccgcccctgccgtcccagcaacaccatcagcagcaatctttgtcaggttactctactttgacctggagcagtcctgggctaccatctacacaggataatctgattcggaatcacactgggtcactcgcggtagccaacaacaacccgacaataactgtcgcggatagtctctcctgtcccgtgatgcaaaatgtccagccacccaagagcagccctgtcgtaagcactgtgctcagcggatcatctgggtccagcagcacacgcacaccccctaccgcgaatcaccccgtcgaacctgtcacttccgtcacacagccctcagaactgctgcagcagaaaggggtgcaatacggcgagtacgtgaacaaccaggcctcatcagcccctacacctctctcatcgactagtgatgacgaggaggaagaggaagaggatgaagaagccggggtcgatagctcgtcaactacttcaagcgcgagcccaatgcccaactcttacgatgccttagagggaggaagctacccagacatgctctcttctagtgcaagctctccggcccctgaccctgctcccgaacctgatccagcctctgccccagctcctgccagcgcccccgcgcctgttgtcccgcagccttccaagatggctaagccttttgggtacggctaccctactctgcaacccgggtatcagaatgctactgccccgcttatatctggtgtgcagccctccaatcctgtgtactccggctttcagcaatacccccagtatccaggggttaaccagttgtctagcagcattgggggtttatccctgcaaagctctccacagcctgaaagccttcgcccggtgaacctcactcaggagagaaacatcctccctatgacccccgtatgggctcccgtgcccaacctgaatgcggacttgaaaaagctcaattgttctcctgacagctttcgctgcaccttgaccaacattccccagacacaggctctcctgaataaggcaaagttgccgctgggtcttctcctacatccatttagggacctcacccaactgccagtgatcaccagtaatacaatcgtaaggtgccggtcctgcaggacttacattaatcctttcgtgagttttatcgaccagcgtagatggaagtgcaatctttgctatcgagtaaacgatgtgccggaagagttcatgtataaccccctgacccgttcttacggagaaccacacaagaggcctgaggtgcagaattcaacggtcgagttcatagcctcctcagactatatgctgcgcccacctcagccagccgtttacctattcgtgttggacgtgagtcataatgctgtcgaagctggatatttgactattctgtgtcagtctttgttggaaaatttggataagctgccaggagactctcgcacccgcatcggtttcatgacatttgattctacaatacacttttacaacctgcaggagggattgtctcaacctcagatgttgatcgtcagcgatattgatgacgttttcctgcccacccctgattcgctattggtcaacttgtatgagtctaaagaactcattaaagacctgctaaacgctttaccaaacatgtttaccaatacgcgagaaactcactccgcactcggccccgccctgcaggccgccttcaaactgatgagccctactgggggccgagtttccgtgttccagacgcagctgccctctctcggagccggactgctgcagtctagagaagaccccaatcagaggagctccacgaaagtggttcagcatttgggaccggctaccgatttttacaagaagctcgcactggactgttcaggccagcagaccgcagtagacttgtttctgctctcatctcaatactccgacctggccagcctggcgtgtatgagcaagtactctgcaggctgcatctattattacccgagctttcattacacccacaacccatctcaggcggagaagctgcagaaggacctcaagaggtatctcacccggaaaattggcttcgaggccgtaatgaggattcggtgtacaaaaggcctttccatgcacacctttcacggtaatttcttcgtacgatcgaccgacttgctgtccctagccaacatcaaccctgatgcaggcttcgcggtgcaattgtcaattgaagagtctctgactgataccagtctggtgtgctttcaaaccgctttgctgtacacatcgtcgaagggcgagagaaggattcgagttcataccctctgcctgccagtggtgtccagcctcgctgacgtgtatgccggcgttgacgttcaggcagctatctgcctcctggcaaacatggcagtggatcggagcgtgagcagtagcttgtcagatgctagagatgcattggtgaatgcagtggtggactctctgagcgcctatggcagcaccgtgagtaaccttcaacacagtgccctcatggctccctctagtttgaagctgttccccctgtacgtgctcgcgctcttaaagcagaaggcctttagaaccgggactagcacacgtttggacgatagagtgtatgcaatgtgccagatcaaatctcagcccctcgttcacctaatgaagatgatacatcccaacttgtacaggatcgatcggctaaccgacgagggggccgtacacgtgaatgatcgcatcgtcccacagcctcctctccaaaaactcagcgctgagaagctgacacgcgaaggtgccttcttgatggactgtggaagcgtcttttatatatgggtcggcaagggatgtgataacaactttattgaggacgtgctaggctacaccaattttgcaagtataccccagaaaatgacgcacttacccgaactggataccctgagctcagaacgggccagatcttttatcacatggcttagggactccaggccattgagccctatcctccatatagtcaaggacgagagtccggccaaagccgagttcttccagcatctcatagaggacagaaccgaggcggcattcagctactacgaatttctgctccacgtgcagcagcaaatttgcaagtag

SEQ ID NO: 112756 - DNA, 3897 bp, Artificial Sequence
  derived and/or modified sequence
atgtctgccccagctggcagcagccaccctgctgccagcgcccgcatcccccccaagtttggaggagctgctgtgtctggagctgctgccccagctggccctggggccggccctgccccccaccagcagaatgagaccggcttccaccacgtggcccaggccagcctggagctgctggaccccagcaacctgcctgccagcgccagccagattgctggcagcactggacctgcccagaaccagatgcaggtgcccagcggctacggcctgcaccaccagaactacatcgcccccagcggccactacagccagggccctgggaagatgaccagcctgcccctggacacccagtgtggggactactacagcgccctgtacacagtgcccacccagaatgtgacccccaacacagtgaaccagcagcccggggcccagcagctgtacagccggggccccccagccccccacatcgtgggcagcaccctgggcagcttccagggcgccgccagcagcgccagccacctgcacaccagcgccagccagccctacagcagctttgtgaaccactacaacagccctgccatgtacagcgccagcagctctgtggccagccagggcttccccagcacctgtggccactacgccatgagcacagtgtccaatgctgcctaccccagcgtgtcctaccccagcctgcctgctggggacacctacggccagatgttcaccagccagaatgcccccaccgtgcggcctgtgaaggacaacagcttcagcggccagaacacagccatcagccaccccagccccctgccccccctgcccagccagcagcaccaccagcagcagagcctgagcggctacagcaccctgacctggagcagccctggcctgcccagcacccaggacaacctgatccggaaccacacaggcagcctggccgtggccaacaacaaccccaccatcaccgtggccgacagcctgagctgccctgtgatgcagaatgtgcagccccccaagagcagccctgtggtgtccacagtgctgagcggcagcagcggcagcagcagcaccaggaccccacccacagccaaccaccctgtggagcctgtgacctctgtgacccagcccagcgagctgctgcagcagaagggcgtgcagtacggggagtatgtgaacaaccaggccagcagcgcccccacccccctgagcagcaccagtgatgatgaggaggaggaggaggaggatgaggaggccggcgtggacagcagcagcaccaccagcagcgccagccccatgcccaacagctatgatgccctggagggcggcagctacccagacatgctgagcagcagcgccagcagccctgccccagaccctgcccctgagccagaccctgccagcgccccagccccagccagcgccccagcccctgtggtgccccagcccagcaagatggccaagcccttcggctacggctaccccaccctgcagcccggctaccagaatgccacagcccccctcatcagcggcgtgcagcccagcaaccctgtgtacagcggcttccagcagtacccccagtacccaggagtgaaccagctgagcagcagcatcggcggcctgagcctgcagagcagcccccagcctgagagcctgcggcctgtgaacctgacccaggagaggaacatcctgcccatgacccctgtgtgggcccctgtgcccaacctgaatgctgacctgaagaagctgaactgcagcccagacagcttccgctgcaccctgaccaacatcccccagacccaggccctgctgaacaaggccaagctgcccctgggcctgctgctgcaccccttccgggacctgacccagctgcctgtgatcaccagcaacaccatcgtgcgctgccgcagctgcaggacctacatcaacccctttgtgtccttcatcgaccagaggcgctggaagtgcaacctgtgctacagagtgaatgatgtgcctgaggagttcatgtacaaccccctgaccaggagctatggagagccccacaagaggcctgaggtgcagaacagcacagtggagttcatcgccagcagtgactacatgctgcggcccccccagcctgctgtgtacctgtttgtgctggatgtgagccacaatgctgtggaggccggctacctgaccatcctgtgccagagcctgctggagaacctggacaagctgcccggggacagcaggacccgcatcggcttcatgacctttgacagcaccatccacttctacaacctgcaggagggcctgagccagccccagatgctgattgtgtctgacattgatgatgtgttcctgcccaccccagacagcctgctggtgaacctgtatgagagcaaggagctgatcaaggacctgctgaatgccctgcccaacatgttcaccaacacccgggagacccacagcgccctgggccctgccctgcaggccgccttcaagctgatgagccccaccggcggccgggtgtctgtgttccagacccagctgcccagcctgggcgccggcctgctgcagagccgggaggaccccaaccagaggagcagcaccaaggtggtgcagcacctgggccctgccacagacttctacaagaagctggccctggactgcagcggccagcagacagctgtggacctcttcctgctgagcagccagtacagcgacctggccagcctggcctgcatgagcaagtacagcgctggctgcatctactactaccccagcttccactacacccacaaccccagccaggccgagaagctgcagaaggacctgaagcgctacctgaccaggaagattggatttgaggccgtgatgaggatccgctgcaccaagggcctgtccatgcacaccttccacggcaacttctttgtgcgcagcacagacctgctgagcctggccaacatcaacccagatgctggctttgctgtgcagctgagcattgaggagagcctgacagacaccagcctggtgtgcttccagacagccctgctgtacaccagcagcaagggggagcggcgcatccgggtgcacaccctgtgcctgcctgtggtgagcagcctggctgatgtgtatgccggcgtggatgtgcaggccgccatctgcctgctggccaacatggctgtggacagatctgtgagcagcagcctgagtgatgccagagatgccctggtgaatgctgtggtggacagcctgagcgcctacggcagcacagtgagcaacctgcagcacagcgccctgatggcccccagcagcctgaagctgttccccctgtatgtgctggccctgctgaagcagaaggccttcagaacaggcaccagcacccggctggatgacagagtgtatgccatgtgccagatcaagagccagcccctggtgcacctgatgaagatgatccaccccaacctgtacagaattgaccggctgacagatgaaggagctgtgcacgtgaatgacagaattgtgccccagccccccctgcagaagctgtctgctgagaagctgacccgggagggcgccttcctgatggactgtggctctgtgttctacatctgggtgggcaagggctgtgacaacaacttcattgaagatgtgctgggctacaccaactttgccagcatcccccagaagatgacccacctgcctgagctggacaccctgagcagcgagcgggcccggagcttcatcacctggctgcgggacagccggcccctgagccccatcctgcacatcgtgaaggatgagagccctgccaaggccgagttcttccagcacctgattgaggacagaacagaagctgccttctcctactatgagttcctgctgcacgtgcagcagcagatctgcaagtag

SEQ ID NO: 112757 - DNA, 3897 bp, Artificial Sequence
  derived and/or modified sequence
atgagcgcccccgccggcagcagccaccccgccgccagcgcccggatccctcccaaattcggaggcgcggccgtatccggcgccgctgccccagcagggcctggagccggcccagcgccgcatcagcaaaatgagactgggttccatcatgtcgctcaggcctccctagagctactcgacccctcaaatctcccagcatctgcatctcaaatcgcggggagcacaggccctgctcaaaaccaaatgcaagtaccaagcggctacgggctgcatcatcaaaactatattgcaccctcaggacactactcccagggccccggcaagatgacttcattgccgctcgatacccaatgcggtgattattattccgctctgtatacggtaccgacccaaaacgtaacccccaacaccgtgaatcagcagcccggggcccagcaactgtattctcgaggaccccctgccccccacatcgttggcagcactctgggctccttccaaggcgccgcttctagcgccagccatctacacacatccgcttctcagccttattccagttttgtgaaccattacaatagtccagctatgtactctgctagcagtagcgtcgcttcccaaggtttcccctctacatgtgggcactacgcaatgtctacggtcagtaacgctgcttatccaagtgtgtcatatccctctttaccagccggcgatacctacggccagatgttcacttcccaaaacgcccctactgtcagacccgtgaaggataatagttttagcggtcagaatacagcgatttcacaccctagccctctcccccctctgccgagccagcagcatcatcaacaacaaagcctaagcggttattcaacactgacatggtcttccccaggtttgccatccacacaagacaacctgatcaggaatcatactggaagcctggctgtcgcaaataacaacccgaccatcacggtcgcagactccctgtcatgtcctgtgatgcagaacgtgcaacccccaaagtcttccccagtagtctctactgtattgtccgggagcagtggctcctctagtactaggacccctcctaccgctaaccatccagtcgagccggtgacctccgttacccagccttctgaactgctacagcagaaaggagtccagtacggagagtatgtgaataatcaggcatccagcgcccccacaccactgagcagtactagcgatgacgaagaagaggaggaagaggacgaggaggccggagttgacagttcatcgacaacatcttctgcctcccccatgcctaactcttatgatgccttagaaggcggctcctaccctgacatgctgagcagcagcgcttcctctccagcaccagaccctgcacctgagccagaccccgctagcgctccagctcccgcatccgccccagcccccgtggtcccgcagccttccaaaatggcaaagccattcggttatggctatcctacactgcagcccggctaccagaacgccactgcacctttgattagcggcgtccagccttctaaccctgtatacagcggttttcagcagtacccgcaatatccaggggtcaatcagctgtcaagcagcattggcgggttatcccttcagtcatcaccgcagccagaatccctgcgtcctgtcaatcttacccaggaacgcaatatcctccctatgacacctgtttgggcccccgtgccaaatttgaatgctgatcttaaaaagctgaattgtagcccagattcttttcggtgtaccttaactaacatccctcagacacaggccctccttaacaaagcaaagttaccactcgggttactcctgcatccgtttagggacctcactcagctgccagtgatcacctccaacactatagtcaggtgccgaagctgccgaacatatattaatccgttcgtttctttcattgatcaaagaagatggaaatgtaatctgtgttatagggtgaacgacgtccctgaggagtttatgtataatccactaacacgcagttatggtgaaccacacaaaagacctgaggttcagaatagcaccgtggagttcattgcctcctcggactacatgctgagaccacctcagcctgccgtgtatctgttcgtgttggatgtgtcacataatgccgtagaggccggctatttgactattctgtgccagagcctgctggagaaccttgataagctgccaggcgatagccgaacacggattgggtttatgacctttgactcaaccattcatttttacaatctgcaagagggcctcagtcagccgcagatgctgattgtgagtgatatcgatgatgtgtttctccctactccagatagcctgctagtgaacttatacgagtccaaggaactcattaaagaccttcttaatgccctgcctaatatgtttacaaacacacgagagacgcacagtgctcttgggcccgctttacaggccgcctttaaactcatgtcccccacaggaggccgggtatctgtgttccaaacgcagttaccgagcctgggagccggcctgctacagagccgcgaggaccctaatcaaagaagtagcactaaggtagtgcagcatctgggcccagccacggatttttataagaaactcgctctagactgctcgggtcaacagaccgctgtagaccttttcctgctgagttcacaatatagcgaccttgcttccttggcttgtatgtccaaatattccgcgggatgtatatactactatcctagctttcattacacacataacccaagccaggcagaaaaactgcagaaggaccttaaacgctacctgacacgaaagattggattcgaggccgtgatgagaatcaggtgtacgaagggcctgtcgatgcacacattccatggtaatttttttgtgaggagcacagatctgctgagcctggcaaacatcaacccagatgcaggtttcgctgtgcaactctccatcgaggagtctttgacagatactagcctggtgtgttttcagactgccctcttgtacactagttctaaaggtgagcgccgaattcgagtacacacactatgtcttcctgtcgtgagtagcctagccgatgtgtacgccggagtggacgtgcaggccgccatttgtttgctggctaatatggcggtggaccgttcggtctcatcgtcactttccgatgctcgagatgctctggtgaacgccgtcgttgatagtctctccgcctacggaagcactgtttctaatcttcagcacagcgcactgatggccccaagttctctgaaactcttccctttgtacgtgctggctctgctgaagcagaaagccttccggacaggaacctctacgcgtctcgatgatcgcgtgtatgccatgtgtcaaataaagtctcagccactggtgcacctgatgaaaatgattcaccctaatttatatcgtatcgaccgtctgacagatgaaggcgccgtgcatgtgaacgatcgtatagtaccccagcccccccttcagaagctgtccgcagagaaacttaccagggaaggagcctttctgatggactgcgggtctgttttctatatttgggtgggtaagggatgcgacaacaactttattgaagacgtgctcggctatacaaactttgcttcaattcctcagaagatgacacacctgcctgagctcgatacattatcttcagaacgggcacggagtttcataacatggctgcgtgatagccgccctttgagtcccattctgcacattgtgaaagatgaatcaccagccaaggctgaattcttccagcacctcatcgaggaccggacagaagcagcgtttagctattacgagttcctccttcacgtccagcaacagatctgcaagtag

SEQ ID NO: 112758 - DNA, 3897 bp, Artificial Sequence
  derived and/or modified sequence
atgagcgcaccagcaggaagtagccatcctgccgcaagcgctagaattccacccaagtttggcggagctgcagtatccggcgctgcggctcccgctggcccaggggcagggccagcaccgcaccagcagaacgagaccggttttcaccacgtcgctcaagcctctctggagctcctggatccctcgaatttaccggcatctgctagccagatcgccggatcaaccgggcctgcccagaatcagatgcaggtgccaagcggatatgggctgcaccatcagaactatattgccccaagtggccactacagccaaggaccagggaaaatgacctccctcccactcgatacacaatgtggcgattattactcagctttatacaccgttcccacacagaatgtgactccaaataccgtcaaccaacagcccggagcacaacagctctactcgcggggacccccagccccacacatagttgggagcaccttgggcagcttccagggcgctgcttcaagcgccagtcacttgcatacctctgcctcacagccctattcttccttcgtgaaccactacaactcgcctgcaatgtacagcgccagtagctccgtggcctcccagggttttccgtccacttgcggccattacgccatgtctactgtctccaatgccgcttaccctagcgtctcttaccccagtttgcctgcaggtgatacctacgggcaaatgttcaccagccagaacgcacctacagtgcggccagttaaggataactcgttctcaggtcagaataccgccatttcccatccatccccacttcccccactcccatcacagcagcatcatcaacagcaaagcctatcaggctacagtacccttacctggagctctccgggactccccagcacccaggataacttaatcagaaatcacaccggctccctcgcggtagccaacaacaatccaacaatcaccgttgcagactctctttcttgtcctgtgatgcaaaacgtgcagccacccaagtctagtcctgtggttagcacggtgctgagtgggtctagcgggtcatcaagcacccggacaccacctactgccaatcacccagtggagcccgtgaccagcgtaacacagccaagtgagttactccagcagaaaggcgtacaatatggtgagtacgtgaacaatcaagccagcagcgccccaaccccactctcatccacttcggacgatgaggaggaggaggaggaggatgaggaggcgggagtcgattcatcctctacaaccagtagcgcctctccaatgccgaacagctacgatgctctggagggaggaagctatcccgatatgctgtcctcttcagcttcctctcccgcacccgaccctgcccctgagcccgacccagctagcgcacccgcaccggcaagtgccccagctcccgtcgtcccacagcccagcaagatggctaaaccgttcgggtatggatacccgacccttcagcccggataccagaacgcaaccgctccactgatctctggggtccagccttccaatcctgtttatagcgggtttcagcaatatcctcagtaccctggtgtcaaccagttaagctcatccataggtggattgagtttgcagtcctcccctcagcctgagagcctccgccctgttaaccttacacaggaacggaacatactgccaatgacacctgtgtgggctccagttcctaatcttaatgcggacctgaagaagcttaattgctcccctgactcctttcggtgtaccctcaccaatatcccgcaaactcaagccctcttgaataaagccaaactgcccttaggcctgctcctccatccatttcgggaccttacccagctgccggtgattactagtaataccatcgtgcggtgtaggtcgtgccggacatatattaacccatttgtaagcttcatcgatcagcgtcggtggaagtgcaacttgtgttacagggttaatgacgtgccagaggagttcatgtacaatcctctgactcgaagttacggcgaaccccataagcggccagaggtacagaattcaacggtcgagtttatcgcatcttctgattatatgctgcggccaccccaacctgcggtatacctgttcgtattggatgtctctcataatgccgtggaggcaggctaccttaccatcctttgccagtccctgcttgagaacctagacaagctaccgggagattcacgaactcggatcggtttcatgaccttcgatagtacaatccatttttataacctacaggaggggctgtcacagccacaaatgctgattgtgtcggatatcgacgatgtctttttgcccacaccagactccctgctagtgaacttgtacgagtccaaggagctgattaaagacctcttgaatgcactccccaatatgttcactaacacgcgtgagacacacagtgctctcggtcccgcactgcaggcagcattcaagctgatgagccccacggggggacgggtatcagtttttcagacccagttacctagcttaggcgctggcctcctgcagtcacgagaggacccaaatcagcggtcctcgacaaaagtggtgcagcacctcggcccagccaccgatttctacaaaaagctggcgttagattgctcaggccagcagactgctgtcgacctttttctgctgtcctcccagtattcggacctggcatctctggcctgcatgtctaaatactccgctggatgtatttactattatccatcatttcattacacccacaatccctcacaagctgagaaactgcagaaagacttgaagcggtatcttactcgcaagattggattcgaagccgtgatgagaatcagatgcaccaaaggacttagcatgcatacttttcacgggaatttcttcgtgcgctcgactgacctgctctctctggcaaacatcaaccctgatgcagggttcgccgtccagctgtccatcgaagaaagccttactgacacctccctagtgtgttttcagactgcccttctctacacctcttccaagggcgaaaggcggatcagggttcacaccctttgtcttccagtggtcagctcacttgctgacgtctacgcgggtgtcgatgtgcaggcagctatctgcctgctggctaatatggccgtcgacagaagcgtaagcagctcgctgagcgatgctagagacgcacttgttaacgcagtagtggattcattatcagcatatgggtcaacagtttctaatctccagcatagtgctctgatggcccctagtagcctgaaattgttccccctttacgtgctagctctcctcaaacaaaaagcattccgaaccggaacctccacccgactggacgatagagtttatgcgatgtgtcaaataaagtctcagcctttggtccatttgatgaagatgatacaccctaatctgtaccggattgatcgcttaacagacgagggtgcggtccatgtcaacgataggatagtaccccagcctccgctccagaagttgtccgcagagaagcttactcgggaaggggcattcctgatggattgtggttccgtgttttacatctgggtgggtaaggggtgcgataacaactttatcgaagatgtgctgggctatacaaatttcgccagcatcccacagaagatgacccatctacctgagctggacacactgtcttcagagagggctaggtcattcatcacatggctgagagattctcggccacttagcccaattttgcacatcgtgaaggatgaatctcctgctaaagctgaatttttccagcacctgattgaggacaggaccgaagccgctttttcatactacgagtttctgttacacgtgcagcaacagatatgtaagtag

SEQ ID NO: 112759 - DNA, 4066 bp, Artificial Sequence
  derived and/or modified sequence
ggcgcgttccttcctcttcctctctcctctccggccccgccttcccttccctccgcccacctccctgaagcggagccgccgtcgccaccagcgccgtcatgtcggcccccgccgggtcctctcacccggccgccagcgcccggatcccgcccaagttcggcggagcggccgtctcaggagccgcagcgcccgcgggcccgggtgcgggcccggcgccgcaccagcagaacgagacgggatttcaccatgttgcccaagctagtcttgaactcctggacccaagcaatctgcccgcctcggcctcccaaattgctgggagtacaggtccagcccagaatcaaatgcaggttccatctggatatggattgcatcatcaaaactatattgctccctcaggacattactctcaaggacctgggaaaatgacctcattgccattggatacccagtgtggtgattactactctgctctctatacagtaccaacacaaaatgtgactcctaacacagtgaaccagcaaccaggagcacagcagttgtacagcaggggtcctcctgcccctcatattgtgggatccactctaggatctttccaaggtgctgcatcgtcagcatcccatttgcatacgagtgcctcccaaccatactcctcttttgtgaatcactacaatagtccagccatgtactctgccagctcttctgttgcgtctcagggatttccctctacttgtggtcattatgctatgtcaactgtttctaatgccgcgtatcctagtgtttcatatccctctctgcctgctggtgatacatatgggcaaatgtttacctcacagaatgctccgactgttaggccagttaaagataattcattctctggtcaaaatacagctatcagccatccatcgccacttccacctctaccatcacaacagcaccaccagcagcaaagtctttcaggatacagtactctaacgtggtcatctccaggccttccatcgactcaagacaatctcatccgaaaccacacaggatccctggctgtagcgaacaacaacccaaccattactgttgcagattctttatcctgtcctgttatgcaaaatgttcagcctcccaagtccagcccagtggtatccactgttttatcaggatcctcaggatcctcatcaacaagaacacctcccactgcaaatcacccagttgagcctgtgacctcagttacacagccatcagagctattacaacaaaaaggcgtgcagtatggtgaatatgttaataaccaagctagctccgcaccaactcccttgtcatcaacttccgatgatgaggaagaggaggaggaggatgaggaagcaggtgttgacagctcttctaccacaagcagtgcttctccaatgcccaacagttatgatgccctggaaggaggcagttacccagatatgctttcttcatcagcaagcagtcctgctcctgatcccgcccctgaacctgatcctgcttctgctccagctccagcttcagctccagctcctgtcgtccctcagccttcaaaaatggctaagccttttggctatggctatccaacacttcagcctggttatcagaatgctacagcaccacttatttctggagtacagcccagtaacccggtatattctggattccagcagtatcctcaatatcctggtgtgaaccagctatcctccagtataggaggattgagtcttcagagttctccacaaccagaaagcctgagacctgtaaaccttactcaggagaggaatattttacctatgactcctgtttgggctcctgtacctaacttgaatgcagacctcaaaaaattaaactgtagcccagattcatttcggtgtactttgacaaatattccacagacacaggctttactgaataaagctaagcttcctttaggattgttgttacatcccttcagagacctaacgcaattaccagtgataacatcaaataccattgtgaggtgccgatcctgtcgaacgtatattaacccctttgtatccttcattgatcaacgtagatggaaatgcaatttgtgctatagagtaaacgatgttcctgaagaatttatgtataacccccttacccgatcttatggagagcctcataaacgaccagaagttcagaattcaactgtggagttcattgcttcttcagattacatgctgcgtcctcctcaacctgcagtttacttgtttgttttagatgtgtctcataatgcagtggaagctggatatttgacaattttgtgccagtcactcctagaaaatctagacaagcttcctggagattcacgaacaagaataggattcatgacctttgatagcactattcatttctacaatttacaagaaggattatcacagcctcaaatgttgattgtgtctgatatagatgatgtttttctacctacaccggatagtttacttgtgaatctatatgaaagtaaagagcttataaaagacttactgaatgcattaccaaacatgttcaccaatacaagagaaacacacagtgcccttggtcctgcacttcaggctgcctttaaattaatgtctccaacaggtggccgtgtgtctgtatttcagacacagttaccttccttgggtgcaggacttctgcaatccagagaagatcctaatcagagatcaagtacaaaggtggtacaacatcttggccctgcaactgatttttataagaaacttgcattagattgctcgggacagcaaactgcagtggatttgttccttttaagttcacagtattctgatcttgcttctctagcttgcatgtccaagtattctgcagggtgcatctattattatccatcattccactatactcacaatccttcacaagcagaaaagttacaaaaagacctaaaacggtatctcacaagaaaaattgggtttgaagctgttatgagaataaggtgtactaaaggtctttcaatgcacacttttcacggtaacttctttgtccgttctactgatttgttatcccttgccaacatcaatcctgatgctggatttgcggtgcagttgtcaattgaagaaagtttaacagatacttccttagtatgttttcaaacagccctattatatacatcaagcaaaggtgagcggagaattagagtacatacactttgtttgccagtggtaagttcactagcagatgtatatgcgggagtggatgtacaagctgccatctgccttctggcaaacatggctgtggatcggtccgtttcatcaagtctgtcagatgcaagagatgccttagtgaatgctgtagtggactcattgtctgcatatggctcaactgtctcaaatttacagcactctgcattgatggcgcccagctccctcaagttgtttcctctctatgttttggcccttctcaaacagaaagcatttagaacgggtacaagcacacggctggatgatcgtgtatatgccatgtgtcagataaagtctcagccacttgttcatctaatgaaaatgattcatcccaacttatacaggatagacagattgacagatgagggtgcagtacatgttaatgacaggattgtaccacagccacctcttcaaaaattgtctgcagagaagctgacaagagaaggtgctttccttatggactgtggctctgttttttacatttgggttgggaaaggctgtgacaataacttcatagaggatgtgcttggatatactaattttgcatcaataccacagaaaatgacacatcttccagagctagatacactttcatcagaaagagccagatccttcataacttggcttagagacagcagaccattaagtccaatccttcacatagtaaaagatgagagtcctgccaaagcagaattttttcagcatttgattgaagaccggacagaggctgcattttcttactatgaatttttgcttcatgttcagcagcagatttgtaagtgaagtagaataaaattgaataagaaaaagatctataacctaggtaaagcataatctgtcagagaagcgcgtga

SEQ ID NO: 112760 - protein, 410 aa, Artificial Sequence
  derived and/or modified sequence
MEGHEASPAQVGQGDRGKVRFLEQQNKVLETKWHLLQQQGLSGSQQGLEPVFEACLDQLRKQLEQLQGERGALDAELKACRDQEEEYKSKYEEEAHRRATLENDFVVLKKDVDGVFLSKMELEGKLEALREYLYFLKHLNEEELGQLQTQASDTSVVLSMDNNRYLDFSSIITEVRARYEEIARSSKAEAEALYQTKYQELQVSAQLHGDRMQETKVQISQLHQEIQRLQSQTENLKKQNASLQAAITDAEQRGELALKDAQAKVDELEAALRMAKQNLARLLCEYQELTSTKLSLDVEIATYRRLLEGEECRMSGECTSQVTISSVGGSAVMSGGVGGGLGSTCGLGSGKGSPGSCCTSIVTGGSNIILGSGKDPVLDSCSVSGSSAGSSCHTILKKTVESSLKTSITY

SEQ ID NO: 112761 - protein, 291 aa, Artificial Sequence
  derived and/or modified sequence
MELEGKLEALREYLYFLKHLNEEELGQLQTQASDTSVVLSMDNNRYLDFSSIITEVRARYEEIARSSKAEAEALYQTKYQELQVSAQLHGDRMQETKVQISQLHQEIQRLQSQTENLKKQNASLQAAITDAEQRGELALKDAQAKVDELEAALRMAKQNLARLLCEYQELTSTKLSLDVEIATYRRLLEGEECRMSGECTSQVTISSVGGSAVMSGGVGGGLGSTCGLGSGKGSPGSCCTSIVTGGSNIILGSGKDPVLDSCSVSGSSAGSSCHTILKKTVESSLKTSITY

SEQ ID NO: 112762 - DNA, 306 bp, Artificial Sequence
  derived and/or modified sequence
atgctggtgggcaacagagccagagagagagagctgaagcaggacagaagaggcctggagatcgcctgggacctgatgaagagacaggactgcttcagagaggccgcccacggcagcgccagcgagcaggtggccctggagcccatcctgtgctgcgacgaggtggccagccaggagcaccacgagggcggcaagggcagccccagaagagagagcaccgtgcaggtgcccggcggcgaccacggcaccctggagctgccctggtgcgtgtacttccagatcgtgagcggcatcaccctgagatag

SEQ ID NO: 112763 - DNA, 306 bp, Artificial Sequence
  derived and/or modified sequence
atgctggtgggcaacagagcccgggagcgggagctgaagcaggaccggcggggcctggagatcgcctgggacctgatgaagaggcaggactgcttccgggaggccgcccacggcagcgccagcgagcaggtggccctggagcccatcctgtgctgtgatgaggtggccagccaggagcaccatgaaggaggcaagggcagcccccggcgggagagcacagtgcaggtgcctggaggagaccacggcaccctggagctgccctggtgtgtgtacttccagatcgtgtctggcatcaccctgaggtag

SEQ ID NO: 112764 - DNA, 306 bp, Artificial Sequence
  derived and/or modified sequence
atgctggtgggcaaccgggcccgggagcgggagctgaagcaggacaggaggggtcttgaaatcgcctgggatcttatgaaacgacaggattgtttccgtgaagctgcacatgggtctgcatcggaacaagtggcactggaacctattttgtgctgtgacgaggtggccagccaggaacatcatgagggcggtaagggatccccccgcagggagagcacggtgcaggtcccggggggcgaccatggcacattagagctgccctggtgtgtatattttcagattgtcagcggaatcactcttagatag

SEQ ID NO: 112765 - DNA, 306 bp, Artificial Sequence
  derived and/or modified sequence
atgctggtcggcaatcgtgccagggagagggagctgaagcaggatagacgaggtctggagatcgcctgggacctcatgaagaggcaggactgctttcgcgaggccgcacacgggtcagcctcagagcaggtagcacttgagcctatcctctgctgtgatgaagttgccagtcaggaacaccatgaggggggaaaaggcagtcctcggcgagagtctacagtacaggtgcccggtggagaccatggcaccctcgagctgccctggtgtgtttatttccaaatcgtttctggaatcactctgcgatag

SEQ ID NO: 112766 - DNA, 1744 bp, Artificial Sequence
  derived and/or modified sequence
aaaacaaaaaccaccaaaaaaaaactgccaaagtataggttatagaagagcagacttacttggtgtttgcaagaaagacaaagagatttagagtttccatcaagtttgttgtgagttactaggaggtagtgccagagaagcaacatggcattaggctgcatgggtagaagtatagtactgagaacacgggagagcatcggttttgttgtacttgggactaaacattctgagggtcctggacgttttatgagaggctttggtaaactgaagagtgatgtaggtacagatgcacagatgtagaacagtgcccctgcgccagcccagcatcaatactttttttaaaaagtgccctgtattttcctcatgccctggagataatggagccgtcttttactcactgcccacttctcatctctgtctgctcctgcttcctcttgttggcttcctgtgcctccctccaaccttctcctacccccctgcagtgttttaaactctcttttcttcttaatttctgttcgcctcaaccaaccctaaagtgctcttgtactcacagttaggcttttataattgcttgatcagtttatcagtcaatttcagtattttgttgagctttgacaaagatttttattctaattctatggagcccatgtaataattgttttttcagcttctgcttgtgacttctctacttcaaaaaatgtacgtgcttgtttctgccagttacatcccatgtttcattggatgtgtgtactgtgttcacatcgagttggccccaccgctgagtgggttattgatgatctcaagagtccagtagaaatgaagggtagaaacttagccacatcctggtttgtgttttgcctaacagaggggtttcactttcctctttggtaagatgaatatgcttgataatagaatagcattaaggttggcttttttctccctcaaatgattaaactgtagtttcatatgtaaatgccagtaaattagaatcattctagtagggaagataaagtaaataagtaaaaatatagtatgttagtaggaaatcgtgctagagagagagagctcaagcaggacaggaggggcctagagattgcttgggatttgatgaagagacaggactgttttagagaggctgctcacggcagtgcctctgagcaggtagcactggagccgatcctctgctgcgatgaggtggcaagccaagaacatcatgagggagggaagggcagtcccagaagagagagcacagtgcaggtgccaggtggggaccacgggacactggaactgccttggtgtgtttatttccaaatagtgtctggcattacactgagatgaggagacttttttgtttttcattttttgtttttttttcccggggtaggggtgcatattggatttcttcaggagattcagcctcttgaaaaatatgaaatatagacaagtatatatacataaagatatatttgagtattttaaactttatatagccaagtatcttaaactctgcacacttgaatttttaatcctcgtgtatatccattatgattatttctattagttccagtttgaggttggtgatgatattgtcatagaagctttgtcaggcttcacattgtagcagctggtcttgaaggtggggcatatccttgttcaatgtgactactttagttgcctgtccaatatgaagtagaaaagcagatttctggattacagtatttgtcaacatagaatttgccgattt

SEQ ID NO: 112767 - DNA, 1233 bp, Artificial Sequence
  derived and/or modified sequence
atggaaggccacgaggctagtcccgcacaggtcgggcagggggacaggggaaaggtccgctttttagagcagcaaaataaggtcctcgaaacaaagtggcatttactgcagcagcaggggttgagtgggtcccagcaggggctggaacctgtgtttgaggcatgtctcgatcagcttcgcaagcaacttgaacagctgcagggcgagcgaggagcccttgacgctgaactcaaggcttgcagagatcaggaagaggagtacaagtctaaatacgaagaggaggcccacaggagagccaccctggaaaatgattttgtggtccttaaaaaggatgtcgatggagtgttcctgtctaaaatggagttggaaggtaagcttgaggccctcagggagtacctgtactttttgaagcacctgaatgaagaagagttgggtcagctccagacacaagccagcgatactagcgtggtgctgagtatggataataacaggtacctggacttctctagcattattaccgaggttcgggccagatacgaggagatcgctcggagttctaaagccgaggctgaagccctttaccagaccaagtaccaagaactgcaggtgagtgcccagctacatggggacaggatgcaggaaactaaggttcagatatctcagctacatcaagagatacagcggttacaatctcagaccgaaaacctcaaaaagcaaaatgcctcactgcaagctgctatcacagacgctgaacaacggggagaactagctcttaaagacgcccaagctaaagtagacgaactcgaggccgcccttcggatggccaaacaaaacctcgctagacttttgtgcgagtatcaggaattgacgagtacaaaactgagcctggatgtggagatcgcaacatatcgccggcttctggaaggagaggaatgtcggatgagcggagagtgtaccagtcaggtgaccatttctagtgttggaggatccgcagtgatgtctggtggagtgggcggagggctcggatctacatgcggtcttggcagcggcaagggctcacccgggagctgttgcaccagtatagtcaccggaggatccaatattatcctgggaagtggaaaggaccctgtcttggatagctgttccgttagtggatcctccgccggatcttcctgtcacacaatcctcaagaaaaccgtggagtcctccctgaagacaagtatcacttattag

SEQ ID NO: 112768 - DNA, 876 bp, Artificial Sequence
  derived and/or modified sequence
atggagctggagggaaaacttgaagcactgagagagtatttgtattttcttaaacatctgaacgaggaggaactgggacagttgcagacgcaggcctctgatacgtcagtagtactgtccatggacaacaatcgatatctggacttttctagcatcatcactgaggtgcgggctcgctacgaagaaattgcccgttccagtaaagctgaggctgaggcactttatcaaaccaaatatcaggagctacaggtgtctgcgcagctacacggcgacagaatgcaagagaccaaggtgcaaatatcacaactgcatcaggagatacagcggctgcaatctcagaccgaaaatctcaagaaacagaacgcatctcttcaggccgccatcactgatgccgaacagaggggagaactggcccttaaggacgcacaggccaaagtcgatgaattggaggcggcccttaggatggcaaaacagaatctggcacgcttgctgtgtgaataccaggagttgacctctaccaaactgtctcttgacgtggaaatcgctacgtacagaaggctgctggaaggtgaagaatgtagaatgtcaggcgagtgtacgagccaagtgactatcagttcagtgggtgggtctgccgtgatgtccgggggtgttggcgggggactgggctcaacttgtggcctgggctccggaaagggcagccccggctcatgttgcacctccattgtcacgggaggttccaatattattctggggagcggtaaggatcccgtccttgattcttgctctgtgtccgggtcctccgcaggctcctcatgccacacaatcctaaagaagacagtcgagagctcactaaagactagcattacatattag

SEQ ID NO: 112769 - DNA, 2554 bp, Artificial Sequence
  derived and/or modified sequence
gttcagagtgtcatggaaggtcatgaggcttcccctgcccaggttgggcagggggacaggggaaaggtgcggttcctggagcagcagaacaaggtcctggagacgaagtggcatctgctgcagcaacaggggttgagtggcagccagcagggcctggagcctgtctttgaggcctgcctggatcagctcaggaagcagctggagcagctccagggagaacgaggggctctggatgctgagttgaaggcctgccgggaccaggaggaggagtataagtccaagtatgaggaggaggcccacaggcgtgccacacttgagaacgactttgtggtcctcaagaaggatgtggatggggttttcctgagcaagatggagttggagggcaagctggaggctctgagagagtacctctacttcttgaagcatctgaatgaagaagagctgggccagctccagacccaggccagcgacacgtctgtggtgctgtccatggacaacaaccgctacctggacttcagcagcatcatcactgaggtccgcgcccggtacgaggagatcgcccggagcagcaaggctgaggctgaggccttgtaccagaccaagtaccaggaacttcaggtgtctgcccagcttcatggggacaggatgcaggaaacgaaagtccagatctctcagctacaccaagagattcagaggctgcagagtcagactgagaacctcaagaagcagaacgccagcctgcaggccgccatcactgatgctgagcagcgtggggagctggccctcaaggacgctcaggccaaggtggacgagctggaggctgctctgaggatggccaagcagaacctggcccggctgctgtgcgagtaccaggagctgacgagcacgaagctttccctggatgtggagattgccacttaccgcaggctgctggagggcgaggagtgcaggatgtctggggagtgcaccagccaggtcactatctcctcggtgggaggcagcgctgtcatgtctggaggagttggtggaggcttggggagcacttgtggactcggtagtgggaaaggcagccctgggtcctgctgcaccagcattgtgactggaggctccaacatcattctgggctctgggaaggaccctgttttggattcctgctctgtgtctggctccagcgctggctccagctgccacaccatcctgaagaagacagttgagtcgagtctgaagacatccatcacctactgagcgacccagcagccacctccttcctgaacacatttggcccactccccccatcagccggctctgcaaggccaactccgtgtccgctgcccacagcccaagccagcccacagcggatgctgcaaaaatcaataaagtctcccctcctgctgttctgaatgctctaagtgcttgcacacctcacccagcaaaacaaaagctgtgtggctccccagcttcctctcctcggaaggcaattgtggcatatctgtgtccagacgtgttctattggtatctcactccacatcccagccactctatcaagggatccttcaagctctccagtgtgttccttggggtgccctccatctcccacaactccactgatgttttagctgtgcttgtagctcacttcctcatcaactgcctgttttaagaggttctagtcctgactggggcagcccccttccttcttgttcctccttcttcctgactgtgcaccaaaattttctccttttaggaaccttctctaattcccatgtctaaactactgggcccttcctgtccctggcagtctggctgcacctgttgctgtcctgggtgctatgtctgtctggctctggtaagggactcagcttctctattagcctggcactcctgcatccaggatgaggatgtgctcagcttgtgcctgggggctctgatggagattggggttcaaactctgcccctacccccttatctgttggctctcatcttatccttgggcaagtgtgaacatgaggctggaaacttctcctccttcctctccttcaggaagctctgcaggaagccaggagtgtgggaatcaggtggggtgccaggaggggctggaaggatcaccttttctacacacccccagcagcctcatgggtgcctgcagttgctctttccccattctcgctttccagacccaggtgggggacctggctcaaccccaaactccatagtctgggctgcaggaggtcacactacgcctctccttgctttagagggagggcagacctttcctcagattcatgaatcgctccatccaaattatgcaagaaggcttttcagctttgtgtgaaggagaccagagccggtgaggatgtggcttgaatcccagctctgctgtttcctagtggtgtgaccttgatcaagcagcttgacctcttcagttacctcatctgtaaaaagagattaataataatatgtacctcacagggctgtgtggcgacagtgccactaggatcccagaaggaaactaaattcatccaaggtagttcaattaaattgactttttgaaaaagta

SEQ ID NO: 112770 - DNA, 1233 bp, Artificial Sequence
  derived and/or modified sequence
atggagggccacgaggccagccctgcccaggtgggccagggcgaccggggcaaggtgcgcttcctggagcagcagaacaaggtgctggagaccaagtggcacctgctgcagcagcagggcctgagcggcagccagcagggcctggagcctgtgtttgaggcctgcctggaccagctgaggaagcagctggagcagctgcagggcgagcggggggccctggatgctgagctgaaggcctgccgggaccaggaggaggagtacaagagcaaatatgaggaggaggcccacagaagagccaccctggagaatgactttgtggtgctgaagaaggatgtggatggagtcttcctgagcaagatggagctggagggcaagctggaggccctgcgggagtacctgtacttcctgaagcacctgaatgaggaggagctgggccagctgcagacccaggccagtgacacctctgtggtgctgtccatggacaacaaccgctacctggacttcagcagcatcatcacagaggtgcgggcccgctatgaggagatcgcccggagcagcaaggccgaggccgaggccctgtaccagaccaagtaccaggagctgcaggtgtctgcccagctgcacggggacaggatgcaggagaccaaggtgcagatcagccagctgcaccaggagatccagaggctgcagagccagacagagaacctgaagaagcagaatgccagcctgcaggccgccatcacagatgctgagcagagaggagagctggccctgaaggatgcccaggccaaggtggatgagctggaggccgccctgaggatggccaagcagaacctggcccggctgctgtgtgagtaccaggagctgaccagcaccaagctgagcctggatgtggagatcgccacctaccgccgcctgctggagggggaggagtgcaggatgtctggagaatgtaccagccaggtgaccatcagctctgtgggcggcagcgctgtgatgtctgggggcgtgggcggcggcctgggcagcacctgtggcctgggcagcggcaagggcagccctggcagctgctgcaccagcatcgtgactggaggcagcaacatcatcctgggcagcggcaaggaccctgtgctggacagctgcagcgtgtctggcagcagcgctggcagcagctgccacaccatcctgaagaagacagtggagagcagcctgaagaccagcatcacctactag

SEQ ID NO: 112771 - DNA, 876 bp, Artificial Sequence
  derived and/or modified sequence
atggagctggagggcaagctggaggccctgcgggagtacctgtacttcctgaagcacctgaatgaggaggagctgggccagctgcagacccaggccagtgacacctctgtggtgctgtccatggacaacaaccgctacctggacttcagcagcatcatcacagaggtgcgggcccgctatgaggagatcgcccggagcagcaaggccgaggccgaggccctgtaccagaccaagtaccaggagctgcaggtgtctgcccagctgcatggagacaggatgcaggagaccaaggtgcagatcagccagctgcaccaggagatccagaggctgcagagccagacagagaacctgaagaagcagaatgccagcctgcaggccgccatcacagatgctgagcagagaggagagctggccctgaaggatgcccaggccaaggtggatgagctggaggccgccctgaggatggccaagcagaacctggcccggctgctgtgtgagtaccaggagctgaccagcaccaagctgagcctggatgtggagatcgccacctacagaaggctgctggagggggaggagtgcaggatgtctggagagtgcaccagccaggtgaccatcagctctgtgggcggcagcgctgtgatgtctggaggagtgggcggcggcctgggcagcacctgtggcctgggcagcggcaagggcagccctggcagctgctgcaccagcatcgtgactggaggcagcaacatcatcctgggcagcggcaaggaccctgtgctggacagctgcagcgtgtctggcagcagcgctggcagcagctgccacaccatcctgaagaagacagtggagagcagcctgaagaccagcatcacctactag

SEQ ID NO: 112772 - DNA, 1233 bp, Artificial Sequence
  derived and/or modified sequence
atggagggccacgaggccagccccgcccaggtgggccagggcgaccgtggcaaggtcagatttctcgaacagcaaaacaaagtactggagaccaaatggcatttgctacagcagcaaggcctcagtggatcccaacaaggactcgagcctgtattcgaagcctgtctggaccagttgcgcaaacagctggagcaacttcagggggagcgcggggccctcgatgccgaactcaaggcgtgcagggaccaggaagaggagtataaaagtaaatacgaggaggaagcacacaggcgagctacgctggagaacgattttgtagtgctgaagaaagatgtggatggcgttttcctttccaagatggaactggaggggaaactagaagcacttagggagtacctgtactttctgaagcatctcaacgaagaggagttaggccagctgcagacgcaagcatcagatacttctgtggtattaagtatggacaataacaggtatctggatttttccagcatcattactgaagtccgtgccaggtatgaagaaatagctcggagttcaaaagccgaagctgaagccctgtaccagactaaatatcaggaactgcaggtttcagctcagttgcatggcgaccgcatgcaggaaaccaaggtgcagatcagtcagttacatcaggagattcagagattgcaatcacaaaccgaaaaccttaagaagcaaaatgctagtcttcaggcggccatcacggacgcagagcaacgcggggagctagctcttaaggacgcacaggccaaggtagatgagcttgaggccgcgctgcgcatggccaaacagaacctggccagactgttgtgcgagtatcaagagcttactagtaccaaattgtctcttgatgtggagatcgcgacatatagacggctgctcgagggagaggagtgcagaatgtccggcgagtgcacgagtcaggtgacaatctctagcgttggggggagtgccgtcatgtccggtggggttggcggtgggcttgggtcaacatgcgggctgggctccggaaaaggctccccggggagctgttgtacctcaatcgtgacaggcggatccaacattatcctcgggtccggcaaagaccctgtcctggatagttgtagcgtgagtggcagcagtgctggatctagctgtcatacaattttaaaaaagaccgtggagagttccctcaaaacctccatcacttattag

SEQ ID NO: 112773 - DNA, 876 bp, Artificial Sequence
  derived and/or modified sequence
atggagctggagggcaagctggaggccctgcgggagtacctgtactttcttaagcatttgaacgaggaagaactggggcagctgcagactcaggcgtctgatacctcagtcgtcctgtcaatggacaacaatcggtatctggacttttcatctattataacagaggtgcgggctcgttacgaggagattgctcggagcagcaaggctgaggcggaggctctctatcagaccaagtatcaagaactgcaggtctccgcacagttgcatggggatcgaatgcaggaaacaaaggttcagatatctcagcttcaccaggagattcagcgcctgcagagccaaaccgaaaatctgaagaaacagaacgcatccctgcaggccgccattacggatgctgaacagcgcggagagctggctcttaaagacgcacaggcgaaggttgacgagctcgaggcagcacttagaatggcaaagcagaacctggcccgcttgctctgcgagtaccaagaactgacctctaccaagctctcactcgatgtggaaattgcaacctatcgccggcttctggagggcgaagagtgcaggatgtccggcgagtgtacttctcaggtgaccatttcttctgtgggagggtcagccgtgatgtccggcggcgtcggcgggggcctcggctctacctgtgggctgggaagcgggaaaggctctcctggctcctgctgcacctctatcgtgactggcggctctaatatcatccttggaagtggtaaagatccggtccttgactcctgttctgtatcggggagttccgctgggagctcatgtcatactatcttgaagaagaccgtggaaagctccctgaagaccagcattacatactag

SEQ ID NO: 112774 - DNA, 1233 bp, Artificial Sequence
  derived and/or modified sequence
atggaaggacatgaggcctctcccgcacaggtcggccagggggatcgtggtaaagtgcgtttcttggagcaacagaataaagtgctggagacaaagtggcatcttcttcaacagcaagggctcagcggcagtcaacagggtctggagccagtctttgaagcttgcctggaccagctgagaaagcaactcgagcagctccagggagagcgcggtgccctggatgctgagctaaaagcctgccgcgatcaggaggaagagtacaagtctaaatatgaagaggaggcccaccgcagggctacactggagaacgatttcgtggttctcaagaaagatgttgatggtgtcttccttagcaaaatggaattggagggtaaactagaggccttacgtgagtatctgtactttctgaagcaccttaatgaggaggagctgggacagctgcagactcaagccagcgacactagcgttgtactgagcatggacaataatagatatcttgacttctcctccattatcacagaggtgcgcgctcgctacgaagagattgctagaagtagtaaagccgaggctgaagcgctctatcaaaccaaataccaagaactgcaggtgtctgcccagttgcatggggaccggatgcaggagactaaggtgcagatttctcaacttcatcaggagatccaaaggttgcagagtcaaaccgagaacctgaagaaacagaacgcctctctgcaggccgctattacagacgccgaacagcggggtgaactggccttaaaggatgcacaggcaaaagtggacgaactagaagctgccctgaggatggctaagcagaatctagcacgattattgtgtgaatatcaggagctaacttctacaaagctttccctcgacgtggagattgccacataccgccgacttcttgagggtgaagaatgccgaatgagtggtgaatgtaccagccaggtgactatcagctcagtcgggggtagcgcggttatgtccggcggtgtggggggtgggctaggttccacgtgtgggctgggctccggaaagggttctcctgggagttgctgtacgtctatagtgacaggaggaagcaatatcatcctcggatccggaaaggaccccgtcctcgattcctgcagtgtatcgggtagctccgccggatcttcttgccatacaattctcaagaagaccgtggagtcaagtctaaagacctccatcacgtattag

SEQ ID NO: 112775 - DNA, 876 bp, Artificial Sequence
  derived and/or modified sequence
atggaattagagggcaagcttgaggctttacgggaatatttgtactttcttaaacacctgaacgaagaggagctcggacagctgcagactcaagcttcggatactagcgttgtactttctatggacaacaatcgatatctggacttttctagtatcatcaccgaagttagggccagatatgaggagatagccaggtcgagtaaggcagaggctgaagccctgtatcagacgaaataccaggaacttcaggtatcagctcagctgcacggagaccgcatgcaggaaacgaaggtgcagataagtcagctccaccaggaaatccaacgcctacagtctcagaccgaaaatctgaagaagcaaaatgcctccttacaggccgctattaccgacgccgaacaaagaggggagttggccctcaaagatgcccaagctaaagtcgacgaactggaagccgcattgaggatggctaagcagaacctcgccaggttgctgtgtgagtaccaagagttgacaagtacaaaactgtctcttgatgtcgaaattgcaacttacagaaggctccttgaaggcgaggaatgccggatgtctggtgaatgtacatcacaggtcacgatctctagcgtagggggatctgctgtgatgtccggcggagttggcggtggactgggcagtacctgcggactgggctccggaaaagggagccccggttcatgttgcacaagcattgtgacaggaggctcaaatattatcctgggctcggggaaggaccctgtgctcgactcttgctctgtgagcggctcttccgctggcagttcatgtcacaccattctgaaaaagacagtagagtcatcactgaagacgtcaattacgtattag

SEQ ID NO: 112776 - DNA, 1233 bp, Artificial Sequence
  derived and/or modified sequence
atggagggccacgaggccagccccgcccaggtgggccagggcgacagaggcaaggtgagattcctggagcagcagaacaaggtgctggagaccaagtggcacctgctgcagcagcagggcctgagcggcagccagcagggcctggagcccgtgttcgaggcctgcctggaccagctgagaaagcagctggagcagctgcagggcgagagaggcgccctggacgccgagctgaaggcctgcagagaccaggaggaggagtacaagagcaagtacgaggaggaggcccacagaagagccaccctggagaacgacttcgtggtgctgaagaaggacgtggacggcgtgttcctgagcaagatggagctggagggcaagctggaggccctgagagagtacctgtacttcctgaagcacctgaacgaggaggagctgggccagctgcagacccaggccagcgacaccagcgtggtgctgagcatggacaacaacagatacctggacttcagcagcatcatcaccgaggtgagagccagatacgaggagatcgccagaagcagcaaggccgaggccgaggccctgtaccagaccaagtaccaggagctgcaggtgagcgcccagctgcacggcgacagaatgcaggagaccaaggtgcagatcagccagctgcaccaggagatccagagactgcagagccagaccgagaacctgaagaagcagaacgccagcctgcaggccgccatcaccgacgccgagcagagaggcgagctggccctgaaggacgcccaggccaaggtggacgagctggaggccgccctgagaatggccaagcagaacctggccagactgctgtgcgagtaccaggagctgaccagcaccaagctgagcctggacgtggagatcgccacctacagaagactgctggagggcgaggagtgcagaatgagcggcgagtgcaccagccaggtgaccatcagcagcgtgggcggcagcgccgtgatgagcggcggcgtgggcggcggcctgggcagcacctgcggcctgggcagcggcaagggcagccccggcagctgctgcaccagcatcgtgaccggcggcagcaacatcatcctgggcagcggcaaggaccccgtgctggacagctgcagcgtgagcggcagcagcgccggcagcagctgccacaccatcctgaagaagaccgtggagagcagcctgaagaccagcatcacctactag

SEQ ID NO: 112777 - DNA, 876 bp, Artificial Sequence
  derived and/or modified sequence
atggagctggagggcaagctggaggccctgagagagtacctgtacttcctgaagcacctgaacgaggaggagctgggccagctgcagacccaggccagcgacaccagcgtggtgctgagcatggacaacaacagatacctggacttcagcagcatcatcaccgaggtgagagccagatacgaggagatcgccagaagcagcaaggccgaggccgaggccctgtaccagaccaagtaccaggagctgcaggtgagcgcccagctgcacggcgacagaatgcaggagaccaaggtgcagatcagccagctgcaccaggagatccagagactgcagagccagaccgagaacctgaagaagcagaacgccagcctgcaggccgccatcaccgacgccgagcagagaggcgagctggccctgaaggacgcccaggccaaggtggacgagctggaggccgccctgagaatggccaagcagaacctggccagactgctgtgcgagtaccaggagctgaccagcaccaagctgagcctggacgtggagatcgccacctacagaagactgctggagggcgaggagtgcagaatgagcggcgagtgcaccagccaggtgaccatcagcagcgtgggcggcagcgccgtgatgagcggcggcgtgggcggcggcctgggcagcacctgcggcctgggcagcggcaagggcagccccggcagctgctgcaccagcatcgtgaccggcggcagcaacatcatcctgggcagcggcaaggaccccgtgctggacagctgcagcgtgagcggcagcagcgccggcagcagctgccacaccatcctgaagaagaccgtggagagcagcctgaagaccagcatcacctactag

SEQ ID NO: 112778 - DNA, 1397 bp, Artificial Sequence
  derived and/or modified sequence
aggatgtgtagggggcggggcccggcggaagcgtatataaggccgggctcggggacgcccccccctcactcgcgcgttaggaggctcgggtcgttgtggtgcgctgtcttcccgcttgcgtcagggacctgcccgactcagtggccgccatggcatcagatgaaggcaaactttttgttggagggctgagttttgacaccaatgagcagtcgctggagcaggtcttctcaaagtacggacagatctctgaagtggtggttgtgaaagacagggagacccagagatctcggggatttgggtttgtcacctttgagaacattgacgacgctaaggatgccatgatggccatgaatgggaagtctgtagatggacggcagatccgagtagaccaggcaggcaagtcgtcagacaaccgatcccgtgggtaccgtggtggctctgccgggggccggggcttcttccgtgggggccgaggacggggccgtgggttctctagaggaggaggggaccgaggctatggggggaaccggttcgagtccaggagtgggggctacggaggctccagagactactatagcagccggagtcagagtggtggctacagtgaccggagctcgggcgggtcctacagagacagttatgacagttacgctacacacaacgagtaaaaacccttcctgctcaagatcgtccttccaatggctgtgtgtttaaagattgtgggagcttcgctgaacgttaatgtgtagtaaatgcacctccttgtattcccactttcgtagtcatttcggttctgatcttgtcaaacccagcctgaccgcttctgacgccgggatggcctcgttactagacttttctttttaaggaagtgctgtttttttttgagggttttcaaaacattttgaaaagcatttacttttttgaccacgagccatgagttttcaaaaaaatcgggggttgtgtgggtttttggtttttgttttagtttttggttgcgttgcctttttttttttagtggggttggccccatgaagtgggtgccccactcacttctctgagatcgaacggactgtgaatccgctctttgtcggaagctgagcaagctgtggcttttttccaactccgtgtgacgtttctgagtgtagtgtggtaggaccccggcgggtgtggcagcaactgccctggagccccagcccctgcgtccatctgtgctgtgcgccccacagtagacgtgcagacgtccctgagaggttcttgaagatgtttatttatattgtccttttttactggaagacgtacgcatactccatcgatgttgtatttgcagtggctgaggaattcttgtacgcagttttctttggctttacgaagccgattaaaagaccgtgtgaaatgaa

SEQ ID NO: 112779 - DNA, 519 bp, Artificial Sequence
  derived and/or modified sequence
atggcttccgacgagggcaaactctttgtaggtgggcttagtttcgacaccaatgagcagagcctggaacaggtgttctccaagtacggccagatcagcgaagtggttgtggtgaaagacagagagacacagaggagccgcggttttggctttgtgaccttcgagaatatagacgacgcaaaggacgccatgatggcgatgaacgggaaaagcgtggacggcagacagatcagggttgatcaggctggcaaatcatctgacaatcgaagcagagggtatagggggggaagtgccggtggaagaggcttcttcagaggcggccggggccgaggacgtggattttctagaggcggaggagataggggatacggaggcaatcggtttgaatcaaggtcgggagggtacggcggatctcgcgactattacagcagccggtctcagtccggtgggtactcggacaggtcctccgggggtagctaccgcgactcctacgattcctatgccacccacaacgagtag

SEQ ID NO: 112780 - DNA, 519 bp, Artificial Sequence
  derived and/or modified sequence
atggcctccgatgaaggaaagttgtttgtgggggggctgtctttcgacactaatgagcaatcgctggagcaggtgttttccaaatatgggcaaattagcgaggtggtggtggttaaggaccgcgagactcagagaagtagaggcttcggcttcgttacatttgagaacatcgatgatgccaaggatgctatgatggctatgaatggcaagagtgtagatggacgtcaaatacgagtggatcaggcagggaagtccagtgataatcggtcccgtgggtaccggggcggaagcgccggtggacgggggttcttccggggcgggcgagggagaggccgcgggttcagcagaggtggaggcgaccgcggctatggaggcaacagattcgagtctagatcaggaggttacggaggatcccgagactattactcttcccggagtcaatctggcggttactctgacaggtccagcgggggttcatacagggactcatatgattcctacgccacgcacaacgagtag

SEQ ID NO: 112781 - DNA, 519 bp, Artificial Sequence
  derived and/or modified sequence
atggccagtgatgagggcaagctgtttgtgggcggcctgagctttgacaccaatgagcagagcctggagcaggtgttcagcaaatatggccagatcagcgaggtggtggtggtgaaggaccgggagacccagaggagccggggctttggatttgtgacctttgaaaatattgatgatgccaaggatgccatgatggccatgaatggcaagtctgtggatggccggcagatccgggtggaccaggccggcaagagcagtgacaacagaagccggggctacagaggaggcagcgctgggggccggggcttcttccggggcggccggggccggggccggggcttcagcagaggaggaggagaccggggctatggaggcaacagatttgagagccgcagcggcggctatggaggcagccgggactactacagcagccgcagccagagcggcggctacagcgacaggagcagcggcggcagctacagagacagctatgacagctatgccacccacaatgaatag

SEQ ID NO: 112782 - DNA, 519 bp, Artificial Sequence
  derived and/or modified sequence
atggccagcgacgagggcaagctgttcgtgggcggcctgagcttcgacacgaacgagcagagtctcgagcaggtctttagcaagtacggccagattagcgaggtcgtagtggtgaaagaccgggaaacgcaaaggagtcgggggttcgggtttgtgaccttcgaaaacattgatgacgccaaagatgctatgatggccatgaacgggaaaagtgtggacgggagacaaattcgcgtggaccaagctggaaaaagttcagacaaccggagtcgaggctaccgcggaggaagcgctgggggtcgaggcttttttagaggagggcgaggccgcggccgcggcttcagccgcggggggggcgaccgaggttatggagggaaccggtttgagtctcgctctggtggatacggcggatccagggattattattcctctagatcgcagagcggaggctacagcgaccggtcatcaggcggatcgtatagggattcatacgatagttacgctacacacaatgagtag

SEQ ID NO: 112783 - DNA, 519 bp, Artificial Sequence
  derived and/or modified sequence
atggccagcgacgagggcaagctgttcgtgggcggcctgagcttcgacacaaacgagcagtctttggagcaggttttctcaaaatatggccaaatttccgaagttgttgtggtgaaggacagagagacacagcgctctcggggttttgggttcgtaacttttgaaaatatcgatgacgcaaaagacgcaatgatggcgatgaatggaaaatccgtcgatggtcgtcaaatacgtgttgatcaggcagggaaaagcagtgacaaccgcagcaggggctaccgggggggaagcgcaggcgggcggggttttttccgaggagggaggggtcggggtcggggattctcacgggggggcggggatcgcgggtatgggggcaatcgtttcgaatctcggtctggagggtacggcgggtccagagattattatagtagccgctcccagagcggaggctattcggacaggagcagcggagggagctaccgcgacagctatgatagctacgcaacacacaatgagtag

SEQ ID NO: 112784 - DNA, 519 bp, Artificial Sequence
  derived and/or modified sequence
atggcctctgatgaggggaaactgtttgtcgggggtctgtcatttgacacaaacgaacaatcgctggagcaagtgttctccaagtacggccagattagcgaggtggtagtagtgaaagatcgggagactcaacgctctagaggattcgggttcgtgacctttgagaacatcgatgatgccaaagacgctatgatggccatgaacggcaagtccgtggatgggagacagatccgggtagaccaggctggcaagtccagcgacaataggtcgcggggatatagaggcggaagtgcgggtggtaggggcttttttagaggcggtcggggaaggggacgcggattctctcgcggtgggggagatagggggtacggcggtaataggttcgaatcaaggagcggagggtatggcggatcccgagattattactcttctagatcccagtcaggaggatattcagatcggtcatccggaggctcttatagggactcttatgactcttatgcaacccacaatgaatag

SEQ ID NO: 112785 - DNA, 519 bp, Artificial Sequence
  derived and/or modified sequence
atggccagtgatgaggggaagctctttgtcggaggcctcagcttcgatacaaacgaacagtcactcgagcaggttttctctaagtacggacagatttcagaggtggttgtcgttaaagatagggagacccaaaggagtcgtggattcggctttgtgacctttgagaatattgacgacgctaaggacgcgatgatggccatgaacggcaagtctgtggatggaaggcagattcgcgtcgaccaggccggtaagagttccgacaatagaagcaggggctatcgaggtggaagtgctggcggtcgcggtttcttcagaggtggaagggggagaggcaggggattttcccggggaggtggcgatagaggctatggcggtaatagatttgagagcaggtctggaggttatggaggatcccgtgattattactctagccgcagccagtccggcggttactccgaccgaagctcaggagggagctaccgggacagctacgatagctacgccacacacaacgaatag

SEQ ID NO: 112786 - DNA, 1333 bp, Artificial Sequence
  derived and/or modified sequence
ctcactcgcgcgttaggaggctcgggtcgttgtggtgcgctgtcttcccgcttgcgtcagggacctgcccgactcagtggccgccatggcatcagatgaaggcaaactttttgttggagggctgagttttgacaccaatgagcagtcgctggagcaggtcttctcaaagtacggacagatctctgaagtggtggttgtgaaagacagggagacccagagatctcggggatttgggtttgtcacctttgagaacattgacgacgctaaggatgccatgatggccatgaatgggaagtctgtagatggacggcagatccgagtagaccaggcaggcaagtcgtcagacaaccgatcccgtgggtaccgtggtggctctgccgggggccggggcttcttccgtgggggccgaggacggggccgtgggttctctagaggaggaggggaccgaggctatggggggaaccggttcgagtccaggagtgggggctacggaggctccagagactactatagcagccggagtcagagtggtggctacagtgaccggagctcgggcgggtcctacagagacagttatgacagttacgctacacacaacgagtaaaaacccttcctgctcaagatcgtccttccaatggctgtgtgtttaaagattgtgggagcttcgctgaacgttaatgtgtagtaaatgcacctccttgtattcccactttcgtagtcatttcggttctgatcttgtcaaacccagcctgaccgcttctgacgccgggatggcctcgttactagacttttctttttaaggaagtgctgtttttttttgagggttttcaaaacattttgaaaagcatttacttttttgaccacgagccatgagttttcaaaaaaatcgggggttgtgtgggtttttggtttttgttttagtttttggttgcgttgcctttttttttttagtggggttggccccatgaagtgggtgccccactcacttctctgagatcgaacggactgtgaatccgctctttgtcggaagctgagcaagctgtggcttttttccaactccgtgtgacgtttctgagtgtagtgtggtaggaccccggcgggtgtggcagcaactgccctggagccccagcccctgcgtccatctgtgctgtgcgccccacagtagacgtgcagacgtccctgagaggttcttgaagatgtttatttatattgtccttttttactggaagacgtacgcatactccatcgatgttgtatttgcagtggctgaggaattcttgtacgcagttttctttggctttacgaagccgattaaaagaccgtgtgaaatgaa

SEQ ID NO: 112787 - DNA, 519 bp, Artificial Sequence
  derived and/or modified sequence
atggccagcgacgagggcaagctgttcgtgggcggcctgagcttcgacaccaacgagcagagcctggagcaggtgttcagcaagtacggccagatcagcgaggtggtggtggtgaaggacagagagacccagagaagcagaggcttcggcttcgtgaccttcgagaacatcgacgacgccaaggacgccatgatggccatgaacggcaagagcgtggacggcagacagatcagagtggaccaggccggcaagagcagcgacaacagaagcagaggctacagaggcggcagcgccggcggcagaggcttcttcagaggcggcagaggcagaggcagaggcttcagcagaggcggcggcgacagaggctacggcggcaacagattcgagagcagaagcggcggctacggcggcagcagagactactacagcagcagaagccagagcggcggctacagcgacagaagcagcggcggcagctacagagacagctacgacagctacgccacccacaacgagtag

SEQ ID NO: 112788 - protein, 184 aa, Artificial Sequence
  derived and/or modified sequence
MVKIYRHESAYCLAPFDLIKVRLQNQTEPRAQPGSPPPRYQGPVHCAASIFREEGPRGLFRGAWALTLRDTPTVGIYFITYEGLCRQYTPEGQNPSSATVLVAGGFAGIASWVAATPLDMIKSRMQMDGLRRRVYQGMLDCMVSSIRQEGLGVFFRGVTINSARAFPVNAVTFLSYEYLLRWWG

SEQ ID NO: 112789 - DNA, 555 bp, Artificial Sequence
  derived and/or modified sequence
atggtgaaaatctaccggcatgaatctgcctactgtctggcccccttcgacctgatcaaagtgagactacagaaccaaacggagccaagagctcagccggggtccccacccccacggtatcagggacctgtccactgtgcagctagcatatttagagaagaaggcccaaggggcctcttccgcggcgcttgggcgctcaccctacgcgacacacccaccgtggggatatactttatcacatacgaagggctttgccgacagtacacacctgaaggccagaatccctcctccgccactgttctcgtggccggcggctttgccggtattgcgtcctgggtggctgccactcccctcgatatgattaagtcaagaatgcagatggacgggttacgccgaagagtgtaccagggtatgctggattgcatggtgtcctctattcggcaggaggggctgggcgtatttttcaggggtgtaacaattaactcggcccgcgcctttcctgtcaatgcagtgactttcttaagttacgaatacctgctcaggtggtgggggtag

SEQ ID NO: 112790 - DNA, 555 bp, Artificial Sequence
  derived and/or modified sequence
atggtgaagatctacagacatgaaagtgcctactgcctggccccctttgacctgatcaaggtgcggctgcagaaccagacagagccccgggcccagcccggcagccccccaccccgctaccagggccctgtgcactgtgccgccagcatcttccgggaggagggcccccggggcctcttccggggggcctgggccctgaccctgcgggacacccccaccgtgggcatctacttcatcacctatgagggcctgtgccggcagtacaccccagagggccagaaccccagcagcgccaccgtgctggtggccggcggctttgctggcatcgcctcctgggtggccgccacccccctggacatgatcaagagcaggatgcagatggatggcctgcggcggcgggtgtaccagggcatgctggactgcatggtgagcagcatccggcaggagggcctgggcgtcttcttccggggcgtgaccatcaacagcgcccgggccttccctgtgaatgctgtgaccttcctgtcctatgagtacctgctgcgctggtggggctag

SEQ ID NO: 112791 - DNA, 555 bp, Artificial Sequence
  derived and/or modified sequence
atggtgaagatctaccggcacgagagcgcctactgcctggcccccttcgaccttatcaaggtcagactgcagaatcaaacggagccccgggcacagcccggatccccacctccccggtatcaggggccagtccactgcgcggcgtctatttttcgagaagagggacctcgggggctctttagaggggcctgggctctgaccctcagggacactccgacggtgggcatctattttatcacatatgaagggttatgtcgccagtacacccccgagggccagaatcctagttccgctaccgtccttgtggcaggggggtttgccggcattgcctcttgggtggctgctacccccctcgatatgatcaagagcagaatgcagatggatggcctacgcaggagggtttaccagggcatgctagactgcatggttagcagcattagacaggaagggctaggtgtgttttttcgtggggtgacgatcaatagtgcccgcgcattccccgtgaacgcagtgacattcttgagctacgagtacttactccggtggtggggttag

SEQ ID NO: 112792 - DNA, 555 bp, Artificial Sequence
  derived and/or modified sequence
atggtgaagatctatcgacatgaaagcgcatactgcctagcaccattcgacctgatcaaagtgcgccttcagaaccagacggaacccagagcacaacccggatctccccctccaaggtaccagggtcccgtgcactgcgcagcctctatctttagagaggagggaccacgcggtctgttccgaggtgcctgggccctgacgttaagagacacccccaccgtcggaatctatttcataacgtacgaaggtttgtgtcggcagtacacacccgaggggcagaatccttcatcagccacggttctggtggcaggcggtttcgcaggtatcgctagctgggtggccgctaccccccttgatatgatcaagagccgcatgcagatggacggcctgcgacgaagagtctatcagggaatgctggattgtatggttagcagcattagacaggagggtctgggagtgtttttccggggtgtgaccattaatagcgcacgcgcattccctgtcaatgctgtgacctttctgagctatgagtacctgttacgatggtggggctag

SEQ ID NO: 112793 - DNA, 2100 bp, Artificial Sequence
  derived and/or modified sequence
agatccttgaaagggttttggttttgactgagcagaatggtgccattgcagatcaacacgcactttaaataatcaaaacccctatctttcccctgggaaggaggaagccgaggaaggctgtgtttctgactcacacgggggagtcgggggagtcgtaaacaaccctgaagagaacagccaggcctgttcccgcaagcccagacaatgccggtggaggaatttgtggctggctggatctctggcgctctgggcttggtcctgggacacccgtttgacactgtaaaggtgaggctgcagacccagaccacctaccggggcatcgttgattgcatggtcaagatttaccgccatgagtccgcctactgtctggctccttttgacctcatcaaagtccggctacaaaaccagacagagccaagggcccagccagggagccccccaccccggtaccaggggcccgtgcactgtgcagcctccatcttccgggaggaggggccccgggggctgttccgaggagcctgggccctgacgctgagggacacccccacggtggggatctacttcatcacctatgaagggctctgtcgccagtacacaccagaaggccagaatcccagctcagccacggtgctggtggcagggggctttgcaggcattgcttcctgggtggcagccacgcccttagacatgatcaagtcccggatgcagatggatggactgagacgcagagtgtaccaggggatgctggactgcatggtgagcagcatccggcaggaaggactgggagtcttcttccggggggtcaccatcaacagtgcccgcgcctttcccgtcaatgctgtcaccttcctcagctacgaatatctcctccgctggtggggatgagccctgcggcaatgccagcagctccccatcaggcccacggcctggaggccagtttgagattggaggccaggttgaaagcttgcaaatcagtgcaagaggctcagcccttcctaaccaaggtgcctcccacccgcgcagatctgggctgggcagacacctgtgggagccggaagccagggggcctgtgcagcctccctgtgtagctggccttgactcctttgcctcccacatctgtgaaacagggagcatgaggcacaagtgagctggcaagtggtgctggtgacatcccagctcctgtcctgtgccttcacctctttttttttttttttttttttttgagatggagtctttctctgtcacccaggctggaatgcagtggcgtgatctcggctcactgcaacctccgcctttccaccttccgggttcaagcaactctcctgcctcagcctcccaagtagctgggactataggcgcccgccaccacacccagctaaatttttgtatttttagtagagacagggtttcaccatgtcagccaggatggtcttgatctcctgactttgtgatccgcccgcgtcggcctctcaaagtgctgggattacaggcgtgagccaccgcgcccggctgccttcacctcttaaggagctctgagactccacttctgagagtccctgcggcctcccacctccctgcctttcaaagctctctcccccatgacccaggataaccctatgtctcctcccccagaatccttcagtggctctcatcaccttcaggaaaagcccaaactccttccaccctccaggttcctccctccccacgaggctttgttctcctggggttgcttcctggaccctgaacaagttgtgctctcattggccgggcctggccagcagtgcacagtgcctggcaggttgactctaccatccccggggctggccccgctctcctccgagacccaggctgagcccagtcccctcacccttccttgacttacctccccacctgaggctgactttggggttcccagacaccctacccacacacatgccttgatcatagcacttgcctgcgcttcttcagagtcattaatttgcttctcggcttccccactggactgtgagctgcctgaggtcagggattgcgctttggatggtttccagcctgagcctggtgcttgaacagacgtgtgcaataaatgctcgttaaatgatg

SEQ ID NO: 112794 - DNA, 555 bp, Artificial Sequence
  derived and/or modified sequence
atggtgaagatctacagacacgagagcgcctactgcctggcccccttcgacctgatcaaggtgagactgcagaaccagaccgagcccagagcccagcccggcagccccccccccagataccagggccccgtgcactgcgccgccagcatcttcagagaggagggccccagaggcctgttcagaggcgcctgggccctgaccctgagagacacccccaccgtgggcatctacttcatcacctacgagggcctgtgcagacagtacacccccgagggccagaaccccagcagcgccaccgtgctggtggccggcggcttcgccggcatcgccagctgggtggccgccacccccctggacatgatcaagagcagaatgcagatggacggcctgagaagaagagtgtaccagggcatgctggactgcatggtgagcagcatcagacaggagggcctgggcgtgttcttcagaggcgtgaccatcaacagcgccagagccttccccgtgaacgccgtgaccttcctgagctacgagtacctgctgagatggtggggctag

SEQ ID NO: 112795 - protein, 599 aa, Artificial Sequence
  derived and/or modified sequence
MLGMYVPDRFSLKSSRVQDGMGLYTARRVRKGEKFGPFAGEKRMPEDLDENMDYRLMWEVRGSKGEVLYILDATNPRHSNWLRFVHEAPSQEQKNLAAIQEGENIFYLAVEDIETDTELLIGYLDSDMEAEEEEQQIMTVIKEGEVENSRRQSTAGRKDRLGCKEDYACPQCESSFTSEDILAEHLQTLHQKPTEEKEFKCKNCGKKFPVKQALQRHFEQHQETCRGDARFVCKADSCGKRLKSKDALKRHQENVHTGDPKKKLICSVCNKKCSSASSLQEHRKIHEIFDCQECMKKFISANQLKRHMITHSEKRPYNCEICNKSFKRLDQVGAHKVIHSEDKPYKCKLCGKGFAHRNVYKNHKKTHSEERPFQCEECKALFRTPFSLQRHLLIHNSERTFKCHHCDATFKRKDTLNVHVQVVHERHKKYRCELCNKAFVTPSVLRSHKKTHTGEKEKICPYCGQKFASSGTLRVHIRSHTGERPYQCPYCEKGFSKNDGLKMHIRTHTREKPYKCSECSKAFSQKRGLDEHKRTHTGEKPFQCDVCDLAFSLKKMLIRHKMTHNPNRPLAECQFCHKKFTRNDYLKVHMDNIHGVADS

SEQ ID NO: 112796 - DNA, 1800 bp, Artificial Sequence
  derived and/or modified sequence
atgttgggcatgtatgtgcctgacagattctccctcaaatcatctagggtgcaggacggcatgggcttgtacaccgcgaggcgtgttagaaagggtgagaaatttggccctttcgccggtgagaagagaatgccagaagatctggacgagaacatggattacagacttatgtgggaagtacggggctccaagggtgaggtgctttatattctggacgccaccaaccctcgccactccaattggctgcgatttgttcatgaggcccccagccaggagcagaagaatctggccgccatccaggaaggggagaacattttctatttggctgtcgaagacatcgaaaccgatacggagttgctaatcgggtatttagactccgacatggaggccgaggaggaagaacagcagataatgacagtaatcaaagaaggagaggtggagaactctcgaaggcagtctacggccggtaggaaggataggctcggctgtaaggaagattatgcgtgtccccagtgtgagtcttctttcacctcagaggatatactcgctgagcacctccagactctacatcagaaacctaccgaggagaaagaatttaagtgcaagaactgcggaaagaaattcccagtgaagcaggccttacagaggcacttcgaacagcaccaggagacatgtcggggggacgctaggttcgtgtgtaaagccgattcctgcgggaagcggctcaagagcaaggacgcgctgaagaggcaccaggaaaatgtgcacacaggagaccctaagaaaaagctcatttgttcggtgtgcaacaaaaaatgcagcagcgcatcatcacttcaggaacataggaaaatacatgagatttttgactgccaggagtgcatgaaaaagtttatttccgccaatcagctgaaaagacacatgatcacgcactccgaaaaacggccctataattgtgagatttgcaacaagtcctttaagcgccttgatcaagtgggcgcccacaaagtgattcactccgaggataagccatataagtgtaagctctgcgggaagggtttcgcacatagaaacgtctacaagaatcacaaaaagactcactccgaagagaggcctttccagtgcgaggaatgcaaagccctgtttaggacccccttctctctacagaggcaccttctgattcacaacagcgagaggacattcaagtgccatcactgtgacgccacattcaagaggaaggacaccctgaacgtgcacgtacaggtggtgcacgaacgccacaaaaagtaccggtgcgaactgtgtaataaagcttttgtcacgccatccgtgttgaggagccacaaaaaaactcacacgggggaaaaggaaaagatttgtccctactgtggtcagaaatttgccagctcaggcacattgcgagtacacatcagaagccacactggggaacggccttatcagtgcccttactgtgaaaagggcttcagtaagaatgacggcctgaagatgcacattcggactcacacgcgggagaaaccgtacaagtgctcagagtgttctaaagcttttagccagaaaaggggactcgacgaacataagaggacccatacaggagagaagccatttcagtgcgacgtctgcgatttggcgttctccttgaagaaaatgctcatacgtcataaaatgacgcacaatcctaataggcccctggctgagtgccaattctgccacaaaaagttcacccgcaacgattacttgaaggtccacatggacaacatccacggcgtggccgactcctag

SEQ ID NO: 112797 - DNA, 1800 bp, Artificial Sequence
  derived and/or modified sequence
atgctgggcatgtatgtgcctgaccgcttcagcctgaagagcagccgggtgcaggacggcatgggcctgtacacagccaggagagtgaggaaaggagagaagtttggcccctttgctggggagaagaggatgcctgaggacctggatgagaacatggactaccgcctgatgtgggaggtgcggggcagcaagggggaggtgctgtacatcctggatgccaccaaccccaggcacagcaactggctgcgctttgtgcatgaggcccccagccaggagcagaagaacctggccgccatccaggagggggagaacatcttctacctggccgtggaggacattgaaacagacacagagctgctgattggctacctggacagcgacatggaggccgaggaggaggagcagcagatcatgaccgtcatcaaggagggggaggtggagaacagccggcggcagagcacagctggcaggaaggaccggctgggctgcaaggaggactatgcctgcccccagtgtgagagcagcttcaccagcgaggacatcctggccgagcacctgcagaccctgcaccagaagcccacagaggagaaggagttcaagtgcaagaactgtgggaagaagtttcctgtgaagcaggccctgcagaggcactttgagcagcaccaggagacctgcagaggagatgccaggtttgtgtgcaaggctgacagctgtgggaagaggctgaagagcaaggatgccctgaagaggcaccaggagaatgtgcacactggagaccccaagaagaagctgatctgcagcgtgtgcaacaagaagtgcagcagcgccagcagcctgcaggagcacaggaagatccacgagatctttgactgccaggagtgcatgaagaagttcatcagcgccaaccagctgaagaggcacatgatcacccacagcgagaagaggccctacaactgtgagatctgcaacaagagcttcaagaggctggaccaggtgggcgcccacaaggtgatccacagcgaggacaagccctacaagtgcaagctgtgtgggaagggctttgcccacagaaatgtgtacaagaaccacaagaagacccacagcgaggagcggcccttccagtgtgaggagtgcaaggccctcttccgcacccccttcagcctgcagaggcacctgctgatccacaacagcgagaggaccttcaagtgccaccactgtgatgccaccttcaagaggaaggacaccctgaatgtgcacgtgcaggtggtgcatgagcggcacaagaagtaccgctgtgagctgtgcaacaaggcctttgtgaccccatctgtgctgcggagccacaagaagacccacactggagagaaggagaagatctgcccctactgcggccagaagtttgccagcagcggcaccctgcgggtgcacatccgcagccacactggagagcggccctaccagtgcccctactgtgagaagggcttcagcaagaatgatggcctgaagatgcacatccgcacccacacccgggagaagccctacaagtgcagcgagtgcagcaaggccttcagccagaagaggggcctggatgagcacaagaggacccacactggagagaagcccttccagtgtgatgtgtgtgacctggccttcagcctgaagaagatgctgatccgccacaagatgacccacaaccccaaccggcccctggccgagtgccagttctgccacaagaagttcaccagaaatgactacctgaaggtgcacatggacaacatccacggcgtggccgacagctag

SEQ ID NO: 112798 - DNA, 1800 bp, Artificial Sequence
  derived and/or modified sequence
atgctgggcatgtacgtgcccgaccggttcagcctgaagagcagccgggtccaggatggcatgggtttgtacactgcccgacgggtgaggaaaggggaaaagtttggcccgttcgccggagaaaaaagaatgccagaggacctggatgagaatatggactaccggctcatgtgggaggtaagggggtctaagggagaggtactctacatattggacgccaccaacccccgacattctaattggctgcggttcgtgcacgaggccccatcccaggagcagaagaatttggccgccattcaggagggtgagaatatattctatctcgcagttgaagacatcgagacagatacagaactcctcatcggctacctcgatagcgatatggaagcggaggaggaggagcagcagatcatgacagtcatcaaggagggggaggttgagaacagtcgtcgccaatcgaccgcaggtagaaaggataggctggggtgcaaagaagattacgcttgtccgcaatgcgaaagttcctttacttcagaagatatcctggccgaacacctgcagacattgcatcaaaagccgacagaagagaaggagttcaagtgcaagaactgcggaaagaagttcccagtgaaacaggctctgcaaagacacttcgaacagcaccaggagacctgcaggggagatgccagattcgtttgtaaagccgattcttgtggaaaacgcctgaagtccaaggacgctcttaaacggcatcaggagaacgtgcacaccggtgatcctaagaaaaagctgatctgtagcgtctgtaacaaaaagtgcagctccgcgagttcattgcaggaacaccgcaaaattcacgagatctttgattgtcaagagtgtatgaaaaagtttatttccgctaatcagttgaaaagacacatgattacacacagcgaaaagagaccgtataactgtgaaatctgcaataaatccttcaaacggctggaccaggtaggcgctcataaggtgatacacagcgaagacaagccttacaagtgcaagctctgcggcaagggcttcgcacatcggaatgtgtacaaaaaccataagaaaacacacagcgaggagcgccctttccaatgcgaagaatgcaaggccctcttccgtaccccattcagtcttcaacggcacctgctgattcataactctgaaaggacatttaaatgccatcactgcgatgccacatttaagcggaaggataccctcaatgtgcacgtgcaagttgtgcacgaaagacacaagaaatatcgatgcgagctgtgcaacaaagcgtttgtgactccatctgttctgagatcccacaaaaagacccacaccggcgaaaaggaaaaaatctgtccatactgcggacagaaattcgcttccagcgggactctgcgggttcacatacggtcccacacaggtgagaggccatatcagtgcccttattgcgagaagggtttctccaagaacgacgggctgaaaatgcacatacggactcacacacgggagaagccctacaagtgttccgaatgctctaaagccttctcccaaaagcgaggcttagatgagcataagcggacccacacaggagaaaaaccattccagtgtgatgtttgcgacctggccttctcactcaagaagatgcttattaggcataagatgacccataacccaaatcgaccattagcagaatgtcagttctgtcacaagaaattcacccggaatgattatctcaaagtgcatatggataatattcacggggtggcggatagttag

SEQ ID NO: 112799 - DNA, 2338 bp, Artificial Sequence
  derived and/or modified sequence
gcgccccccgcgcccccgcagcaggaatggcaggaacggatccgggccgagcccgacccgggacgaggaggggctgagccgcgggggatcctggaatcggcagggaggtggggattctgggaggaaaactccatttcctccttccctgccggtttctcccctctaccctggcaccccaaatttcgatgtgccgcctgccgggcgctaagcgccggtgttgagagaggcggcggccgccgcgcccgggaaaatgctgggcatgtacgtgccggacaggttctccctgaagtcctcccgggttcaggacggcatggggctctacacggcccgcagagtgcgaaagggtgaaaagttcggaccctttgctggagagaagagaatgcctgaagacttggatgaaaatatggattacaggttgatgtgggaggttcgtgggagtaagggagaagttttgtacattttggatgctaccaacccacggcactccaactggcttcgcttcgttcatgaggcaccatctcaggagcagaagaacttggctgccattcaagaaggagaaaacattttctatttggcagttgaagatatagaaacagacacggagcttctgattggctacctggatagtgacatggaggctgaggaggaagaacagcaaattatgacagtcatcaaagaaggggaagttgaaaattctagaagacaatcaacagcgggcagaaaagatcgccttggctgtaaagaggactatgcttgtcctcaatgtgaatcgagttttaccagtgaggatattcttgctgagcatctccagacattgcaccagaaacccacagaggagaaagaatttaagtgcaagaactgtgggaagaaattcccagttaagcaggctttgcaaagacattttgagcagcaccaggagacttgccggggggatgccaggtttgtgtgcaaggctgacagctgtggaaagaggctgaagagcaaggatgccctgaaaagacaccaggaaaatgtccacactggagatcctaagaaaaagcttatatgttcagtgtgcaataaaaagtgttcttcagcatcaagcctacaggaacatagaaagattcatgagatatttgattgtcaagaatgtatgaagaaatttatttcagctaatcagctaaaacgtcatatgatcacccactcagaaaaacgaccctataattgcgagatttgtaataagtctttcaagaggcttgatcaagtgggtgctcacaaagtaatacacagcgaagacaaaccttacaaatgcaaactttgtggaaagggatttgcccacagaaatgtttacaagaatcataagaagacccactctgaggagagaccgttccaatgtgaagaatgtaaagctttgttccggaccccattttctttacagagacacctgctaatacataacagtgagaggactttcaagtgccatcactgcgatgctacctttaagaggaaggatacattaaatgttcatgtccaggtggttcatgaaagacacaagaagtataggtgtgagctatgtaataaggcctttgttacaccttcagtgcttagaagtcataagaaaacacatacaggagaaaaggagaaaatctgtccatattgtggccagaaatttgccagcagtggtacactcagagttcatatccggagccacacaggtgagcgtccctatcaatgtccttactgtgaaaaaggattcagtaaaaatgatggactgaagatgcacattcgtactcacaccagggagaagccgtacaagtgctcagagtgcagcaaggccttcagccagaagcgaggcctggatgagcacaagaggacgcacactggagaaaagccttttcagtgtgatgtttgtgatttggcttttagcctgaagaaaatgctgattcgacacaagatgactcataatcccaatcgtcccctggcagaatgccagttttgccataagaagtttacaaggaatgactacctcaaagtgcacatggacaatatccatggtgtagctgacagctaataggggctgtaaaggaattaaactattcagaagggctcctaatatgaatcccagatttttatcacctgatcagcataacagaagtagccaaaagtgacttactggtctcatagttcttatttgcctacatttagagtctgtagatgcatatgcaaccaaaaaaaagtcttacttttaacaagaaatggtataaatggaaaaaaaatacaactccatagccttgcaaaatgcaacttgtgctctgtcttataaaaatggagaaaggagtcatggctctctttcttggcc

SEQ ID NO: 112800 - DNA, 1800 bp, Artificial Sequence
  derived and/or modified sequence
atgctggggatgtacgtgcctgatagatttagtcttaagtcctcaagggtacaggacggcatgggtctttacactgctcggcgagtgaggaagggtgaaaaattcggaccttttgctggtgaaaagaggatgcccgaagaccttgacgagaatatggactataggctgatgtgggaggtgagaggcagtaagggtgaagttttatatatcctggacgccactaaccccaggcactccaactggctgcggtttgtccacgaagccccaagtcaagaacagaaaaacctggcggcaatccaggaaggagaaaacatcttctatctggccgtggaggatatagagactgataccgagctcctgatcggttatctagactcagatatggaggccgaagaagaggaacaacaaatcatgacagtcatcaaggagggggaggtggaaaactccagaaggcagagcaccgccggtagaaaagaccgactggggtgtaaagaggattacgcctgtccacagtgcgaatcgagtttcacctccgaagacatacttgctgaacacctgcagaccttgcaccaaaagcccactgaggagaaagagtttaaatgcaagaactgcgggaaaaagtttcccgtaaaacaggccctgcaaaggcactttgagcagcaccaggaaacatgccgcggagatgccaggtttgtatgcaaagcagatagctgtggaaagagactgaagtcaaaggatgcccttaagagacatcaggagaatgtccataccggcgacccaaagaagaagctcatctgctctgtgtgcaataagaagtgtagcagcgcctctagccttcaagaacaccgcaaaatccacgagatctttgattgtcaagaatgcatgaagaagttcatcagtgccaaccaactgaagcgccacatgatcactcattctgaaaagaggccttataattgtgaaatctgtaacaagtccttcaagaggcttgatcaggtaggtgctcacaaagttatacactctgaggacaaaccctataaatgcaagttatgtggcaaaggtttcgcccatcgcaacgtgtacaaaaatcacaagaaaacccattctgaggagcgcccattccaatgtgaggagtgtaaagccctttttcggacacctttctccctacagcgtcacctgctgatccataatagcgaaagaacattcaaatgtcaccactgcgatgcgaccttcaagcggaaggatacactaaacgttcacgtgcaggtggtgcatgagcggcacaaaaagtaccggtgcgaattatgtaataaagcgttcgtgaccccctctgtgctgcggagccacaaaaaaacccacacaggagagaaggaaaaaatttgtccctactgcggacaaaaatttgccagttcgggaacgttgagggtacatattcgcagccataccggagagaggccctaccagtgtccttactgcgagaagggcttctctaagaacgatggattaaagatgcacattcgaactcacactagggagaagccctataaatgctccgaatgttcaaaggccttttcccagaaacgtggcctcgatgagcataaacgtacccacacgggagaaaaaccctttcagtgtgatgtgtgcgacctggcctttagcctgaaaaaaatgctgatcagacataaaatgacccacaatccgaaccggcctctcgccgagtgtcagttctgtcataaaaagtttacccggaacgattacctgaaagtgcacatggacaacatacacggcgttgctgactcctag

SEQ ID NO: 112801 - DNA, 1800 bp, Artificial Sequence
  derived and/or modified sequence
atgctgggcatgtacgtgcccgacagattcagcctgaagagcagcagagtgcaggacggcatgggcctgtacaccgccagaagagtgagaaagggcgagaagttcggccccttcgccggcgagaagagaatgcccgaggacctggacgagaacatggactacagactgatgtgggaggtgagaggcagcaagggcgaggtgctgtacatcctggacgccaccaaccccagacacagcaactggctgagattcgtgcacgaggcccccagccaggagcagaagaacctggccgccatccaggagggcgagaacatcttctacctggccgtggaggacatcgagaccgacaccgagctgctgatcggctacctggacagcgacatggaggccgaggaggaggagcagcagatcatgaccgtgatcaaggagggcgaggtggagaacagcagaagacagagcaccgccggcagaaaggacagactgggctgcaaggaggactacgcctgcccccagtgcgagagcagcttcaccagcgaggacatcctggccgagcacctgcagaccctgcaccagaagcccaccgaggagaaggagttcaagtgcaagaactgcggcaagaagttccccgtgaagcaggccctgcagagacacttcgagcagcaccaggagacctgcagaggcgacgccagattcgtgtgcaaggccgacagctgcggcaagagactgaagagcaaggacgccctgaagagacaccaggagaacgtgcacaccggcgaccccaagaagaagctgatctgcagcgtgtgcaacaagaagtgcagcagcgccagcagcctgcaggagcacagaaagatccacgagatcttcgactgccaggagtgcatgaagaagttcatcagcgccaaccagctgaagagacacatgatcacccacagcgagaagagaccctacaactgcgagatctgcaacaagagcttcaagagactggaccaggtgggcgcccacaaggtgatccacagcgaggacaagccctacaagtgcaagctgtgcggcaagggcttcgcccacagaaacgtgtacaagaaccacaagaagacccacagcgaggagagacccttccagtgcgaggagtgcaaggccctgttcagaacccccttcagcctgcagagacacctgctgatccacaacagcgagagaaccttcaagtgccaccactgcgacgccaccttcaagagaaaggacaccctgaacgtgcacgtgcaggtggtgcacgagagacacaagaagtacagatgcgagctgtgcaacaaggccttcgtgacccccagcgtgctgagaagccacaagaagacccacaccggcgagaaggagaagatctgcccctactgcggccagaagttcgccagcagcggcaccctgagagtgcacatcagaagccacaccggcgagagaccctaccagtgcccctactgcgagaagggcttcagcaagaacgacggcctgaagatgcacatcagaacccacaccagagagaagccctacaagtgcagcgagtgcagcaaggccttcagccagaagagaggcctggacgagcacaagagaacccacaccggcgagaagcccttccagtgcgacgtgtgcgacctggccttcagcctgaagaagatgctgatcagacacaagatgacccacaaccccaacagacccctggccgagtgccagttctgccacaagaagttcaccagaaacgactacctgaaggtgcacatggacaacatccacggcgtggccgacagctag

SEQ ID NO: 112802 - protein, 501 aa, Artificial Sequence
  derived and/or modified sequence
MLGMYVPDRFSLKSSRVQDGMGLYTARRVRKGEKFGPFAGEKRMPEDLDENMDYRLMWEVRGSKGEVLYILDATNPRHSNWLRFVHEAPSQEQKNLAAIQEGENIFYLAVEDIETDTELLIGYLDSDMEAEEEEQQIMTVIKEGEVENSRRQSTAGRKDRLGCKEDYACPQCESSFTSEDILAEHLQTLHQKPTEEKEFKCKNCGKKFPVKQALQRHFEQHQETCRGDARFVCKADSCGKRLKSKDALKRHQENVHTGDPKKKLICSVCNKKCSSASSLQEHRKIHEIFDCQECMKKFISANQLKRHMITHSEKRPYNCEICNKSFKRLDQVGAHKVIHSEDKPYKCKLCGKGFAHRNVYKNHKKTHSEERPFQCEECKALFRTPFSLQRHLLIHNSERTFKCHHCDATFKRKDTLNVHVQVVHERHKKYRCELCNKAFVTPSVLRSHKKTHTGEKEKICPYCGQKFASSGTLRVHIRSHTGEAVQVLRVQQGLQPEARPG

SEQ ID NO: 112803 - DNA, 1506 bp, Artificial Sequence
  derived and/or modified sequence
atgctcggcatgtacgtgcccgaccgattctccctgaagtcaagtcgagttcaagacggcatggggctgtatactgctcggcgcgtcagaaaaggtgagaagttcggcccattcgccggcgaaaaacggatgccagaggacttggacgagaatatggactataggcttatgtgggaggtgcgtggctccaagggtgaggtgctgtacattctggatgccacaaacccccgccatagcaactggctgcgttttgttcacgaagctcccagtcaggagcagaaaaatctcgccgcaatccaagaaggggagaacatcttttacctcgcagtggaggatatcgaaacagacaccgagctgctcattggatatctggattctgatatggaagcagaagaggaggagcaacagatcatgacggtcataaaggaaggagaggtcgaaaactcaaggaggcagagtaccgctgggcgcaaggaccggcttggatgcaaggaggattatgcctgcccccagtgtgaaagttcttttacttccgaagacatccttgcagagcacctccagacacttcaccaaaaacccacagaagaaaaagagtttaagtgtaaaaactgcggcaagaaatttccagtgaaacaggccctacagcgacacttcgagcagcaccaggagacctgccgcggcgacgccagattcgtgtgtaaagctgactcctgtggaaagcgattaaaatccaaggacgccctcaagaggcatcaagagaatgtgcacactggagatcccaaaaaaaagctgatttgctctgtatgcaacaagaagtgcagctccgcaagtagcttgcaggagcacaggaaaattcacgagatctttgattgccaggaatgcatgaagaagtttattagcgctaaccaactaaagcggcacatgattactcatagcgaaaaaaggccctataactgtgagatttgtaacaagtcattcaagcgactcgaccaggtgggcgctcacaaggtgatccattctgaggacaaaccgtataagtgcaaactgtgcgggaaggggttcgcacaccgaaatgtgtacaaaaaccataagaagactcacagcgaggagcgccctttccagtgcgaggagtgcaaagctttattcaggacccctttctccctgcaacgacatcttttgatacacaatagtgaaagaacatttaaatgccaccattgtgacgccacattcaagcgcaaagacaccctcaacgtccatgtgcaggttgtccatgaaaggcacaagaaataccgctgtgagctctgcaacaaggctttcgtgacaccctccgtcttacggtcccacaagaagacccataccggcgagaaggaaaaaatatgcccatattgcgggcagaaatttgcttcgagtggcacactgcgggtccatatccgctcccatacaggtgaggccgtccaggtgcttcgggtgcagcagggcctgcagcccgaggccaggccaggctag

SEQ ID NO: 112804 - DNA, 1506 bp, Artificial Sequence
  derived and/or modified sequence
atgctgggcatgtatgtgcctgaccgcttcagcctgaagagcagccgggtgcaggacggcatgggcctgtacacagccaggagagtgaggaaaggagagaagtttggcccctttgctggggagaagaggatgcctgaggacctggatgagaacatggactaccgcctgatgtgggaggtgcggggcagcaagggggaggtgctgtacatcctggatgccaccaaccccaggcacagcaactggctgcgctttgtgcatgaggcccccagccaggagcagaagaacctggccgccatccaggagggggagaacatcttctacctggccgtggaggacattgaaacagacacagagctgctgattggctacctggacagcgacatggaggccgaggaggaggagcagcagatcatgaccgtcatcaaggagggggaggtggagaacagccggcggcagagcacagctggcaggaaggaccggctgggctgcaaggaggactatgcctgcccccagtgtgagagcagcttcaccagcgaggacatcctggccgagcacctgcagaccctgcaccagaagcccacagaggagaaggagttcaagtgcaagaactgtgggaagaagtttcctgtgaagcaggccctgcagaggcactttgagcagcaccaggagacctgcagaggagatgccaggtttgtgtgcaaggctgacagctgtgggaagaggctgaagagcaaggatgccctgaagaggcaccaggagaatgtgcacactggagaccccaagaagaagctgatctgcagcgtgtgcaacaagaagtgcagcagcgccagcagcctgcaggagcacaggaagatccacgagatctttgactgccaggagtgcatgaagaagttcatcagcgccaaccagctgaagaggcacatgatcacccacagcgagaagaggccctacaactgtgagatctgcaacaagagcttcaagaggctggaccaggtgggcgcccacaaggtgatccacagcgaggacaagccctacaagtgcaagctgtgtgggaagggctttgcccacagaaatgtgtacaagaaccacaagaagacccacagcgaggagcggcccttccagtgtgaggagtgcaaggccctcttccgcacccccttcagcctgcagaggcacctgctgatccacaacagcgagaggaccttcaagtgccaccactgtgatgccaccttcaagaggaaggacaccctgaatgtgcacgtgcaggtggtgcatgagcggcacaagaagtaccgctgtgagctgtgcaacaaggcctttgtgaccccatctgtgctgcggagccacaagaagacccacactggagagaaggagaagatctgcccctactgcggccagaagtttgccagcagcggcaccctgcgggtgcacatccgcagccacactggagaggccgtgcaggtgctgcgggtgcagcagggcctgcagcctgaggcccggcccggctag

SEQ ID NO: 112805 - DNA, 1506 bp, Artificial Sequence
  derived and/or modified sequence
atgctgggcatgtacgtgcccgaccggttcagcctgaagagcagcagagtgcaggatggtatgggtttgtataccgcacggcgcgtccgaaagggcgagaagtttggcccgtttgccggcgagaaaaggatgcctgaggacctagatgagaacatggactacaggttgatgtgggaggtccgggggagcaaaggagaggtgctgtacattctggacgccactaacccccgccacagtaactggcttcggttcgtgcatgaggctccttcccaggaacagaagaatctcgccgcaatccaggagggggaaaacatattttatctggccgttgaagatattgaaacagacaccgaactcttaatcggttacctggactccgatatggaggctgaagaggaagagcagcaaatcatgaccgttattaaggaaggcgaggttgagaatagtcgtcggcagtctactgcaggcagaaaggataggctgggctgcaaggaagactacgcttgcccccaatgtgaatcttcgttcactagtgaggatattctggctgaacacttgcagacgctgcaccagaagcccacggaggagaaggaatttaagtgcaaaaactgtggaaaaaagttccctgtgaagcaggcccttcagagacactttgagcagcatcaggagacttgccgaggagatgctaggtttgtctgcaaagcagactcttgtggcaagcggcttaagtctaaggatgctcttaaaaggcaccaggagaatgtccacactggtgacccaaagaaaaagcttatatgttccgtgtgtaataagaagtgttcatctgcttcttcattacaggagcaccggaagatccatgagatttttgactgccaggagtgtatgaagaagtttatatcagccaatcagctaaaacggcacatgataacgcacagtgaaaagaggccatacaattgcgagatctgtaacaaaagtttcaagcgtctggaccaagtcggcgcccacaaggttatccattctgaagataagccttacaaatgtaaattatgtggcaaggggtttgcacacaggaatgtgtataaaaatcataaaaagacgcatagcgaggagagaccatttcagtgtgaggagtgtaaagctctttttcgaacccccttctcacttcaaagacacctgctgattcacaattctgagcgcactttcaaatgccaccattgcgacgctacttttaaaaggaaggatacactcaacgtgcacgtgcaggtcgtccatgaaagacataaaaagtaccggtgtgaattatgtaataaggctttcgttacgcccagcgtgctgagatcccacaagaaaacccacacaggcgaaaaagagaagatctgtccttattgtggccagaagttcgcctcatccggcactctccgcgtccacatcagatctcacacaggggaggctgtgcaggttctacgggtccaacagggtctgcaacccgaggccaggccaggctag

SEQ ID NO: 112806 - DNA, 2259 bp, Artificial Sequence
  derived and/or modified sequence
caggcccgcgccccccgcgcccccgcagcaggaatggcaggaacggatccgggccgagcccgacccgggacgaggaggggctgagccgcgggggatcctggaatcggcagggaggtggggattctgggaggaaaactccatttcctccttccctgccggtttctcccctctaccctggcaccccaaatttcgatgtgccgcctgccgggcgctaagcgccggtgttgagagaggcggcggccgccgcgcccgggaaaatgctgggcatgtacgtgccggacaggttctccctgaagtcctcccgggttcaggacggcatggggctctacacggcccgcagagtgcgaaagggtgaaaagttcggaccctttgctggagagaagagaatgcctgaagacttggatgaaaatatggattacaggttgatgtgggaggttcgtgggagtaagggagaagttttgtacattttggatgctaccaacccacggcactccaactggcttcgcttcgttcatgaggcaccatctcaggagcagaagaacttggctgccattcaagaaggagaaaacattttctatttggcagttgaagatatagaaacagacacggagcttctgattggctacctggatagtgacatggaggctgaggaggaagaacagcaaattatgacagtcatcaaagaaggggaagttgaaaattctagaagacaatcaacagcgggcagaaaagatcgccttggctgtaaagaggactatgcttgtcctcaatgtgaatcgagttttaccagtgaggatattcttgctgagcatctccagacattgcaccagaaacccacagaggagaaagaatttaagtgcaagaactgtgggaagaaattcccagttaagcaggctttgcaaagacattttgagcagcaccaggagacttgccggggggatgccaggtttgtgtgcaaggctgacagctgtggaaagaggctgaagagcaaggatgccctgaaaagacaccaggaaaatgtccacactggagatcctaagaaaaagcttatatgttcagtgtgcaataaaaagtgttcttcagcatcaagcctacaggaacatagaaagattcatgagatatttgattgtcaagaatgtatgaagaaatttatttcagctaatcagctaaaacgtcatatgatcacccactcagaaaaacgaccctataattgcgagatttgtaataagtctttcaagaggcttgatcaagtgggtgctcacaaagtaatacacagcgaagacaaaccttacaaatgcaaactttgtggaaagggatttgcccacagaaatgtttacaagaatcataagaagacccactctgaggagagaccgttccaatgtgaagaatgtaaagctttgttccggaccccattttctttacagagacacctgctaatacataacagtgagaggactttcaagtgccatcactgcgatgctacctttaagaggaaggatacattaaatgttcatgtccaggtggttcatgaaagacacaagaagtataggtgtgagctatgtaataaggcctttgttacaccttcagtgcttagaagtcataagaaaacacatacaggagaaaaggagaaaatctgtccatattgtggccagaaatttgccagcagtggtacactcagagttcatatccggagccacacaggagaagccgtacaagtgctcagagtgcagcaaggccttcagccagaagcgaggcctggatgagcacaagaggacgcacactggagaaaagccttttcagtgtgatgtttgtgatttggcttttagcctgaagaaaatgctgattcgacacaagatgactcataatcccaatcgtcccctggcagaatgccagttttgccataagaagtttacaaggaatgactacctcaaagtgcacatggacaatatccatggtgtagctgacagctaataggggctgtaaaggaattaaactattcagaagggctcctaatatgaatcccagatttttatcacctgatcagcataacagaagtagccaaaagtgacttactggtctcatagttcttatttgcctacatttagagtctgtagatgcatatgcaaccaaaaaaaagtcttacttttaacaagaaatggtataaatggaaaaaaaatacaactccatagccttgcaaaatgcaacttgtgctctgtcttataaaaatggagaaaggagtcatggctctctttcttggcc

SEQ ID NO: 112807 - DNA, 1506 bp, Artificial Sequence
  derived and/or modified sequence
atgctgggcatgtacgtgcctgaccgctttagcctgaagtctagtcgggtgcaggatggtatgggactctatacggccaggcgagtacggaaaggggagaagtttggcccattcgccggagagaagagaatgccagaagacctcgatgagaatatggactatagattgatgtgggaggtgcgaggcagtaaaggagaggtcctctacatcttggatgccactaatccccgtcacagcaattggctccgattcgtgcatgaagctccatcccaggagcagaagaacctcgcagccattcaagaaggcgagaatattttttacctggcggttgaggatattgagacagacaccgagcttcttattggttatttagactctgatatggaggctgaggaagaggagcagcagataatgacagtaattaaagaaggggaggtggaaaactctcgacgacagagcacagctggacgcaaagacaggctggggtgcaaggaggattacgcttgtcctcaatgtgagtcgtcgtttacgagcgaggacatcttggccgaacacctacagacattgcaccaaaaacctacggaggagaaagaatttaaatgtaagaattgtggcaagaagtttccagtcaaacaggcactgcagaggcactttgagcagcaccaggagacctgtcgcggagatgccagattcgtttgtaaagcggactcatgtggcaaacggctgaagtcgaaagatgccttaaaacggcaccaggagaacgtgcataccggggatcccaagaagaagttaatttgctcagtgtgcaataagaaatgcagctccgcatcatcactgcaggaacatcgtaaaattcatgaaattttcgattgtcaggagtgtatgaagaaattcattagcgccaatcagttaaagcgccatatgatcacacattccgagaaacggccttacaactgcgagatatgcaacaagtcattcaaaagactggaccaggtaggagctcataaggtaatacatagtgaagataagccttacaaatgcaagctttgcgggaaaggattcgctcacagaaacgtatacaagaatcataagaaaacccacagtgaggaacgtccctttcaatgcgaagaatgcaaggccctgttccggacgccgtttagccttcagagacacctgctgatacacaacagtgagaggaccttcaaatgccaccattgcgatgcaactttcaagcggaaggatactttgaatgttcacgttcaagtcgtacacgagcgacacaagaagtaccgttgtgagctatgcaataaagctttcgtgactccatctgtgctgcggtctcacaaaaagacacacacaggagagaaagagaaaatctgcccttattgcggacagaagttcgcctcatcaggcacgcttcgtgttcatatccgctctcatacaggggaagccgtgcaggtcttacgcgtacaacaagggctacagccggaagctcgaccaggatag

SEQ ID NO: 112808 - DNA, 1506 bp, Artificial Sequence
  derived and/or modified sequence
atgctgggcatgtacgtgcccgacagattcagcctgaagagcagcagagtgcaggacggcatgggcctgtacaccgccagaagagtgagaaagggcgagaagttcggccccttcgccggcgagaagagaatgcccgaggacctggacgagaacatggactacagactgatgtgggaggtgagaggcagcaagggcgaggtgctgtacatcctggacgccaccaaccccagacacagcaactggctgagattcgtgcacgaggcccccagccaggagcagaagaacctggccgccatccaggagggcgagaacatcttctacctggccgtggaggacatcgagaccgacaccgagctgctgatcggctacctggacagcgacatggaggccgaggaggaggagcagcagatcatgaccgtgatcaaggagggcgaggtggagaacagcagaagacagagcaccgccggcagaaaggacagactgggctgcaaggaggactacgcctgcccccagtgcgagagcagcttcaccagcgaggacatcctggccgagcacctgcagaccctgcaccagaagcccaccgaggagaaggagttcaagtgcaagaactgcggcaagaagttccccgtgaagcaggccctgcagagacacttcgagcagcaccaggagacctgcagaggcgacgccagattcgtgtgcaaggccgacagctgcggcaagagactgaagagcaaggacgccctgaagagacaccaggagaacgtgcacaccggcgaccccaagaagaagctgatctgcagcgtgtgcaacaagaagtgcagcagcgccagcagcctgcaggagcacagaaagatccacgagatcttcgactgccaggagtgcatgaagaagttcatcagcgccaaccagctgaagagacacatgatcacccacagcgagaagagaccctacaactgcgagatctgcaacaagagcttcaagagactggaccaggtgggcgcccacaaggtgatccacagcgaggacaagccctacaagtgcaagctgtgcggcaagggcttcgcccacagaaacgtgtacaagaaccacaagaagacccacagcgaggagagacccttccagtgcgaggagtgcaaggccctgttcagaacccccttcagcctgcagagacacctgctgatccacaacagcgagagaaccttcaagtgccaccactgcgacgccaccttcaagagaaaggacaccctgaacgtgcacgtgcaggtggtgcacgagagacacaagaagtacagatgcgagctgtgcaacaaggccttcgtgacccccagcgtgctgagaagccacaagaagacccacaccggcgagaaggagaagatctgcccctactgcggccagaagttcgccagcagcggcaccctgagagtgcacatcagaagccacaccggcgaggccgtgcaggtgctgagagtgcagcagggcctgcagcccgaggccagacccggctag

SEQ ID NO: 112809 - protein, 1134 aa, Artificial Sequence
  derived and/or modified sequence
MHQMNAKMHFRFVFALLIVSFNHDVLGKNLKYRIYEEQRVGSVIARLSEDVADVLLKLPNPSTVRFRAMQRGNSPLLVVNEDNGEISIGATIDREQLCQKNLNCSIEFDVITLPTEHLQLFHIEVEVLDINDNSPQFSRSLIPIEISESAAVGTRIPLDSAFDPDVGENSLHTYSLSANDFFNIEVRTRTDGAKYAELIVVRELDRELKSSYELQLTASDMGVPQRSGSSILKISISDSNDNSPAFEQQSYIIQLLENSPVGTLLLDLNATDPDEGANGKIVYSFSSHVSPKIMETFKIDSERGHLTLFKQVDYEITKSYEIDVQAQDLGPNSIPAHCKIIIKVVDVNDNKPEININLMSPGKEEISYIFEGDPIDTFVALVRVQDKDSGLNGEIVCKLHGHGHFKLQKTYENNYLILTNATLDREKRSEYSLTVIAEDRGTPSLSTVKHFTVQINDINDNPPHFQRSRYEFVISENNSPGAYITTVTATDPDLGENGQVTYTILESFILGSSITTYVTIDPSNGAIYALRIFDHEEVSQITFVVEARDGGSPKQLVSNTTVVLTIIDENDNVPVVIGPALRNNTAEITIPKGAESGFHVTRIRAIDRDSGVNAELSCAIVAGNEENIFIIDPRSCDIHTNVSMDSVPYTEWELSVIIQDKGNPQLHTKVLLKCMIFEYAESVTSTAMTSVSQASLDVSMIIIISLGAICAVLLVIMVLFATRCNREKKDTRSYNCRVAESTYQHHPKRPSRQIHKGDITLVPTINGTLPIRSHHRSSPSSSPTLERGQMGSRQSHNSHQSLNSLVTISSNHVPENFSLELTHATPAVEVSQLLSMLHQGQYQPRPSFRGNKYSRSYRYALQDMDKFSLKDSGRGDSEAGDSDYDLGRDSPIDRLLGEGFSDLFLTDGRIPAAMRLCTEECRVLGHSDQCWMPPLPSPSSDYRSNMFIPGEEFPTQPQQQHPHQSLEDDAQPADSGEKKKSFSTFGKDSPNDEDTGDTSTSSLLSEMSSVFQRLLPPSLDTYSECSEVDRSNSLERRKGPLPAKTVGYPQGVAAWAASTHFQNPTTNCGPPLGTHSSVQPSSKWLPAMEEIPENYEEDDFDNVLNHLNDGKHELMDASELVAEINKLLQDVRQS

SEQ ID NO: 112810 - DNA, 3405 bp, Artificial Sequence
  derived and/or modified sequence
atgcatcagatgaacgcaaagatgcatttcaggtttgtgttcgctctgttgattgtgagcttcaaccatgatgtgcttgggaagaatcttaaatatcgcatctacgaggagcaaagggtgggctctgttattgccagactgtcagaggacgtggcagacgtcttgctgaagttacccaacccatcaactgtgaggtttagggccatgcagagaggtaactctcctctgctggtcgtgaacgaggacaatggcgagatctctatcggcgccacaatagatcgggaacaactgtgccagaaaaatcttaactgcagtatagaatttgacgtgataacactccccacagaacatctccagctcttccacattgaggtggaagtattggacatcaacgacaattctcctcagttcagcagatccttgattcccatcgaaatctctgagagtgctgccgtgggcacgagaattcctctggattcggctttcgatcctgacgtgggagagaatagtctccatacatactctcttagtgctaatgatttctttaatattgaagtgagaactcgcactgacggggcaaagtatgccgagctgatcgtggtccgcgagctagatcgggagttgaagtcttcctatgagctccagctgacagcctcagacatgggagtgcctcagcgatccggctcatcgattctcaaaattagcattagcgattcaaatgacaattcaccggcatttgagcagcagtcttacattatacagctgctagagaattcccctgtcgggaccctgctgctcgatcttaatgctaccgacccagacgaaggcgcaaatggcaaaattgtctatagcttcagctcccacgtctcgcccaagattatggagacctttaaaatcgatagcgagcgcggacacttgaccctgtttaagcaggtggattacgaaatcacaaagtcatatgaaattgacgtgcaggcccaggatctgggacctaattcaataccggcacattgcaagatcattataaaggtcgtagatgtgaatgacaacaagccagagattaatatcaatcttatgagtcctgggaaagaggaaatctcctatattttcgaaggagatcctatcgacacattcgtagcactggtacgcgtgcaggataaagacagtggactgaacggagaaatagtctgtaagctgcatggccacggtcattttaagctgcagaaaacatacgagaacaattaccttatactcaccaacgctaccttggacagggaaaaaagatccgaatactctctgactgtgatagccgaggaccgaggaacgccttcactatccactgtgaaacatttcactgtgcagataaatgatattaatgacaacccccctcatttccaacggtcacggtatgagtttgtgataagcgagaacaactccccaggggcttacatcacgactgtgactgcaaccgaccccgatcttggcgagaacggtcaggtaacttacactattcttgaatccttcattctcgggtcctccataacaacctatgtcaccatcgacccgagtaacggagcaatctatgcattacggatctttgatcacgaggaggtgtcacagatcacgtttgttgttgaagctcgtgacggagggagtccaaagcagcttgtctcaaacacgaccgtagtgctaaccatcattgatgagaatgataacgtgccagtcgtgattggcccagcactgaggaacaatacagccgaaattactattcctaaaggagccgagtccggtttccacgtgacaagaatcagggctatagatcgggattctggggtcaatgcagaactttcatgcgccatcgtcgccggcaacgaggagaacatcttcatcattgaccccagatcctgcgacattcacaccaacgtctccatggatagtgttccatataccgagtgggagctgtcagtgattattcaggataaggggaatccccagttgcatactaaagttctgttgaaatgtatgatctttgaatatgccgagtctgtcacatctacagcaatgactagcgtgagccaagcttcattggacgtgagtatgatcatcattatatcgcttggagctatatgtgccgttctgctcgtcattatggttttgttcgccaccaggtgtaacagagagaagaaagatacaaggtcatataactgccgcgttgctgaatccacataccagcatcaccccaaaagaccaagtaggcagatccataagggcgatatcaccctcgtccctactataaatggtacattacccatccgatctcatcaccggtcgtccccaagcagcagccctactctggaacggggtcagatggggtccagacagtctcataactcacatcagtctctcaatagccttgtgactatttcttctaatcacgtgccagaaaacttcagcctagaacttacacacgccaccccggcagtagaggtgtcccagctactctcaatgctccaccagggacagtatcagcctcgccccagcttcagagggaacaagtacagtaggagttatcgttacgcattacaagacatggacaaattcagtttaaaagactcaggcaggggtgattctgaggcaggtgactcagactatgatttaggccgcgattcaccgattgaccggctgctgggagaaggattcagcgatctattccttaccgacgggcgcatccccgcagctatgagattgtgcaccgaagagtgtcgggtcttgggccactctgatcagtgttggatgccgcccctccccagtccaagtagtgattaccgctcaaatatgtttattcccggagaggagttccctacacagccccagcaacagcaccctcaccagagtttggaggatgacgcgcagccggctgattccggtgagaagaagaagtctttttccacctttgggaaggatagtccgaatgatgaagacacaggagacacctcgactagtagtctgttgagtgaaatgtcaagcgtgttccagaggttgctccccccaagtctggacacgtactccgagtgctccgaagtggatagatccaatagcctggagcggcgcaaaggccctctgccagctaaaacagtgggctacccgcagggtgtggcagcttgggcggcttctacacattttcagaaccctactacaaattgcgggccaccactcggaacccactcatctgtacagccttcttcaaaatggctaccagcgatggaggagatcccagaaaactacgaggaagatgatttcgataacgtactgaaccatttaaatgatggcaagcacgaactgatggatgctagcgagctagtggcggaaatcaacaaactcctccaggatgtcagacaatcttag

SEQ ID NO: 112811 - DNA, 3405 bp, Artificial Sequence
  derived and/or modified sequence
atgcaccagatgaatgccaagatgcacttccgctttgtgtttgccctgctgattgtgtccttcaaccatgatgtgctgggcaagaacctgaagtaccgcatctatgaggagcagagggtgggcagcgtcatcgcccggctgtctgaagatgtggctgatgtgctgctgaagctgcccaaccccagcacagtgcgcttccgggccatgcagaggggcaacagccccctgctggtggtgaatgaagataatggagagatcagcatcggggccaccatcgaccgggagcagctgtgccagaagaacctgaactgcagcattgaatttgatgtgatcaccctgcccacagagcacctgcagctgttccacatcgaggtggaggtgctggacatcaatgacaacagcccccagttcagccgcagcctcatccccatcgagatcagcgagagcgctgctgtgggcacccgcatccccctggacagcgcctttgatcctgatgtgggggagaacagcctgcacacctacagcctgagcgccaatgacttcttcaacatcgaggtgaggaccaggacagatggagccaagtatgcagagctgattgtggtgcgggagctggaccgggagctgaagagcagctatgagctgcagctgacagccagtgacatgggcgtgccccagaggagcggcagcagcatcctgaagatcagcatcagtgacagcaatgacaacagccctgcctttgagcagcagagctacatcatccagctgctggagaacagccctgtgggcaccctgctgctggacctgaatgccacagatcctgatgagggcgccaacgggaagatcgtgtacagcttcagcagccacgtgagccccaagatcatggagaccttcaagattgattctgagcggggccacctgaccctcttcaagcaggtggactatgagatcaccaagagctatgaaattgatgtgcaggcccaggacctgggccccaacagcatcccagcccactgcaagatcatcatcaaggtggtggatgtgaatgacaacaagccagagatcaacatcaacctgatgagccctgggaaggaggagatctcctacatctttgaaggagaccccatcgacacctttgtggccctggtgcgggtgcaggacaaggacagcggcctgaatggagaaattgtgtgcaagctgcacggccacggccacttcaagctgcagaagacctatgagaacaactacctgatcctgaccaatgccaccctggaccgggagaagaggtctgagtacagcctgactgtgattgctgaggaccggggcacccccagcctgagcacagtgaagcacttcaccgtgcagatcaatgacatcaatgacaaccccccccacttccagaggagccgctatgaatttgtgatcagcgagaacaacagccctggggcctacatcaccaccgtgacagccacagatcctgacctgggggagaatggccaggtgacctacaccatcctggagagcttcatcctgggcagcagcatcaccacctacgtgaccatcgaccccagcaatggagccatctatgccctgcgcatctttgaccacgaggaggtgtcccagatcacctttgtggtggaggccagagatggcggcagccccaagcagctggtgagcaacaccaccgtggtgctgaccatcattgatgaaaatgacaacgtgcctgtggtgattggccctgccctgaggaacaacacagctgagatcaccatccccaagggagctgagagcggcttccacgtgacccgcatccgggccatcgaccgggacagcggcgtgaatgctgagctgagctgtgccatcgtggccggaaatgaggagaacatcttcatcatcgaccccaggagctgtgacatccacaccaacgtgtccatggacagcgtgccctacacagagtgggagctgagcgtcatcatccaggacaagggcaacccccagctgcacaccaaggtgctgctgaagtgcatgatctttgaatatgcagagagcgtgaccagcacagccatgacctctgtgtcccaggccagcctggatgtgtccatgatcatcatcatcagcctgggcgccatctgtgctgtgctgctggtgatcatggtgctgtttgccacccgctgcaaccgggagaagaaggacaccaggagctacaactgccgggtggccgagagcacctaccagcaccaccccaagaggcccagccggcagatccacaagggggacatcaccctggtgcccaccatcaatggcaccctgcccatccgcagccaccacaggagcagccccagcagcagccccaccctggagcggggccagatgggcagccggcagagccacaacagccaccagagcctgaacagcctggtgaccatcagcagcaaccacgtgcctgagaacttcagcctggagctgacccacgccaccccagctgtggaggtgtcccagctgctgtccatgctgcaccagggccagtaccagccccggcccagcttccggggcaacaagtacagccgcagctaccgctatgccctgcaggacatggacaagttcagcctgaaggacagcggccgcggggacagcgaggccggggacagcgactatgacctgggccgggacagccccatcgaccggctgctgggggagggcttcagtgacctcttcctgacagatggccgcatcccagctgccatgaggctgtgcacagaggagtgccgggtgctgggccacagcgaccagtgctggatgccacccctgcccagccccagcagtgactaccgcagcaacatgttcatccctggagaggagttccccacccagccccagcagcagcacccccaccagagcctggaggatgatgcccagcctgctgacagcggggagaagaagaagagcttcagcaccttcggcaaggacagccccaatgatgaagatactggagacaccagcaccagcagcctgctgtctgagatgagctctgtgttccagaggctgctgccccccagcctggacacctacagcgagtgcagcgaggtggacaggagcaacagcctggagaggaggaagggccccctgcctgccaagacagtgggctacccccagggcgtggccgcctgggccgccagcacccacttccagaaccccaccaccaactgtggcccccccctgggcacccacagctctgtgcagcccagcagcaagtggctgcctgccatggaggagatcccagaaaattatgaagaagatgactttgacaacgtgctgaaccacctgaatgatggcaagcatgagctgatggatgccagcgagctggtggccgagatcaacaagctgctgcaggatgtgcggcagagctag

SEQ ID NO: 112812 - DNA, 3405 bp, Artificial Sequence
  derived and/or modified sequence
atgcaccagatgaacgccaagatgcacttccggttcgtgttcgccctgctgatcgtaagttttaatcacgacgttctgggtaagaacctgaaatatagaatctatgaagagcaacgagtcggatccgttattgcacggctgtccgaggacgtcgctgatgtgttgctaaagcttcccaacccaagtaccgtccgattcagagctatgcaacgcggaaactctccactcctggttgtgaacgaggataatggtgagataagtattggcgccaccatcgatagagagcagctctgccaaaaaaacctcaattgcagcattgagtttgacgtgattaccctgcctacggaacacttacagctgtttcacattgaggtggaggtactggacattaatgacaactccccccagttcagtcggagcctcataccgattgagatcagcgaatctgcagctgttggaacgagaatacctctggattccgccttcgatccagatgtgggcgagaactccctgcacacttactcattgagcgctaatgacttctttaatatcgaggtgcgcactcggaccgatggggccaagtacgctgaactcatagtggtaagagagctggatagggaacttaaatcatcctacgaactacagctcacggctagcgatatgggagtgccgcagcggtccgggtcctccatcctgaaaatcagcatctccgacagtaatgacaatagccccgcattcgaacaacagtcctacatcattcagctgcttgaaaactcccctgttggcaccctgctgctggatctgaatgcgactgaccccgacgagggcgccaatggcaagattgtttattccttttcttcacatgtgtctcccaagatcatggagacttttaaaatcgattctgagcgcggacacttgactttatttaagcaggtggactatgagattacaaagtcctacgagatcgatgttcaggcccaggacctgggccctaactccatcccggctcactgtaagatcattatcaaggtggtggacgtcaatgataacaaacccgagatcaatattaatttaatgtcccccggaaaggaggagatctcttatatctttgagggcgacccaatcgatacattcgttgcactggtccgtgtgcaggataaagactccggccttaacggcgagatagtgtgtaagctccacggacacgggcatttcaaactacaaaagacatatgagaacaactatctgattctgactaacgccacgctagatagggaaaagcgaagcgagtatagcctaacggtcattgccgaagatcgggggacaccaagtctgagcaccgtcaagcactttaccgtgcagattaacgacattaatgataaccctccccactttcagcgctccaggtacgaatttgtgatttccgaaaataacagccccggcgcgtatatcacaaccgtgacagcgaccgatccagatctcggggagaacgggcaggttacatacacaattctcgaatcttttatattgggctcaagcatcaccacttatgtcaccatcgacccgagtaacggggcaatatacgctctgcgaatttttgaccacgaggaggtctcacagatcacgttcgtcgtggaagccagagacggaggctcccctaagcagcttgttagcaacaccacagtggtgctgacgatcattgatgagaacgacaatgtacctgtggtgattggcccggccttgcgcaacaatactgcagaaatcacaatccctaaaggcgcggaatctggattccacgtcacacggattcgagccatcgatagggattccggtgtcaacgcagagctgtcctgcgctatcgttgctggaaacgaggaaaacattttcatcattgatcctagatcctgcgacatccacacaaatgtgtccatggactcagtaccatacacagaatgggagctatcagtcatcatacaagacaaggggaatcctcagttgcataccaaggtgttactgaaatgcatgattttcgagtatgctgagagtgtcacatcgacggcgatgacatcagttagccaagcgtctctggatgtctcgatgattattatcataagcctcggggccatctgcgccgtactgcttgtgattatggtcctcttcgcaacaaggtgcaatcgggaaaagaaggatacccggtcttataactgtagggtggccgagtccacataccagcaccatccaaagcgtcctagccggcagattcataaaggagacataacccttgttcccaccatcaacgggacactgcccatcagatcacaccatagaagtagcccttcaagtagccccactcttgagcggggacagatgggtagtcgacagtcccacaactcccatcagtccttgaactcattagtcaccatctcgtctaaccacgtgccagaaaacttttcattagaattaacacacgccacacccgccgtcgaggtttctcaactgctttccatgttacaccaaggtcagtatcagcctcgaccaagcttccgggggaacaagtacagccggtcctatcggtatgccctgcaagacatggacaagttcagcctgaaggactcaggccgcggggacagcgaggccggcgatagtgattacgatctggggcgcgacagtccaattgacaggctgctgggtgaaggtttttccgacttgttcttaactgatggacgcattcctgcggccatgagactttgcaccgaggagtgcagagtattgggacattccgaccagtgttggatgccccctttgccctctccctcctcagattaccgctctaatatgttcatccctggggaagaatttcctacccagcctcagcagcaacatccccaccaatccctggaagatgacgcacagcccgccgactctggcgaaaaaaagaagagtttcagcacgttcggcaaagactcaccaaatgatgaggacactggcgacacttctacaagcagtctgttgtcagaaatgtcctcagtgttccagaggctgctgccaccatctctggatacttacagcgagtgttcagaggtggacagatcaaattcattagagagacggaaggggcccctccccgcaaaaactgttggctatccccagggtgtggcggcctgggcggcctccacccattttcagaatccgacaacaaactgtggacctccactggggactcattccagtgtgcagccgtcctcgaaatggctgccagctatggaagagatccctgaaaattacgaagaagacgacttcgacaatgtcctgaaccatctgaacgatgggaagcacgaactgatggacgctagcgaactagtggcggagattaacaagctgctgcaggacgtgcgtcagtcttag

SEQ ID NO: 112813 - DNA, 3405 bp, Artificial Sequence
  derived and/or modified sequence
atgcatcaaatgaatgcgaaaatgcacttcagattcgtctttgcattgctgatcgtgtcctttaaccacgacgttctaggcaagaacctgaaataccgaatttacgaagagcagcgtgtggggtccgtgatcgcacgcctgagcgaggacgttgcggacgttctgttgaagttacccaatccttccaccgtaagattcagggcaatgcagagaggtaattcgcctctgttggtggtgaacgaagataacggcgagatttccattggggctaccatcgatcgggagcaactctgccagaagaatctcaactgctccatcgaatttgatgtgattacccttcccaccgagcatctgcaattgtttcacatagaagttgaagtattagacattaatgataacagtccacagttttcacggtctttaattcccatcgaaattagcgagtctgccgcagtggggaccagaatcccccttgactcagcttttgatccagatgtgggagagaattcactacatacctactcactgtccgctaacgactttttcaacattgaggtgagaacacggaccgacggagccaagtacgcagaactgatcgttgtcagggagctggaccgggagcttaaaagctcctacgaactccagcttaccgcatccgatatgggcgtgccacagcgcagtggtagctccatcctgaagattagtatcagtgactctaatgataatagtcctgcctttgaacagcagagttacattattcagctgctggagaactcacccgtcggtaccctgctgcttgatctgaacgcaacagaccccgatgagggcgctaacggaaaaatcgtttactctttttcatcccatgtgagcccaaaaattatggagactttcaagattgatagtgagagaggccatcttaccctgttcaagcaggtcgattacgagatcacaaaatcttatgaaatcgacgtgcaagctcaggatcttgggccaaactcgataccagcccactgcaagataattatcaaggtcgtggacgttaacgacaataagcccgagataaatatcaacctcatgtctccgggaaaagaggagatcagctatatattcgagggcgatccaatcgacaccttcgtggcactggttagggtgcaggacaaggactctgggttgaacggcgaaatagtttgtaaactgcacggccacgggcacttcaagctccaaaaaacatacgagaataactatctgattctaacaaacgctacgctcgaccgcgaaaaaaggagtgagtactctctcaccgtgatcgcagaggacaggggcactccctctctctcaacagtcaagcacttcaccgtgcagattaacgacatcaatgataacccccctcactttcaaagatctcggtatgaattcgtcataagtgagaataatagcccaggcgcatacatcaccaccgtgaccgctaccgatcctgatcttggcgaaaatggccaggtcacatacacaattctggagagctttatcctcggctcctcaataaccacctacgttactatcgaccctagcaacggagccatatacgccctcagaatcttcgatcacgaagaggtgagtcaaattaccttcgtcgtggaggccagagacggcggttctcccaagcagctggtgagcaacaccactgtggttttaaccataattgacgagaatgataatgtgcccgtggtcatcggccctgcactcagaaataacacagctgagataactattcctaagggggctgaatcaggcttccatgtcactagaataagggccattgacagagacagtggcgtcaatgcagagctctcttgtgctattgtggccggaaacgaggaaaatattttcataatagatccacggtcctgcgatattcatactaacgtcagtatggactccgtcccttacacagaatgggaactgagtgtgattatccaggataaaggaaacccccaactgcatacaaaggtgctgttaaagtgcatgatctttgagtacgccgagagcgtgaccagcacggccatgacatcagtcagtcaggcgtccctggatgtgagtatgattatcatcatctcacttggcgctatctgcgctgttctcctagtcatcatggtccttttcgccaccaggtgcaatcgggagaagaaagacacgaggagttataattgtcgagtcgccgagagtacgtaccagcaccatcctaagaggccaagtcggcagatccataaaggtgacatcaccctggtgcccacaatcaacggcaccctgcctattagaagtcaccacaggtcttcgccaagctcttcacccaccctggaacggggtcagatgggctcacgccagagccataactcccaccaatctcttaactccttggtcacaatttctagtaaccatgttccggaaaatttcagtttggaattaacccacgccacccctgcggtcgaagtgtctcagttgctgagtatgctacatcaagggcaataccaaccgaggccttcctttcgaggcaataaatacagcagatcatataggtacgcactgcaggacatggacaaattctcacttaaagatagcggaaggggggactcagaagccggagatagcgattatgatcttggccgagacagccccattgatagactcctcggcgagggcttttccgacctgttcctcactgatggccgtatccctgccgcaatgaggttatgcacagaagagtgtcgagttctgggacactcagaccagtgttggatgccgcctttgccctcaccatcctctgattaccgaagcaacatgttcattcccggagaagagtttcccacccagccccaacagcagcacccccaccagagtctcgaggatgacgcccagccggcagattctggggaaaagaagaagagtttttctaccttcggaaaagactcacctaacgacgaagacactggtgacacctccacatccagcctactgtctgagatgtcatctgtcttccagcggctgctccctccaagcctcgatacatacagcgaatgctctgaagtggaccggtctaacagcttggaaaggaggaaaggaccactgccagctaagacagtcgggtaccctcagggagtggccgcatgggctgccagtacccactttcagaatccaacaacgaattgtggccctcctttgggcacccactcttccgtccagccgtctagtaaatggctgcctgccatggaggagattcctgagaactacgaagaagacgatttcgacaatgtgttgaatcacctgaacgacggcaagcatgagttgatggatgcgtcggaattggtggcggagattaataagctgttgcaggacgtgcgccagtcctag

SEQ ID NO: 112814 - DNA, 5887 bp, Artificial Sequence
  derived and/or modified sequence
agtctgcagccgagcagctaaagggagaaagaatcgctcaggaaagacacactgcagactccaccggcaccctgcaatagatggattccgactacacaagggagaaaacgcggaggtgacactctcctgcctggaaagaggacgaacgaccaaacaaacgcaaggactggactccatgccgaaggtatctggaagtcgtgacacggtgtgtataaaacaaaagtttgcgagctgttaattgctgtgctgtgttattaagagacgctttcaagtttcaagtaccaaatgtagctttacgttgccaaaggaagttgaggcaattgctttgctgttttaacttgctctgtgagggaaatctcataaactgaccaatgcaccaaatgaatgctaaaatgcactttaggtttgtttttgcacttctgatagtatctttcaaccacgatgtactgggcaagaatttgaaatacaggatttatgaggaacagagggttggatcagtaattgcaagactatcagaggatgtggctgatgttttattgaagcttcctaatccttctactgttcgatttcgagccatgcagaggggaaattctcctctacttgtagtaaacgaggataatggggaaatcagcataggggctacaattgaccgtgaacaactgtgccagaaaaacttgaactgttccatagagtttgatgtgatcactctacccacagagcatctgcagcttttccatattgaagttgaagtgctggatattaatgacaattctccccagttttcaagatctctcatacctattgagatatctgagagtgcagcagttgggactcgcattcccctggacagtgcatttgatccagatgttggggaaaattccctccacacatactcgctctctgccaatgatttttttaatatcgaggttcggaccaggactgatggagccaagtatgcagaactcatagtggtcagagagttagatcgggagctgaagtcaagctacgagcttcagctcactgcctcagacatgggagtacctcagaggtctggctcatccatactaaaaataagcatttcagactccaatgacaacagccctgcttttgagcagcaatcttatataatacaactcttagaaaactccccggttggcactttgctcttagatctgaatgccacggatccagatgagggcgctaatgggaaaattgtatattccttcagcagtcatgtgtctcccaaaattatggagacttttaaaattgattctgaaagaggacatttgactcttttcaagcaagtggattatgaaatcaccaaatcctatgagattgatgttcaggctcaagatttgggtccaaattcaatcccagcccattgcaaaattataattaaggttgtggatgttaatgacaataaacctgaaattaacatcaacctcatgtcccctggaaaagaagaaatatcttatatttttgaaggggatcctattgatacatttgttgctttggtcagagttcaggacaaggattctgggctgaatggagaaatagtttgtaagcttcatggacatggtcactttaaacttcagaagacatatgaaaacaattatttaatcttaactaatgccacactggatagagaaaagagatctgagtatagtttgactgtaatcgctgaggacagggggacacccagtctctctacagtgaaacattttacagttcaaatcaatgatatcaatgacaatccaccccacttccagagaagccgatatgaatttgtaatttcagaaaataactcaccaggggcatatatcaccactgttacagccacagatcctgatcttggagaaaatgggcaagtgacatacaccatcttggagagttttattctaggaagttccataactacatatgtaaccattgacccatctaatggagccatctatgccctcagaatctttgatcatgaagaagtgagtcagatcacttttgtggtagaagcaagagatggaggaagcccgaagcaactggtaagcaataccacagttgtgctcaccatcattgacgaaaatgacaacgttcctgtggttatagggcctgcattgcgtaataatacggcagaaatcaccattcccaaaggggctgaaagtggctttcatgtcacaagaataagggcaattgacagagactctggtgtgaatgctgaactcagctgcgccatagtagcaggtaatgaggagaatatcttcataattgatccacgatcatgtgacatccataccaacgttagcatggattctgttccctacacagaatgggagctgtcagttatcattcaggacaaaggcaatcctcagctacataccaaagtccttctgaagtgcatgatctttgaatatgcagagtcggtgacaagtacagcaatgacttcagtaagccaggcatccttggatgtctccatgataataattatttccttaggagcaatttgtgcagtgttgctggttattatggtgctatttgcaactaggtgtaaccgcgagaagaaagacactagatcctataactgcagggtggccgaatcaacttaccagcaccacccaaaaaggccatcccggcagattcacaaaggggacatcacattggtgcctaccataaatggcactctgcccatcagatctcatcacagatcgtctccatcttcatctcctaccttagaaagagggcagatgggcagccggcagagtcacaacagtcaccagtcactcaacagtttggtgacaatctcatcaaaccacgtgccagagaatttctcattagaactcacccacgccactcctgctgttgaggtctctcagcttctttcaatgcttcaccaggggcaatatcagccaagaccaagttttcgaggaaacaaatattccaggagctacagatatgcccttcaagacatggacaaatttagcttgaaagacagtggccgtggtgacagtgaggcaggagacagtgattatgatttggggcgagattctccaatagataggctgttgggtgaaggattcagcgacctgtttctcacagatggaagaattccagcagctatgagactctgcacggaggagtgcagggtcctgggacactctgaccagtgctggatgccaccactgccctcaccgtcttctgattataggagtaacatgttcattccaggggaagaattcccaacgcaaccccagcagcagcatccacatcagagtcttgaggatgacgctcagcctgcagattccggtgaaaagaagaagagtttttccacctttggaaaggactccccaaacgatgaggacactggggataccagcacatcatctctgctctcggaaatgagcagtgtgttccagcgtctcttaccgccttccctggacacctattctgaatgcagtgaggtggatcggtccaactccctggagcgcaggaagggacccttgccagccaaaactgtgggttacccacagggggtagcggcatgggcagccagtacgcattttcaaaatcccaccaccaactgtgggccgccacttggaactcactccagtgtgcagccttcttcaaaatggctgccagccatggaggagatccctgaaaattatgaggaagatgattttgacaatgtgctcaaccacctcaatgatgggaaacacgaactcatggatgccagtgaactggtggcagagattaacaaactgcttcaagatgtccgccagagctaggagattttagcgaagcatttttgtttccatgtatatggaaatagggaacaacaacaacaacaaaaaaccctgaaagaactggcattgccaaatagttgcatttatcataaatgtgtctgtgtatattgaatattaaatactgtattttcgtatgtacacaatgcaagtgtgattattttaatctgtattttaaaaatacatttgtaccttatatttatgtgtaatttaacaaacaaattttatttttttactcccatgacagacatgtttttcctagtcgtgtagaaactagccactgttcaaatctgatacactattcaaccacaaagtgtaaaggcactgcttagattagttttgttggggaagaattattatgttgtatgaacaaccccactgaagcattatacaattcttaattccattaagtgatcccactttttttcaataactttttagaaattaagaatcattaaaattgttaagctattttattgttattttctctactttctactagccccaatagttgaactcttataggaaaatcgaaagataaagtgaaagtttatttcaggactgagaaatatcttgaaggttatttattagatgactatctcaaatgaactttttatagacaatgatgaaaacagaattaaagtcaatgtttcctgactcccaggcccctactattccaggccatcacactggcctgttccggagaatatttctctcacaatattattatctacttataattatggtaaacaataaattttattccatccttgtagtatgaaacatgctccaaggaaatggaatctgtcctttaaatggataacagtatgtgttctaatggcataaaatattactggataaaaacagttgtgtcagtgtctctcctaaggtagtaaatataattgacttattctgaacccattctattttgaatctcccctttcctctcacaatacttgaacattttaatcttttggaatattgtctttctttgttataactattcatttttagcttttgtctccagtgcatgatctcatatttttgcttttatttttagtataagaacatttataaaatcatatttttgttactgcaattgttttatttgttgtgtggcaaatgagaaatcctttatttattgtgctgtgatctctctgtgtggaatgccttggtgagagagatgcttattatgactattatcatttctgaccaagcttctattaatgttatttctaataatacactatcttgattgtactctccagaaaatttttctgtcagtgaaaataaaagaaaaattaaagtaaagctaaggaactgtctataagtcagagtcctgttcctacatatttgttcaaaagcttggcatgcagcaggcccttcctgagcgggtgattcagtgttgagtttcaaataataaacaggcagcattcagttggctgggcgaacaagaaaaacacaatggaaaaggaatgagtttgagacttgtaatgggaatgaaagtagtaagccatattccagctaaataagttaaatgcatttggggaataaagaaaaaagagtaagcaagcaataattgcttgaatatttttcaaattacaacaaaaaaaaatactttcttaggacattttgtattaaattgtgcaggataaaaaggtatccttacaatgtttccaggaggcaagaatattatcgtccctggcttgctagtcaggaattgaaacactgggaaagttaagtaactgaaaagtgactaaaattcagatatttgaattctcaaatgagtaccacattaaatagaatatattacctctttcaacaggcacattttcctttataggagagattgcaattacaagtgaaatttcagtatatttttcagtagattacacacacaaacgctaaccatatttaaatgcattctgcctttcaacttcacttcctttcagtatatattaccattaagaaaaagacttttatatcctcactgttcttaatttaaagcaccagcagtaatatgggaagctatgctgaaaaccgctattttgaataatgtgaaataaataaaatgcaatatttcattcaacacaaaa

SEQ ID NO: 112815 - DNA, 3405 bp, Artificial Sequence
  derived and/or modified sequence
atgcaccagatgaacgccaagatgcacttcagattcgtgttcgccctgctgatcgtgagcttcaaccacgacgtgctgggcaagaacctgaagtacagaatctacgaggagcagagagtgggcagcgtgatcgccagactgagcgaggacgtggccgacgtgctgctgaagctgcccaaccccagcaccgtgagattcagagccatgcagagaggcaacagccccctgctggtggtgaacgaggacaacggcgagatcagcatcggcgccaccatcgacagagagcagctgtgccagaagaacctgaactgcagcatcgagttcgacgtgatcaccctgcccaccgagcacctgcagctgttccacatcgaggtggaggtgctggacatcaacgacaacagcccccagttcagcagaagcctgatccccatcgagatcagcgagagcgccgccgtgggcaccagaatccccctggacagcgccttcgaccccgacgtgggcgagaacagcctgcacacctacagcctgagcgccaacgacttcttcaacatcgaggtgagaaccagaaccgacggcgccaagtacgccgagctgatcgtggtgagagagctggacagagagctgaagagcagctacgagctgcagctgaccgccagcgacatgggcgtgccccagagaagcggcagcagcatcctgaagatcagcatcagcgacagcaacgacaacagccccgccttcgagcagcagagctacatcatccagctgctggagaacagccccgtgggcaccctgctgctggacctgaacgccaccgaccccgacgagggcgccaacggcaagatcgtgtacagcttcagcagccacgtgagccccaagatcatggagaccttcaagatcgacagcgagagaggccacctgaccctgttcaagcaggtggactacgagatcaccaagagctacgagatcgacgtgcaggcccaggacctgggccccaacagcatccccgcccactgcaagatcatcatcaaggtggtggacgtgaacgacaacaagcccgagatcaacatcaacctgatgagccccggcaaggaggagatcagctacatcttcgagggcgaccccatcgacaccttcgtggccctggtgagagtgcaggacaaggacagcggcctgaacggcgagatcgtgtgcaagctgcacggccacggccacttcaagctgcagaagacctacgagaacaactacctgatcctgaccaacgccaccctggacagagagaagagaagcgagtacagcctgaccgtgatcgccgaggacagaggcacccccagcctgagcaccgtgaagcacttcaccgtgcagatcaacgacatcaacgacaaccccccccacttccagagaagcagatacgagttcgtgatcagcgagaacaacagccccggcgcctacatcaccaccgtgaccgccaccgaccccgacctgggcgagaacggccaggtgacctacaccatcctggagagcttcatcctgggcagcagcatcaccacctacgtgaccatcgaccccagcaacggcgccatctacgccctgagaatcttcgaccacgaggaggtgagccagatcaccttcgtggtggaggccagagacggcggcagccccaagcagctggtgagcaacaccaccgtggtgctgaccatcatcgacgagaacgacaacgtgcccgtggtgatcggccccgccctgagaaacaacaccgccgagatcaccatccccaagggcgccgagagcggcttccacgtgaccagaatcagagccatcgacagagacagcggcgtgaacgccgagctgagctgcgccatcgtggccggcaacgaggagaacatcttcatcatcgaccccagaagctgcgacatccacaccaacgtgagcatggacagcgtgccctacaccgagtgggagctgagcgtgatcatccaggacaagggcaacccccagctgcacaccaaggtgctgctgaagtgcatgatcttcgagtacgccgagagcgtgaccagcaccgccatgaccagcgtgagccaggccagcctggacgtgagcatgatcatcatcatcagcctgggcgccatctgcgccgtgctgctggtgatcatggtgctgttcgccaccagatgcaacagagagaagaaggacaccagaagctacaactgcagagtggccgagagcacctaccagcaccaccccaagagacccagcagacagatccacaagggcgacatcaccctggtgcccaccatcaacggcaccctgcccatcagaagccaccacagaagcagccccagcagcagccccaccctggagagaggccagatgggcagcagacagagccacaacagccaccagagcctgaacagcctggtgaccatcagcagcaaccacgtgcccgagaacttcagcctggagctgacccacgccacccccgccgtggaggtgagccagctgctgagcatgctgcaccagggccagtaccagcccagacccagcttcagaggcaacaagtacagcagaagctacagatacgccctgcaggacatggacaagttcagcctgaaggacagcggcagaggcgacagcgaggccggcgacagcgactacgacctgggcagagacagccccatcgacagactgctgggcgagggcttcagcgacctgttcctgaccgacggcagaatccccgccgccatgagactgtgcaccgaggagtgcagagtgctgggccacagcgaccagtgctggatgccccccctgcccagccccagcagcgactacagaagcaacatgttcatccccggcgaggagttccccacccagccccagcagcagcacccccaccagagcctggaggacgacgcccagcccgccgacagcggcgagaagaagaagagcttcagcaccttcggcaaggacagccccaacgacgaggacaccggcgacaccagcaccagcagcctgctgagcgagatgagcagcgtgttccagagactgctgccccccagcctggacacctacagcgagtgcagcgaggtggacagaagcaacagcctggagagaagaaagggccccctgcccgccaagaccgtgggctacccccagggcgtggccgcctgggccgccagcacccacttccagaaccccaccaccaactgcggcccccccctgggcacccacagcagcgtgcagcccagcagcaagtggctgcccgccatggaggagatccccgagaactacgaggaggacgacttcgacaacgtgctgaaccacctgaacgacggcaagcacgagctgatggacgccagcgagctggtggccgagatcaacaagctgctgcaggacgtgagacagagctag

SEQ ID NO: 112816 - protein, 244 aa, Artificial Sequence
  derived and/or modified sequence
MSSRWSRSSQSTDRSLKSVDGRQIRVDQAGKSSDNRSRGYRGGSAGGRGFFRGGRGRGRGFSRGGGDRGYGGNRFESRSGGYGGSRDYYSSRSQSGGYSDRSSGGSYRDSYDSYGKSHSEGATLLWPAVGARFTLVPSPSTLGWTLRPCHCACPEEAHLSSQSHFYRRTQKPNETDQKGKGERGPAGQSARCMCGRRPASLGCGGWLLPGRRPRPGLASGVKLPLVASVPLHCACFLSSATHNE

SEQ ID NO: 112817 - protein, 263 aa, Artificial Sequence
  derived and/or modified sequence
MASDEGKLFVGGLSFDTNEQSLEQVFSKYGQISEVVVVKDRETQRSRGFGFVTFENIDDAKDAMMAMNGKSVDGRQIRVDQAGGGDRGYGGNRFESRSGGYGGSRDYYSSRSQSGGYSDRSSGGSYRDSYDSYGKSHSEGATLLWPAVGARFTLVPSPSTLGWTLRPCHCACPEEAHLSSQSHFYRRTQKPNETDQKGKGERGPAGQSARCMCGRRPASLGCGGWLLPGRRPRPGLASGVKLPLVASVPLHCACFLSSATHNE

SEQ ID NO: 112818 - DNA, 3025 bp, Artificial Sequence
  derived and/or modified sequence
actcgcgcgttaggaggctcgggtcgttgtggtgcgctgtcttcccgcttgcgtcagggacctgcccgactcagtggccgccatggcatcagatgaaggcaaactttttgttggagggctgagttttgacaccaatgagcagtcgctggagcaggtcttctcaaagtacggacagatctctgaagtctgtagatggacggcagatccgagtagaccaggcaggcaagtcgtcagacaaccgatcccgtgggtaccgtggtggctctgccgggggccggggcttcttccgtgggggccgaggacggggccgtgggttctctagaggaggaggggaccgaggctatggggggaaccggttcgagtccaggagtgggggctacggaggctccagagactactatagcagccggagtcagagtggtggctacagtgaccggagctcgggcgggtcctacagagacagttatgacagttacggtaagtcacactccgagggcgccacgctgctgtggcctgcggtgggagctcggttcaccttggtgccctctccaagcactttaggctggacactcagaccttgtcactgtgcttgcccagaagaggcgcatctgtcctctcagagccatttctatcgcaggacgcaaaagccaaatgagactgaccaaaaaggcaagggagagcgagggcccgctgggcagtcagctaggtgcatgtgtggccgcaggccagcctccctcggctgtggggggtggttgctccccggccgcaggccgcgccctggtctggcctctggggtgaagctgcctcttgttgcttcggtgcctttacactgtgcctgcttcttgtcctcagctacacacaacgagtaaaaacccttcctgctcaagatcgtccttccaatggctgtgtgtttaaagattgtgggagcttcgctgaacgttaatgtgtagtaaatgcacctccttgtattcccactttcgtagtcatttcggttctgatcttgtcaaacccagcctgaccgcttctgacgccgggatggcctcgttactagacttttctttttaaggaagtgctgtttttttttgagggttttcaaaacattttgaaaagcatttacttttttgaccacgagccatgagttttcaaaaaaatcgggggttgtgtgggtttttggtttttgttttagtttttggttgcgttgcctttttttttttagtggggttggccccatgaagtgggtgccccactcacttctctgagatcgaacggactgtgaatccgctctttgtcggaagctgagcaagctgtggcttttttccaactccgtgtgacgtttctgagtgtagtgtggtaggaccccggcgggtgtggcagcaactgccctggagccccagcccctgcgtccatctgtgctgtgcgccccacagtagacgtgcagacgtccctgagaggttcttgaagatgtttatttatattgtccttttttactggaagacgtacgcatactccatcgatgttgtatttgcagtggctgaggaattcttgtacgcagttttctttggctttacgaagccgattaaaagaccgtgtgaaatgaaccttgctctgacaattcccttgcattgcaccacacactccttgctgcgggctcctgcagccagacctgagcagagagagaaggtggagaagcagcgggtctgcaagccttccctggggcctgcagagctagaaagggaggcccagcagactggcgctggtcagggtaggggagccaggcgggggacgggagcgggcagctcaggcctcagggcagccctgggaggcttctggcagtggtggccagagggctggactgtgcgggcagcttagcagggacagtggacgtgcacctgacgctgacctggactgcctcagtctagaagcaggccagagagcagaggcacgtggcatcccagggcgacctcagacggccagccggttagctagttctgctgttgcttcacgagttctgagcattctctgctagcctatggaagctgcagccctcggaggacagaagtgttgtgcgcccaacagaaccctctgagacgcaagctgctcccttggctagctcatatgtggaaatagccctgtaattcgaggtaactccttccgctcgtgtccacatccctcttgttgagagctcactgaaagtcatgtgcccggggaatgttcctgtgactgttttttgtttttccttttttttttaactttgtttttgtttttttcaattaagctggaactaaagtcaggcccagccattacgctccccacgtgcagccaggtgcagcctgggcccagtcatgcctggctcatagatgaaatcccttaagcaggattgaagaccagtgaacgcccccgccttttggattttttgctcaattgaccgtcttttccagacctctttaagtcacactcttaacttagctttctctgatgtctgttgccgccattagtttttttctagagcccacactggcccacatagctccatcccatacgggtagctggctccagctgcgccaaggtgcagacccgccctgggcatgctggcctgtgacggagcctgaggtcacagccccctgactagcctgagaccttcctaggggctgtggctgtttccggggaggccgggaggggcagctgtgagccctgtggaggacgttgggagtaacgctgctttgctttggcaggttgaaggggcccggccaggactcggggaagggtggcctgagagcagcgatgacctctggggtcactgtcccaggagggacttcacctggaacaagagctggaggcagccgcttgcccaggaggcttgtcccctgaggcgcttcgccagtgaggtgcgggctcagggcctcgagtctctcctggagcacgggctgcggtgcgccggcagcttacggggcggccagtccttgcccacaacgatgtggagccctgtgaaagtcggattcgaataaagggccacgtgtgcacccag

SEQ ID NO: 112819 - DNA, 1543 bp, Artificial Sequence
  derived and/or modified sequence
ctcactcgcgcgttaggaggctcgggtcgttgtggtgcgctgtcttcccgcttgcgtcagggacctgcccgactcagtggccgccatggcatcagatgaaggcaaactttttgttggagggctgagttttgacaccaatgagcagtcgctggagcaggtcttctcaaagtacggacagatctctgaagtggtggttgtgaaagacagggagacccagagatctcggggatttgggtttgtcacctttgagaacattgacgacgctaaggatgccatgatggccatgaatgggaagtctgtagatggacggcagatccgagtagaccaggcaggaggaggggaccgaggctatggggggaaccggttcgagtccaggagtgggggctacggaggctccagagactactatagcagccggagtcagagtggtggctacagtgaccggagctcgggcgggtcctacagagacagttatgacagttacggtaagtcacactccgagggcgccacgctgctgtggcctgcggtgggagctcggttcaccttggtgccctctccaagcactttaggctggacactcagaccttgtcactgtgcttgcccagaagaggcgcatctgtcctctcagagccatttctatcgcaggacgcaaaagccaaatgagactgaccaaaaaggcaagggagagcgagggcccgctgggcagtcagctaggtgcatgtgtggccgcaggccagcctccctcggctgtggggggtggttgctccccggccgcaggccgcgccctggtctggcctctggggtgaagctgcctcttgttgcttcggtgcctttacactgtgcctgcttcttgtcctcagctacacacaacgagtaaaaacccttcctgctcaagatcgtccttccaatggctgtgtgtttaaagattgtgggagcttcgctgaacgttaatgtgtagtaaatgcacctccttgtattcccactttcgtagtcatttcggttctgatcttgtcaaacccagcctgaccgcttctgacgccgggatggcctcgttactagacttttctttttaaggaagtgctgtttttttttgagggttttcaaaacattttgaaaagcatttacttttttgaccacgagccatgagttttcaaaaaaatcgggggttgtgtgggtttttggtttttgttttagtttttggttgcgttgcctttttttttttagtggggttggccccatgaagtgggtgccccactcacttctctgagatcgaacggactgtgaatccgctctttgtcggaagctgagcaagctgtggcttttttccaactccgtgtgacgtttctgagtgtagtgtggtaggaccccggcgggtgtggcagcaactgccctggagccccagcccctgcgtccatctgtgctgtgcgccccacagtagacgtgcagacgtccctgagaggttcttgaagatgtttatttatattgtccttttttactggaagacgtacgcatactccatcgatgttgtatttgcagtggctga

SEQ ID NO: 112820 - DNA, 792 bp, Artificial Sequence
  derived and/or modified sequence
atggcaagtgatgaggggaagttgtttgtcggaggtctatcgttcgataccaacgagcagtccctcgaacaggtcttttctaagtatgggcagatttccgaggtggtcgtggtcaaggatagggaaactcagaggagccgtgggtttggattcgttacattcgaaaatatagatgacgctaaagatgcaatgatggcaatgaatggcaaatccgttgatggccgacagatccgagtggatcaagccggtggtggcgaccgcgggtacggaggcaataggttcgagagccgctcaggtgggtacggtggttcgagagactactacagttctcggtcacagagcgggggttattcagatagatcatcagggggatcgtatcgcgactcatatgactcgtacgggaagtctcatagtgagggagctactctgctgtggcctgcggtaggcgcccggtttactctcgtgccttcaccttctacactgggctggaccctccgtccctgccattgcgcttgtccagaagaggcccacctttccagtcagagccacttctaccgtcgaacacagaaacctaacgagacagaccagaaagggaagggggagcggggccccgccggacagagcgcccggtgtatgtgcgggcgtcggcccgcaagcttgggctgtggaggctggctgctacctggtagacgcccaaggcctgggctggcgtcaggggtgaaactgcccttggtagcctcagtgccactgcattgcgcgtgctttttaagtagtgccacccacaacgagtag

SEQ ID NO: 112821 - DNA, 735 bp, Artificial Sequence
  derived and/or modified sequence
atgtcctccagatggtcaagatcaagtcagtctaccgataggtcactaaagtctgtagacgggaggcagatccgcgtggatcaggccggtaaatccagcgacaaccggtcccgtggctaccgcggcggctccgccggggggagaggattctttcggggcgggaggggtcgtggtcgcggtttctctagaggagggggggaccgtgggtacggtggtaaccggttcgagtccagaagcgggggttatggaggcagtcgagattactattcttcccggtcacagtccggagggtactctgataggtctagcggcggcagttatagggactcctacgactcctatggcaagtctcatagtgaaggagccactctgctctggccggcagtgggcgctcggtttactctggtgccttctcccagcacactcggatggaccttgagaccgtgtcactgtgcatgccccgaagaggcgcacctcagctcccagtctcacttctatcgaaggactcagaaacccaatgagaccgaccagaaaggcaagggcgaacgaggccctgccggacagtccgcgaggtgtatgtgcggtcgtagacccgcgagcctcggttgtggcggatggctgttgcctggacgccgtccccggcctggtctggcatcaggtgtgaaattgcctctcgtggcctccgtgccactgcactgcgcctgctttctcagtagtgccacgcacaacgaatag

SEQ ID NO: 112822 - DNA, 792 bp, Artificial Sequence
  derived and/or modified sequence
atggccagtgatgagggcaagctgtttgtgggcggcctgagctttgacaccaatgagcagagcctggagcaggtgttcagcaaatatggccagatcagcgaggtggtggtggtgaaggaccgggagacccagaggagccggggctttggatttgtgacctttgaaaatattgatgatgccaaggatgccatgatggccatgaatggcaagtctgtggatggccggcagatccgggtggaccaggccggcggcggggaccggggctatggaggcaacagatttgagagccgcagcggcggctatggaggcagccgggactactacagcagccgcagccagagcggcggctacagcgacaggagcagcggcggcagctacagagacagctatgacagctatggcaagagccacagcgagggcgccaccctgctgtggccagctgtgggcgcccgcttcaccctggtgcccagccccagcaccctgggctggaccctgcggccctgccactgtgcctgcccagaggaggcccacctgagcagccagagccacttctacagaaggacccagaagcccaatgaaacagaccagaagggcaaaggagagcggggccctgctggccagagcgcccgctgcatgtgtggcagaagacctgccagcctgggctgcggcggctggctgctgcccggccggcggccccggcccggcctggccagcggcgtgaagctgcccctggtggcctctgtgcccctgcactgtgcctgcttcctgagcagcgccacccacaatgaatag

SEQ ID NO: 112823 - DNA, 735 bp, Artificial Sequence
  derived and/or modified sequence
atgagcagccgctggagccgcagcagccagagcacagacaggagcctgaagtctgtggatggccggcagatccgggtggaccaggccggcaagagcagtgacaacagaagccggggctaccggggcggcagcgctgggggccggggcttcttccggggcggccggggccggggccggggcttcagccggggcggcggggaccggggctacggcggcaacagatttgagagccgcagcggcggctacggcggcagccgggactactacagcagccgcagccagagcggcggctacagcgacaggagcagcggcggcagctacagagacagctatgacagctatggcaagagccacagcgagggcgccaccctgctgtggccagctgtgggcgcccgcttcaccctggtgcccagccccagcaccctgggctggaccctgcggccctgccactgtgcctgcccagaggaggcccacctgagcagccagagccacttctacagaaggacccagaagcccaatgaaacagaccagaagggcaagggggagcggggccctgctggccagagcgcccgctgcatgtgtggccggcggcctgccagcctgggctgcggcggctggctgctgcctggaagaagacccaggcctggcctggccagcggcgtgaagctgcccctggtggcctctgtgcccctgcactgtgcctgcttcctgagcagcgccacccacaatgaatag

SEQ ID NO: 112824 - DNA, 792 bp, Artificial Sequence
  derived and/or modified sequence
atggccagcgacgagggcaagctgttcgtgggcggcctgagcttcgacactaatgaacagtctttggagcaggtgttttctaaatacggtcagatctctgaggtggtagtggtgaaggaccgtgagactcagcgatccagaggtttcgggtttgtgacatttgagaatatcgacgacgctaaagacgccatgatggccatgaacggcaaatccgtggacggccggcagatacgtgtggaccaggccggaggtggcgatcgaggctacgggggaaataggttcgagagcagatcaggcgggtacggcgggtctcgagactattattcttcccgttcccagagtggcggctacagtgacagatcgtcaggcggatcatacagagatagctacgacagttacggcaagtctcactcagaaggcgccaccctactgtggccggccgtcggggccagattcaccctcgttccctctccatcaacactgggctggaccctccgtccttgtcactgtgcatgtccagaggaagcccatctatcttcgcagagccatttttatagacgaacgcaaaaacctaatgagacagaccagaagggcaagggcgagcgagggccggctggtcaaagcgcgagatgcatgtgcgggcggcggccggcatctctgggttgcggaggctggctgcttcccggacgacgccctcgtccggggctcgcatctggtgtaaagctgcccctggtggcttctgtacctttgcattgcgcgtgttttctgagcagcgcaactcataacgagtag

SEQ ID NO: 112825 - DNA, 735 bp, Artificial Sequence
  derived and/or modified sequence
atgagcagccggtggagccggagcagccagagcaccgaccggagcctgaagtctgtcgatggacgacagatccgagtggaccaagccggcaaatcatctgataatcgaagtcgtggataccgaggaggatcagctggcggaaggggcttcttcagagggggtcgcggaagggggcgtgggtttagccgcgggggtggcgaccggggctacggaggcaacaggttcgagtcacggtctggcggatatggtggaagcagggactattatagctctcgctcccaatccggtggctactccgatcgctctagcgggggatcttatcgagattcttacgatagctatggcaagtctcattctgaaggcgccacactgttgtggccagctgtaggtgctcgctttacactcgtcccgagccccagcacactggggtggacccttagaccatgtcactgtgcttgccctgaggaagcgcatctatcctcacagtcacacttctatcggcgcactcagaagcctaacgagactgaccagaagggcaagggagagcgtggccccgcagggcagtctgctcgctgtatgtgcggacgtagaccagcgagtctgggctgtgggggatggttattgcccgggcgtcgcccacggcccggcctggcctcaggggtcaaactccccctggtcgcatccgttcccctgcactgtgcctgctttctttccagcgctactcacaatgaatag

SEQ ID NO: 112826 - DNA, 792 bp, Artificial Sequence
  derived and/or modified sequence
atggccagcgatgagggcaagctgttcgtgggcggactctcttttgacactaacgaacagtcactcgaacaggtcttttccaagtatggacagatcagcgaggtggtggtggtgaaagatagggagacccagcggtctcgaggcttcggcttcgttacttttgaaaatatagacgacgccaaggatgccatgatggccatgaatggcaaaagcgtcgacggaagacagataagggtagaccaggctggagggggagatagagggtatggaggcaatcggtttgagagccgcagtggaggctatggcggatctagggactattacagctcccgtagccagtcaggcggttattccgataggtctagtggaggtagctaccgcgactcctatgactcttacggtaaaagtcacagtgagggtgccacactcctgtggccggctgtgggcgcacgttttacgctggtaccctccccctcgaccctcggctggacccttagaccctgtcactgtgcctgtcccgaagaggcccatctatctagccaatcacacttttatcgccgaacccaaaagcccaatgaaacggatcagaagggcaagggcgagcgcggacctgcaggtcaatcggccagatgtatgtgcggtcgcaggccggcaagtctcgggtgcggcggatggctcctgcccggtaggcgccctcggccaggcctagcctccggtgttaagttgcccttagtcgcctctgtgccgctgcattgtgcctgcttcctttccagcgccacacacaacgagtag

SEQ ID NO: 112827 - DNA, 735 bp, Artificial Sequence
  derived and/or modified sequence
atgtcctcccgctggtcacggagtagccagtcaacggatcggtctttaaaatctgtggacgggcgacagatacgggttgaccaggctggtaaatcgtcagataatcggtccagagggtatcggggaggcagtgccggagggaggggattctttcggggaggtcgaggaagagggagaggcttctcacgcggaggcggagatcgaggatatggcggaaacagatttgagtctcgctccggcggttacggaggatcacgcgattattattcttcacggagccagtctggaggatattctgacaggtcctcaggtggctcttaccgcgacagttatgacagctatggcaagagccactctgagggggctacactgctttggcccgcagttggggctcggtttactctcgtgcctagtccatccacactgggatggaccctgaggccctgccactgtgcttgccctgaagaggctcatctgtccagtcagagtcacttttatcggaggactcagaagccgaacgaaactgatcaaaagggaaagggggaaaggggcccagctggacagtccgccagatgtatgtgcggtagacgcccagcctcactcggatgtgggggatggctgctgcccggacggagaccacggccaggattagcctccggcgtgaagttgcctctggttgcctcggtaccactacactgtgcttgctttctttcttcagcaacccataatgagtag

SEQ ID NO: 112828 - DNA, 792 bp, Artificial Sequence
  derived and/or modified sequence
atggccagcgacgagggcaagctgttcgtgggcggcctgagcttcgacaccaacgagcagagcctggagcaggtgttcagcaagtacggccagatcagcgaggtggtggtggtgaaggacagagagacccagagaagcagaggcttcggcttcgtgaccttcgagaacatcgacgacgccaaggacgccatgatggccatgaacggcaagagcgtggacggcagacagatcagagtggaccaggccggcggcggcgacagaggctacggcggcaacagattcgagagcagaagcggcggctacggcggcagcagagactactacagcagcagaagccagagcggcggctacagcgacagaagcagcggcggcagctacagagacagctacgacagctacggcaagagccacagcgagggcgccaccctgctgtggcccgccgtgggcgccagattcaccctggtgcccagccccagcaccctgggctggaccctgagaccctgccactgcgcctgccccgaggaggcccacctgagcagccagagccacttctacagaagaacccagaagcccaacgagaccgaccagaagggcaagggcgagagaggccccgccggccagagcgccagatgcatgtgcggcagaagacccgccagcctgggctgcggcggctggctgctgcccggcagaagacccagacccggcctggccagcggcgtgaagctgcccctggtggccagcgtgcccctgcactgcgcctgcttcctgagcagcgccacccacaacgagtag

SEQ ID NO: 112829 - DNA, 735 bp, Artificial Sequence
  derived and/or modified sequence
atgagcagcagatggagcagaagcagccagagcaccgacagaagcctgaagagcgtggacggcagacagatcagagtggaccaggccggcaagagcagcgacaacagaagcagaggctacagaggcggcagcgccggcggcagaggcttcttcagaggcggcagaggcagaggcagaggcttcagcagaggcggcggcgacagaggctacggcggcaacagattcgagagcagaagcggcggctacggcggcagcagagactactacagcagcagaagccagagcggcggctacagcgacagaagcagcggcggcagctacagagacagctacgacagctacggcaagagccacagcgagggcgccaccctgctgtggcccgccgtgggcgccagattcaccctggtgcccagccccagcaccctgggctggaccctgagaccctgccactgcgcctgccccgaggaggcccacctgagcagccagagccacttctacagaagaacccagaagcccaacgagaccgaccagaagggcaagggcgagagaggccccgccggccagagcgccagatgcatgtgcggcagaagacccgccagcctgggctgcggcggctggctgctgcccggcagaagacccagacccggcctggccagcggcgtgaagctgcccctggtggccagcgtgcccctgcactgcgcctgcttcctgagcagcgccacccacaacgagtag

SEQ ID NO: 112830 - protein, 158 aa, Artificial Sequence
  derived and/or modified sequence
MCFSRADAADNYPFGTCQQRKLFPHFHPPNLIGNKFVPLRGSPHRGPGCYFSDEMTPHAGRYQKVSPQQEKHKQNFAPFNVLVPRFKNYPKDTYYPSPGAYNPEKKPPPKIAWPMKFGSPDWAQVPCLQKRTLKAELSTDKDFRKHRNRVAYLSLYYN

SEQ ID NO: 112831 - DNA, 477 bp, Artificial Sequence
  derived and/or modified sequence
atgtgcttttctcgagcagacgccgccgacaattacccatttggtacctgccagcaaagaaagcttttcccacacttccatccgcccaacctgataggaaataagttcgtgcccttacgcggaagtcctcatcgcggccctgggtgctatttcagcgatgaaatgacgcctcatgccggccggtatcaaaaagtcagtccgcagcaggagaagcataagcaaaactttgccccttttaatgtcctcgttccaagatttaagaattatcccaaggacacttattatcctagtcctggggcctataatcctgagaagaagccccctcccaaaatcgcatggcccatgaaatttggctcgccagactgggcacaggtgccttgtttgcaaaaacgaaccttgaaggcagagctgtccaccgacaaagacttcagaaagcatagaaacagggtcgcttatctgtccttgtactacaactag

SEQ ID NO: 112832 - DNA, 477 bp, Artificial Sequence
  derived and/or modified sequence
atgtgcttcagcagagcagatgctgctgacaactaccccttcggcacctgccagcagaggaagctgttcccccacttccacccccccaacctgattggcaacaagtttgtgcccctgcggggcagcccccaccggggccctggctgctacttcagtgatgagatgacccctcatgctggccgctaccagaaggtgagcccccagcaggagaagcacaagcagaactttgcccccttcaacgtgctggtgccccgcttcaagaactaccccaaggacacctactaccccagccctggggcctacaaccctgagaagaagcccccacccaagatcgcctggcccatgaagtttggcagcccagactgggcccaggtgccctgcctgcagaagaggaccctgaaggccgagctgagcacagacaaggacttcaggaagcacaggaacagagtggcctacctgagcctgtactacaactag

SEQ ID NO: 112833 - DNA, 477 bp, Artificial Sequence
  derived and/or modified sequence
atgtgcttcagccgggccgacgccgccgacaactaccccttcggcacttgccagcaacgcaaactctttcctcactttcatccacctaatctgatcggcaacaagttcgtgcctctgcgcgggtctccacaccgaggtcccgggtgctactttagcgacgaaatgacaccccacgccggcagatatcaaaaggtttccccccaacaggaaaagcacaagcaaaacttcgctccgttcaacgtgctcgtcccacggtttaaaaattacccgaaggacacatactatccctcccccggggcctacaatcccgagaaaaaaccaccacccaaaattgcctggcctatgaaattcggaagccctgactgggcacaggttccttgtcttcagaagcggaccctaaaggccgaactgagcacagataaagactttcgaaaacacaggaacagagttgcttacctgtctctatattacaattag

SEQ ID NO: 112834 - DNA, 477 bp, Artificial Sequence
  derived and/or modified sequence
atgtgcttctcacgggctgacgccgcagataattaccccttcggaacttgtcagcagaggaaactgttcccacacttccaccccccaaacctcattggaaacaaattcgtacctctgcggggaagtccccaccgcggtcctgggtgttactttagtgacgaaatgaccccacatgctgggcgataccagaaagtttctcctcagcaggagaagcacaagcagaatttcgcacccttcaacgttctggtgccgagatttaagaactaccccaaagatacttactatcctagcccgggtgcctataatcccgaaaagaagccaccccctaaaatcgcttggccaatgaagtttggatctcccgattgggcacaggtgccttgcctccagaagagaaccttgaaggctgagctcagtaccgataaggacttccggaaacatcggaaccgcgtggcctacctatcgctctactataactag

SEQ ID NO: 112835 - DNA, 746 bp, Artificial Sequence
  derived and/or modified sequence
gcagtacacaagtgctagccctagcagctcgcgatgtgcttcagcagagcagacgctgcggataactacccttttggaacatgtcaacagaggaaactttttcctcacttccatcccccgaatttgattgggaacaagtttgtccctcttaggggatcaccccacagagggcctgggtgttatttttcagatgaaatgacacctcatgcaggcaggtaccagaaagtaagtcctcagcaggaaaaacacaaacaaaattttgctccatttaatgtcttggtgcctcgatttaagaactacccaaaggacacttactatcccagccctggtgcatacaacccagagaagaagccaccgccaaaaattgcctggccaatgaaatttggatctccagactgggctcaggttccatgtctacagaaaagaaccctaaaagctgagctgtccacagacaaagactttagaaagcatcggaaccgtgtggcctacctaagcctgtattataattgagcggctgtaactaccttcacgtgctcctcttatacacagactctccaggactgaggacagagctgctcttcttcttctacgttactgtggccctcttgtctggcagcctggagcccagggagggacaggggcttatagctgctgtatgagaacataaagactagtgcacagtgctatctccatctactgacttgtggtgtacacgtgcatgtctgggtctgtgggtttctgttggg

SEQ ID NO: 112836 - DNA, 477 bp, Artificial Sequence
  derived and/or modified sequence
atgtgcttcagcagagccgacgccgccgacaactaccccttcggcacctgccagcagagaaagctgttcccccacttccacccccccaacctgatcggcaacaagttcgtgcccctgagaggcagcccccacagaggccccggctgctacttcagcgacgagatgaccccccacgccggcagataccagaaggtgagcccccagcaggagaagcacaagcagaacttcgcccccttcaacgtgctggtgcccagattcaagaactaccccaaggacacctactaccccagccccggcgcctacaaccccgagaagaagcccccccccaagatcgcctggcccatgaagttcggcagccccgactgggcccaggtgccctgcctgcagaagagaaccctgaaggccgagctgagcaccgacaaggacttcagaaagcacagaaacagagtggcctacctgagcctgtactacaactag

SEQ ID NO: 112837 - protein, 358 aa, Artificial Sequence
  derived and/or modified sequence
MRLLERMRKDWFMVGIVLAIAGAKLEPSIGVNGGPLKPEITVSYIAVATIFFNSGLSLKTEELTSALVHLKLHLFIQIFTLAFFPATIWLFLQLLSITPINEWLLKGLQTVGCMPPPVSSAVILTKAVGGNEAAAIFNSAFGSFLGIVITPLLLLLFLGSSSSVPFTSIFSQLFMTVVVPLIIGQIVRRYIKDWLERKKPPFGAISSSVLLMIIYTTFCDTFSNPNIDLDKFSLVLILFIIFSIQLSFMLLTFIFSTRNNSGFTPADTVAIIFCSTHKSLTLGIPMLKIVFAGHEHLSLISVPLLIYHPAQILLGSVLVPTIKSWMVSRQKKLLQTRGPLANLNNPEGLEYLSIKFGH

SEQ ID NO: 112838 - DNA, 1077 bp, Artificial Sequence
  derived and/or modified sequence
atgagactgctggagagaatgagaaaggactggttcatggtgggcatcgtgctggccatcgccggcgccaagctggagcccagcatcggcgtgaacggcggccccctgaagcccgagatcaccgtgagctacatcgccgtggccaccatcttcttcaacagcggcctgagcctgaagaccgaggagctgaccagcgccctggtgcacctgaagctgcacctgttcatccagatcttcaccctggccttcttccccgccaccatctggctgttcctgcagctgctgagcatcacccccatcaacgagtggctgctgaagggcctgcagaccgtgggctgcatgcccccccccgtgagcagcgccgtgatcctgaccaaggccgtgggcggcaacgaggccgccgccatcttcaacagcgccttcggcagcttcctgggcatcgtgatcacccccctgctgctgctgctgttcctgggcagcagcagcagcgtgcccttcaccagcatcttcagccagctgttcatgaccgtggtggtgcccctgatcatcggccagatcgtgagaagatacatcaaggactggctggagagaaagaagccccccttcggcgccatcagcagcagcgtgctgctgatgatcatctacaccaccttctgcgacaccttcagcaaccccaacatcgacctggacaagttcagcctggtgctgatcctgttcatcatcttcagcatccagctgagcttcatgctgctgaccttcatcttcagcaccagaaacaacagcggcttcacccccgccgacaccgtggccatcatcttctgcagcacccacaagagcctgaccctgggcatccccatgctgaagatcgtgttcgccggccacgagcacctgagcctgatcagcgtgcccctgctgatctaccaccccgcccagatcctgctgggcagcgtgctggtgcccaccatcaagagctggatggtgagcagacagaagaagctgctgcagaccagaggccccctggccaacctgaacaaccccgagggcctggagtacctgagcatcaagttcggccactag

SEQ ID NO: 112839 - DNA, 1077 bp, Artificial Sequence
  derived and/or modified sequence
atgcggttgctcgagcgaatgcggaaagactggttcatggtgggaatcgtgcttgccatcgcgggagccaaactggaaccatcaataggggtcaatggaggacccctgaagccagagatcacagtgagctatatagccgtagctacaatcttcttcaactctggattaagtctgaaaactgaagaactcactagcgctttagtgcatctgaaactccacctgttcatccagattttcacactagcattcttccctgcgaccatatggctcttcctgcagttgttaagcataacacccatcaatgagtggctgctgaaaggattgcagaccgtcggctgtatgcccccgcctgtcagctccgcggtgattctgaccaaagcagtgggggggaacgaagctgcagcaattttcaactctgcttttggctctttcctgggcatcgtcattacccccctgttattgctgctgtttctgggctcttccagttctgtgccatttacctcaatattcagtcagctattcatgaccgtcgtcgtcccactgattattggccaaatcgtgaggagatatattaaggattggctcgagaggaagaagccacctttcggagcaatctctagctcggtgctgcttatgatcatttatacaactttttgtgataccttctccaacccgaatattgatcttgataagttcagcctggtgctaatcctgttcatcatcttttcaattcagctgtcattcatgctgctgaccttcatcttctccacacgcaataactccgggttcactccggcagataccgtggccatcattttttgttccacacataaatcgctaacgctagggatacccatgctgaagatagttttcgcaggacatgaacacctttcattgataagtgtacctttgctcatttaccaccctgcccagatcctgctgggaagcgtgctcgtgccgacaatcaagagctggatggtttctaggcagaagaagctgctacaaacaagaggcccactcgcaaacttgaataatcctgaaggcctggagtacctctcaatcaagttcggacactag

SEQ ID NO: 112840 - DNA, 1077 bp, Artificial Sequence
  derived and/or modified sequence
atgcggcttttggaaagaatgaggaaggattggttcatggtgggcatcgtgctagcgatagccggggccaagctcgagccctccataggtgtgaatgggggacccctcaaacccgaaataacagtaagttacatcgccgttgcaacaattttctttaattccggcctcagcctgaagaccgaagagctgacgagtgctcttgtgcatttgaagcttcatctatttatccagattttcacccttgcttttttcccagccaccatttggttgttcttgcaacttctttcaattacacccatcaacgaatggttactgaaggggctgcagactgttggttgcatgccgcctccagtgtccagtgcggtgattttgacaaaggcagtaggtggtaatgaagccgcggccattttcaactcggctttcggcagtttcctggggatagtgattacaccattactgttactgctgttcctgggtagttcatcctcagtgcctttcacttctatcttctctcagttattcatgaccgttgtcgtccctcttatcatcggacagattgtgaggcgctacattaaagactggcttgagcgcaaaaaaccacccttcggcgcaatctcaagcagcgtgctgctgatgatcatctacactacgttttgcgacacattcagcaaccccaacattgaccttgacaaattctctttggtactgatcctgttcatcatcttctccatccagttgagtttcatgctgctgacctttatcttcagtaccagaaataatagcggtttcacaccagccgatacggtggccatcatcttctgcagtacccacaagtccctcaccctcggcattcccatgctgaaaatagtgttcgccgggcacgagcacctcagtctaatctccgtgcctctcctaatctatcatcccgcccagattttgctgggtagtgtcctggtgcctacaattaagtcctggatggttagcagacaaaaaaaactgctgcagacacgcggtcccctggcgaacctgaacaaccctgagggattggaataccttagcatcaaattcggccactag

SEQ ID NO: 112841 - DNA, 1077 bp, Artificial Sequence
  derived and/or modified sequence
atgaggctgctggagaggatgaggaaggactggttcatggtgggcatcgtgctggccatcgccggggccaagctggagcccagcattggagtgaatggaggccccctgaagccagagatcaccgtgtcctacatcgctgtggccaccatcttcttcaacagcggcctgagcctgaagacagaggagctgaccagcgccctggtgcacctgaagctgcacctgttcatccagatcttcaccctggccttcttccctgccaccatctggctgttcctgcagctgctgagcatcacccccatcaatgagtggctgctgaagggcctgcagacagtgggctgcatgcctcctcctgtgagcagcgctgtgatcctgaccaaggctgtgggcggcaatgaagctgctgccatcttcaacagcgccttcggcagcttcctgggcatcgtcatcacccccctgctgctgctgctcttcctgggcagcagcagctctgtgcccttcaccagcatcttcagccagctgttcatgacagtggtggtgcccctcatcatcggccagatcgtgcggcgctacatcaaggactggctggagaggaagaagcccccatttggagccatcagcagctctgtgctgctgatgatcatctacaccaccttctgtgacaccttcagcaaccccaacatcgacctggacaagttcagcctggtgctgatcctcttcatcatcttcagcatccagctgtccttcatgctgctgaccttcatcttcagcaccaggaacaacagcggcttcaccccagctgacacagtggccatcatcttctgcagcacccacaagagcctgaccctgggcatccccatgctgaagatcgtgtttgctggccacgagcacctgagcctcatctctgtgcccctgctgatctaccacccagcccagatcctgctgggctctgtgctggtgcccaccatcaagtcctggatggtgtcccggcagaagaagctgctgcagacccggggccccctggccaacctgaacaaccctgagggcctggagtacctgagcatcaagtttggccactag

SEQ ID NO: 112842 - DNA, 1077 bp, Artificial Sequence
  derived and/or modified sequence
atgcggctgctggagcggatgcggaaggactggttcatggtgggcatcgtgctcgcaatcgccggggcgaagctggagccctccattggggtgaatggaggcccgcttaaacctgagataactgtaagttacattgccgtggctactatattttttaactccggcctttccttaaagacagaggagttaaccagcgccctggtgcacctgaaattgcacctgttcatccagatcttcaccctggccttcttccccgccacaatttggctctttttgcaactcctcagtattaccccgatcaacgagtggctactgaaaggacttcagacagtgggatgcatgcctccaccggtgtcaagtgcagtgatacttacaaaagcagttggcggcaacgaggccgcagctatcttcaattccgccttcggaagtttcctcggaattgtcatcactccattgctcctcctcctgttcttggggagttcctcttccgttccttttacaagtattttcagccagttgttcatgaccgtggtagttcctctaataatcggacaaatcgtgaggcggtatattaaggattggcttgagagaaagaagccacccttcggagccataagcagtagtgtgctgctgatgattatatacaccaccttttgcgatacattttcaaatccaaatatcgacttagacaaattctccttggtcctgattctctttattatattctcgattcagctgagcttcatgctcctgacctttattttttcaactaggaataattccggctttacccccgccgacactgtcgcaataatcttctgtagcacccataaaagcctgacgctgggaatcccaatgctgaaaattgtctttgcgggacacgagcatcttagcctgatctctgtccccctactgatatatcacccggctcagatcctactggggtcggtcctggtccctacaatcaagtcctggatggtgtctagacagaaaaaactcctgcagactcggggaccactagccaatttaaataacccggaaggactcgaatacctgtctatcaagtttgggcattag

SEQ ID NO: 112843 - DNA, 1077 bp, Artificial Sequence
  derived and/or modified sequence
atgcggctgctggagcggatgcggaaggactggttcatggtgggcatcgtgttggcaatcgccggagctaaattggaaccaagcatcggagtgaatggtgggcccctgaaaccggagatcaccgtatcatacatagccgtggccactattttcttcaatagcgggctgagcctaaagaccgaggaacttacatccgcactcgtccacctgaagctccatctgtttatacagattttcactctggctttctttccagcaacgatctggttgtttctccagcttctctccatcacccccatcaacgagtggctccttaaagggctccagacggtgggctgcatgcctccccctgtgtcatcagcggtgattctgacaaaagcggttggtggtaatgaagccgccgcaatattcaatagcgcatttggatctttcctgggaatcgtcattacccctctgctcctgttactctttctgggatcctcttcctcagtgcctttcacctccatcttctcccaactctttatgaccgtggtcgtccctctgataatcggtcagattgtgaggcgctacattaaggattggttggagaggaaaaaaccacctttcggcgcaatatctagttccgtcctccttatgatcatctacactactttctgtgacaccttttctaacccaaatatcgacttagacaagtttagcctagtcctgatcctgtttatcatcttttctatacagctcagttttatgctgctaacctttatctttagtacaagaaataatagcggcttcactcccgcagacactgtcgccatcatattctgttccacccataagtctctcacattgggtattccaatgctcaaaattgtgtttgcagggcatgagcatctttcgctgatctctgtacctttgctcatctatcatcccgcacagatattgttaggaagtgtgctcgtgccaacaattaagtcctggatggtgagtaggcagaaaaagctgctgcagacccgcggacctctcgcgaacctgaacaatccggaggggttggaatatctctcgatcaagtttgggcattag

SEQ ID NO: 112844 - DNA, 1077 bp, Artificial Sequence
  derived and/or modified sequence
atgcgcctcctggagagaatgcgcaaggattggttcatggtcggaatcgttctcgccatagcgggtgctaaactggaaccatccataggagtgaacggcggacctctgaagccagagattactgtctcctatatcgccgttgccaccatcttcttcaattcgggactctcgcttaaaacagaggagttgacgagtgccctcgtccacctgaagctgcatctgttcattcagatctttaccttggctttctttccagctacgatctggctgtttttacagctgctgagtattactccaataaacgaatggcttctgaagggtttacagactgtggggtgtatgccacctcctgtgtccagtgctgtgatcttaacaaaagctgtgggaggtaatgaggctgccgctatcttcaactccgcctttggtagcttcctgggcattgtcataaccccattattgctcctgctgttcctgggaagcagttcatctgtgccctttacatccatatttagtcaacttttcatgaccgtcgtggttccattaattatcggtcagatcgtgcgcagatacattaaagattggcttgagaggaaaaagcccccatttggtgccattagctcctctgtgttactcatgattatctacacaaccttttgcgataccttttctaatcccaacatcgacctggataagtttagcctcgtcctgattttattcattatctttagtatacaattaagctttatgctgttaactttcattttcagcaccagaaacaattcgggatttacgcccgctgacacggtagcgataatcttctgttcaacccataagtccctcacccttggcatccctatgctaaagattgtcttcgctgggcatgagcacctgagcctgatctcggtaccacttttgatctatcacccggctcagattctgctgggttctgtgctcgttcctactataaaaagctggatggtctctcgccagaaaaagctattacagacacgaggcccactagcaaatcttaataatccagagggcctagagtacttgtcaatcaaattcggacactag

SEQ ID NO: 112845 - DNA, 1077 bp, Artificial Sequence
  derived and/or modified sequence
atgagacttttggaacggatgcgcaaagattggttcatggtcggtatcgtgctcgcaatcgcaggcgctaaattagagccctccataggagttaatggaggcccactaaagcccgagatcactgtgtcgtatatcgcagtggccaccatatttttcaattctggcctgtcacttaagactgaggagctaacttcagccttagtgcacctaaagctacacctgtttatccaaattttcaccctggccttttttccagcaactatttggctcttcctccaacttctgtctataacgcctattaacgagtggctcctgaagggcttgcagactgtgggctgcatgcctcctcccgtttccagtgccgtgatcctcacgaaggcagttggcggaaacgaggccgctgctatatttaactccgcctttggaagcttcctgggtattgtgattacccctcttcttctcctgttattcctcggctcttcttccagcgttcccttcacatctatcttcagtcagctgtttatgacagtggttgtacccctcattatcggtcagatcgtgcgcagatatatcaaggattggttagaaagaaaaaagcctccctttggcgctatttcaagttcagtgctgctgatgatcatttacaccacattctgtgataccttttctaaccctaacattgaccttgataaattctctctggttttgattctgtttatcatattttctatccagctgtcattcatgctgctgactttcatcttcagtacaaggaataatagcgggtttaccccggctgatacagtggccattattttttgttcgactcacaagtctctgacacttggtatcccaatgctgaagatcgtcttcgcaggacacgagcatctgagcctgatcagcgtgccactgttgatctaccacccagcccagatcttactcgggtccgtattggtgcctacgattaaatcctggatggtcagccgacagaaaaagttgctgcagactcgcggtcctttagccaatttgaataatcccgagggcctcgagtacctgagcattaaattcggccattag

SEQ ID NO: 112846 - DNA, 1331 bp, Artificial Sequence
  derived and/or modified sequence
gtattctgaggcgcgtggtagtgatggcggcgctcagtgagactttcctgtcactggctactactactcccaaccctcctcaaagccgccggagcaacccccaggtctttactttacaatcggcaatttgacttgctctgctgcatgtctggagggaccaaggaaagtgtggagacgctccaaggattaggtgatcggagcttgaaaagaaaaaaagccaaacaaataaacaaaacccacccaccctaacaaatatgaggctgctggagagaatgaggaaagactggttcatggtcggaatagtgctggcgatcgctggagctaaactggagccgtccataggggtgaatgggggaccactgaagccagaaataactgtatcctacattgctgttgcaacaatattctttaacagtggactatcattgaaaacagaggagctgaccagtgctttggtgcatctaaaactgcatctttttattcagatctttactcttgcattcttcccagcaacaatatggctttttcttcagcttttatcaatcacacccatcaacgaatggcttttaaaaggtttgcagacagtaggttgcatgcctccgcctgtgtcttctgcagtgattttaaccaaggcagttggtggaaatgaggcagctgcaatatttaattcagcctttggaagttttttgggcatcgttataacacccctgctcctgctgctttttcttggttcatcttcttctgtgcctttcacatctattttttctcagctttttatgactgttgtggttcctctcatcattggacagattgtccgaagatacatcaaggattggcttgagagaaagaagcctccttttggtgctatcagcagcagtgtactcctcatgatcatctacacaacattctgtgacacgttctctaacccaaatattgacctggataaattcagccttgttctcatactgttcataatattttctatccagctgagttttatgcttttaactttcatcttttcaacaaggaataattcgggtttcacaccagcagacacagtggctatcattttctgttctacacacaaatcccttacattgggaattccgatgctgaagatcgtgtttgcaggccatgagcatctctctttaatatctgtacccttgctcatctaccacccagctcagatccttctgggaagtgtgttggtgccaacaatcaagtcttggatggtatcaaggcagaagaaactactccaaaccagggggccactggctaacttgaataatccagaaggcttggaatatctatccatcaaatttgggcattaa

SEQ ID NO: 112847 - DNA, 1134 bp, Artificial Sequence
  derived and/or modified sequence
atgaggctgctggagagaatgaggaaagactggttcatggtcggaatagtgctggcgatcgctggagctaaactggagccgtccataggggtgaatgggggaccactgaagccagaaataactgtatcctacattgctgttgcaacaatattctttaacagtggactatcattgaaaacagaggagctgaccagtgctttggtgcatctaaaactgcatctttttattcagatctttactcttgcattcttcccagcaacaatatggctttttcttcagcttttatcaatcacacccatcaacgaatggcttttaaaaggtttgcagacagtaggttgcatgcctccgcctgtgtcttctgcagtgattttaaccaaggcagttggtggaaatgaggcagctgcaatatttaattcagcctttggaagttttttgggcatcgttataacacccctgctcctgctgctttttcttggttcatcttcttctgtgcctttcacatctattttttctcagctttttatgactgttgtggttcctctcatcattggacagattgtccgaagatacatcaaggattggcttgagagaaagaagcctccttttggtgctatcagcagcagtgtactcctcatgatcatctacacaacattctgtgacacgttctctaacccaaatattgacctggataaattcagccttgttctcatactgttcataatattttctatccagctgagttttatgcttttaactttcatcttttcaacaaggaataattcgggtttcacaccagcagacacagtggctatcattttctgttctacacacaaatcccttacattgggaattccgatgctgaagatcgtgtttgcaggccatgagcatctctctttaatatctgtacccttgctcatctaccacccagctcagatccttctgggaagtgtgttggtgccaacaatcaagtcttggatggtatcaaggcagaagaaactactccaaaccagggggccactggctaacttgaataatccagaaggcttggaatatctatccatcaaatttgggcattaaaataaataccaagagtccatcctccagggagtgaagctgacaaggccgacagtataa

SEQ ID NO: 112848 - protein, 421 aa, Artificial Sequence
  derived and/or modified sequence
MKKHSARVAPLSACNSPVLTLTKVEGEERPRDSPGPAEAQAPAGVEAGGRASRRCWTCSRAQLKKIFWGVAVVLCVCSSWAGSTQLAKLTFRKFDAPFTLTWFATNWNFLFFPLYYVGHVCKSTEKQSVKQRYRECCRFFGDNGLTLKVFFTKAAPFGVLWTLTNYLYLHAIKKINTTDVSVLFCCNKAFVFLLSWIVLRDRFMGVRIVAAILAIAGIVMMTYADGFHSHSVIGIALVVASASMSALYKVLFKLLLGSAKFGEAALFLSILGVFNILFITCIPIILYFTKVEYWSSFDDIPWGNLCGFSVLLLTFNIVLNFGIAVTYPTLMSLGIVLSIPVNAVIDHYTSQIVFNGVRVIAIIIIGLGFLLLLLPEEWDVWLIKLLTRLKVRKKEEPAEGAADLSSGPQSKNRRARPSFAR

SEQ ID NO: 112849 - DNA, 1266 bp, Artificial Sequence
  derived and/or modified sequence
atgaagaagcacagcgccagagtggcccccctgagcgcctgcaacagccccgtgctgaccctgaccaaggtggagggcgaggagagacccagagacagccccggccccgccgaggcccaggcccccgccggcgtggaggccggcggcagagccagcagaagatgctggacctgcagcagagcccagctgaagaagatcttctggggcgtggccgtggtgctgtgcgtgtgcagcagctgggccggcagcacccagctggccaagctgaccttcagaaagttcgacgcccccttcaccctgacctggttcgccaccaactggaacttcctgttcttccccctgtactacgtgggccacgtgtgcaagagcaccgagaagcagagcgtgaagcagagatacagagagtgctgcagattcttcggcgacaacggcctgaccctgaaggtgttcttcaccaaggccgcccccttcggcgtgctgtggaccctgaccaactacctgtacctgcacgccatcaagaagatcaacaccaccgacgtgagcgtgctgttctgctgcaacaaggccttcgtgttcctgctgagctggatcgtgctgagagacagattcatgggcgtgagaatcgtggccgccatcctggccatcgccggcatcgtgatgatgacctacgccgacggcttccacagccacagcgtgatcggcatcgccctggtggtggccagcgccagcatgagcgccctgtacaaggtgctgttcaagctgctgctgggcagcgccaagttcggcgaggccgccctgttcctgagcatcctgggcgtgttcaacatcctgttcatcacctgcatccccatcatcctgtacttcaccaaggtggagtactggagcagcttcgacgacatcccctggggcaacctgtgcggcttcagcgtgctgctgctgaccttcaacatcgtgctgaacttcggcatcgccgtgacctaccccaccctgatgagcctgggcatcgtgctgagcatccccgtgaacgccgtgatcgaccactacaccagccagatcgtgttcaacggcgtgagagtgatcgccatcatcatcatcggcctgggcttcctgctgctgctgctgcccgaggagtgggacgtgtggctgatcaagctgctgaccagactgaaggtgagaaagaaggaggagcccgccgagggcgccgccgacctgagcagcggcccccagagcaagaacagaagagccagacccagcttcgccagatag

SEQ ID NO: 112850 - DNA, 1266 bp, Artificial Sequence
  derived and/or modified sequence
atgaaaaaacattccgcccgagtggctcccttgagcgcttgtaatagccccgtgcttactctcactaaagtggaaggagaggaaagaccccgcgacagtcccggtcccgccgaggctcaggcccctgccggagtggaggccggcggacgggcctcccgtcgatgctggacctgtagtagagcacagctgaagaagatcttttggggtgtggccgtggtcctctgcgtctgctctagttgggcaggatcaactcagttggcaaagctcacttttcggaagtttgatgcaccctttacactaacgtggttcgctactaattggaatttcctctttttccccttgtactatgtgggccatgtttgtaaaagtaccgagaagcaaagcgtaaaacagcggtatcgggagtgttgtcgatttttcggggacaacggactaactctgaaagtgtttttcacaaaagccgctccttttggagtcttatggacattaactaattatctgtatctccatgctattaagaaaattaataccacggatgtctccgtgctgttttgttgtaataaggcatttgtttttctgctgtcctggatcgttctccgagatcgcttcatgggggttcgtatcgttgctgccatactcgcaatcgccggtatcgtaatgatgacttatgctgacggttttcactcccactccgtgatcggcatcgctttggtcgtagcatccgccagtatgtccgccctgtacaaggtcctcttcaagcttcttctcggcagcgcaaagtttggagaggctgccttgttcctgagcatcctgggtgtgtttaatatcttgtttataacatgcatcccaatcatcctttactttactaaagtcgaatattggtcatcttttgacgacataccttgggggaacctctgcggattcagcgtcctgctgctgacatttaacatcgtactgaattttgggattgctgtaacttaccccacgcttatgagtttgggcatcgtgctgagcatacccgttaacgccgttatagaccactacacgagccagatcgttttcaatggcgttagggtcatcgccattatcattatcggactcgggttcctgctgttgctccttcccgaagagtgggacgtatggctcatcaaattgctcacacgcctcaaagttcggaaaaaagaggaacctgccgagggtgcggcagacctgagttcgggcccacaatctaagaacaggcgggctcgcccatccttcgccagatag

SEQ ID NO: 112851 - DNA, 1266 bp, Artificial Sequence
  derived and/or modified sequence
atgaagaagcacagcgcccgggtggcccccctgagcgcctgcaacagccctgtgctgaccctgaccaaggtggagggggaggagcggccccgggacagccctggccctgctgaggcccaggccccagctggggtggaggccggcggccgggccagccgccgctgctggacctgcagccgggcccagctgaagaagatcttctggggcgtggccgtggtgctgtgtgtgtgcagctcctgggccggcagcacccagctggccaagctgaccttcaggaagtttgatgcccccttcaccctgacctggtttgccaccaactggaacttcctgttcttccccctgtactacgtgggccacgtgtgcaagagcacagagaagcagagcgtgaagcagcgctaccgggagtgctgccgcttcttcggggacaatggcctgaccctgaaggtgttcttcaccaaggccgccccctttggagtgctgtggaccctgaccaactacctgtacctgcacgccatcaagaagatcaacaccacagatgtgtctgtgctcttctgctgcaacaaggcctttgtgttcctgctgtcctggatcgtgctgcgggaccgcttcatgggcgtgcgcatcgtggccgccatcctggccatcgccggcatcgtgatgatgacctatgcagatggcttccacagccacagcgtgattggaattgccctggtggtggccagcgcctccatgtctgccctgtacaaggtgctcttcaagctgctgctgggcagcgccaagtttggagaggccgccctcttcctgagcatcctgggcgtcttcaacatcctcttcatcacctgcatccccatcatcctgtacttcaccaaggtggagtactggagcagctttgatgacatcccctggggcaacctgtgtggcttctctgtgctgctgctgaccttcaacatcgtgctgaactttggaattgctgtgacctaccccaccctgatgagcctgggcatcgtgctgagcatccctgtgaatgctgtgattgaccactacaccagccagatcgtgttcaatggagtgcgggtcatcgccatcatcatcatcggcctgggcttcctgctgctgctgctgcctgaggagtgggatgtgtggctgatcaagctgctgacccggctgaaggtgaggaagaaggaggagcctgctgagggcgctgctgacctgagcagcggcccccagagcaagaacagaagagcccggcccagctttgccaggtag

SEQ ID NO: 112852 - DNA, 1266 bp, Artificial Sequence
  derived and/or modified sequence
atgaagaagcacagcgcccgggtggcccccctgagcgcctgcaactcgccagtgttaactctgactaaagtggagggggaggaacgcccacgcgactcgccgggtccggccgaagcccaggcccccgcaggggtcgaggccggaggacgcgctagccgcaggtgctggacctgttctagagcacagctgaaaaagattttctggggcgttgcggttgtgctttgtgtgtgttcatcctgggctggctctacacagctggccaagctgacatttcggaaatttgacgcgccttttacgttaacctggttcgccactaactggaacttcctgttctttcctctgtattatgtgggccacgtgtgcaagagcacggaaaagcagagcgtaaaacaacgctaccgggagtgttgtcggtttttcggcgataatggcctgactctcaaagttttttttactaaagcggcacccttcggtgtgctctggacacttacaaactacctgtacctgcatgccatcaaaaaaataaacacgacggacgtgagtgtgctgttttgctgtaataaggcctttgttttcttgctgtcatggatcgtgctcagagacagatttatgggggtccgcattgtggcagccattctcgcaatcgccggaattgttatgatgacgtatgcggacggcttccatagtcactccgtgatcggaatcgccctcgtggtcgccagcgcaagcatgagcgccctgtacaaagtgctgtttaaacttctgttgggttctgcaaaattcggagaagcagctttgtttttgtctatcctgggggtgttcaatattttgttcatcacttgcatccctatcattttgtactttaccaaggtcgagtactggagctcatttgacgacatcccctggggtaacctttgcggattctctgtgctgttgctaaccttcaacattgttctgaactttggaatcgcagtgacctacccaaccctgatgtccctgggcattgtgctctctatccctgtgaatgcagtgatcgaccattatacgagccagatcgtctttaatggtgtccgcgtcatagcgatcattattatcggtcttggatttctgctgctgcttttaccggaggagtgggacgtgtggctgattaaactgctgacccggctgaaagtgcggaagaaagaggaacccgcagagggtgcagctgacttaagtagcggaccgcaatccaaaaaccgccgggccagaccctcttttgcccgctag

SEQ ID NO: 112853 - DNA, 1266 bp, Artificial Sequence
  derived and/or modified sequence
atgaagaaacacagcgcgagggttgccccactttcagcctgcaacagtcccgtgctgaccctgaccaaggtggagggtgaggaacgccctagggactcacccggtccagcagaggcccaggcacctgccggtgtggaagctggcggacgcgcaagtaggcgctgctggacatgcagcagggcccaattgaagaagattttttggggagtagcggtggtgctttgtgtctgcagttcctgggccggtagcacacagctagctaagctcacatttaggaagtttgacgccccttttacgctgacatggtttgccactaattggaacttccttttctttccactctattatgtggggcacgtatgcaaatctacagagaagcagagcgtgaaacagcgatatcgggaatgctgtcggttttttggtgacaatggcctcacattaaaagtcttcttcaccaaggcagccccttttggggttctgtggaccctcactaactacctgtacctccacgccataaagaagattaatacgacagatgtctcagttctgttctgttgtaataaggccttcgtgttcctgctttcatggatcgtcctgcgggacagattcatgggcgtgcggatcgttgcagccattctagctattgctggcatcgtgatgatgacctacgcggacggatttcactctcacagcgttatcggaatcgcactggttgtggcctccgcttcgatgtctgctctctacaaagtgcttttcaagctgctcctaggttccgctaaatttggggaagccgcactttttttgagcatcctcggcgtcttcaatatattgtttattacctgtattccaatcatcctctacttcacgaaagtcgagtattggtcttcctttgatgacataccatggggaaacctgtgcgggttcagtgtccttttgctgaccttcaacatcgtactaaacttcggaattgcagttacctaccccaccctaatgtcgttgggcatcgttctctctattcctgtgaacgcggtcattgatcattatacttcccaaatcgttttcaatggggtcagggtcattgccatcatcattattgggctgggctttctgctgctcttacttcctgaagaatgggacgtatggcttatcaagttgctgacccgacttaaggtcaggaaaaaagaggaacccgcagaaggtgcagccgacctcagctccggcccacagtctaagaatcgacgcgcacgaccatccttcgcaagatag

SEQ ID NO: 112854 - DNA, 2762 bp, Artificial Sequence
  derived and/or modified sequence
ggctgcgcggccggggaggatgtgcgctgcagggcggccgccgcagtgagcaacgcggcaaccggagcccggcgggcagccggggaggccgggactgagaggggcgagccgctggtgctccccggcggcagagggccgcgtcggccacgggcccgggagagacgcgctccagccggccccaggatgtaggcgatcggcggcagcgctcctgcaggcggccggctcatcatgaagaagcactcggcccgggtggccccgctcagcgcctgcaacagtccggtcctgacccttaccaaagtggaaggggaggagcgcccccgggactccccgggcccggcggaggcccaggcaccggccggggtggaggccggcgggagagcgagtcgccgctgctggacgtgctcccgggcgcaactcaagaagatcttctggggcgtggcggtcgtgctgtgcgtgtgctcctcgtgggcgggctccacgcagctcgccaagctgaccttcaggaagttcgacgcgcccttcaccctcacgtggtttgccaccaactggaactttttattcttcccgttgtactacgtggggcacgtctgcaagtccacagagaagcagtctgtgaagcagcgatacagggaatgctgtcgattttttggagacaatggcttgactttgaaggtgttttttaccaaggcagcaccctttggtgttctttggacactcacaaactacctgtacttacatgcaataaagaaaataaacactacggatgtctccgtgttgttctgctgcaacaaagcttttgtgttcttgctctcatggatcgttctcagggacagattcatgggagtgaggattgtggccgccatcctcgccatcgctggcattgtgatgatgacctacgctgatggcttccacagccactccgtcatcggcatcgcactggtggtggcctcagcatcgatgtctgccctctacaaggttttgttcaagctcctcctgggcagtgctaagtttggagaagccgccttatttttgtccatcttgggtgtgtttaacatcctcttcatcacctgcattcctattatcctctactttaccaaagtggaatactggagctcttttgatgacattccatggggaaacctttgtggattttcagttcttttattgacattcaatattgtattaaattttggaattgccgttacatatcccactctgatgtctcttggaatcgtcctcagcatacctgtgaatgcagtgattgatcactacaccagtcagatcgtcttcaatggggtccgggtcatcgccatcatcatcatcggcctgggttttctcctcctgctcctgccagaggagtgggatgtctggttgatcaagctgctcacccgactcaaagtgaggaagaaggaggagcctgcagagggcgctgccgacctgagctcaggacctcagagcaagaacagaagagcccgcccttccttcgcccgctaacaccactcctctagaactcggtggtaatgactgggaggtctattcctgccgggaggaacctcagttgggtaaggtgtacatacctgtacagttttggtcatctgcggtaagttctatggtatttattggcatgtccaatttgcttgcacttttccacatcagaccttccacttaagggtaccaattcaatacaaaagagaaaagaagaacctctcagtgcttttccaacgaatgtaaagtgggtttaaaagttccctgcgtagatcgttttggatggctgacgttcttgacaagccagccatcagggcaagtgttttgaatcttagcaagtgttttgaatcttagcaactgaacatgacattgcacactgtgattatttttcagctatggtaggtcatattttgttttataccagagctgtactcttaattttaaggaatttcaatgaaccaaaagataactgtcaatttatttggatggatggatggagggatggaaggagggagggaaggatgtctgggatgtgaagaggcaaggcagaaatggatgatgaacatcaaaaactgtcagaggacaggtctgtgccaggtaccaggaaggacaagataagtccaagccccggctggcctgctctcacgtgtctgtgtaagatcatgcaagagaaatcacagtgccttctacagaattttcgtctttacctatgtgaagcgaggtgacgtgatacgtcactggcgccgtcttataatttagatgtaaaaatctttagaaacaaataaaactctctatatatgtgtatgtctgtgtacaaaaaaatgacagagctgatggccagtgtatacagagcgtggcccgcggtgtacaatacccatataaggtacattgtgcaggaggggaattgctggctgcttttacttcctgaccaagactgaaaaattatttactgaaatctgtaaacctttttatgaaacttttaagcaccaggctgtttacttacacaatttaggtctgccagaaaattctatctgtgatagatctgtaaagagggtcaggggttagagtttactatttttgaagtttacattgttacatatgaaatggaaacattattttgaaacgttgtcataacccaatggtgcattctgtaaccatggagtcttctgtttcctgggggaaaggggcattcatgacctgaactttttagcaaattattattctcagtttccattacctgtttggccaaacagattaataaaatatttgaaaaagaa

SEQ ID NO: 112855 - protein, 410 aa, Artificial Sequence
  derived and/or modified sequence
MTFPPALLPPNPVTPPRPRTLPPPGPARPVTSASLLPSQHLPRTASVSSSVVYGRSPVMAFESHPHLRGSSVSSSLPSIPGGKPAYSFHVSADGQMQPVPFPSDALVGAGIPRHARQLHTLAHGEVVCAVTISGSTQHVYTGGKGCVKVWDVGQPGAKTPVAQLDCLNRDNYIRSCKLLPDGRSLIVGGEASTLSIWDLAAPTPRIKAELTSSAPACYALAVSPDAKVCFSCCSDGNIVVWDLQNQTMVRQFQGHTDGASCIDISDYGTRLWTGGLDNTVRCWDLREGRQLQQHDFSSQIFSLGHCPNQDWLAVGMESSNVEILHVRKPEKYQLHLHESCVLSLKFASCGRWFVSTGKDNLLNAWRTPYGASIFQSKESSSVLSCDISRNNKYIVTGSGDKKATVYEVVY

SEQ ID NO: 112856 - DNA, 2492 bp, Artificial Sequence
  derived and/or modified sequence
agatgaaatccttcccttgagtgtggcgtgctgagatctccacctggaggcatccccagctggtagatcagtcctgggaagcggaggagaccaagaaaggggccttgcctgggacagacgtgggccaagccggggctggaatctgggactccaggcggaggcccctttcctttgtttcagctgagcccagcacctctgagtgtctgcgtctgagcggagattgtgaagcgtctgagcggtatctgcgctcagattatccccttcctgacccaggagcatcagcagcaggtgctccaggccgtagaacgcgccaagcaggtcaccgtgggggagctgaacagcctcatcggggtgagtctctctagcccctgccccgccatggggagacgcccactcccaggtccctggcacccacccaggaggtgttaaagctggggtggtgtgtgggccttggctccagtggtcctgggaaccccaggggcacatgctgtgcttaggtcccatcccctgtgtctacctcttgggctggggaccgctgggctcctgccgccccccgccccggcccatcctgcctcctttctagcagcagcagctccagccgctgtcccaccacgcaccccctgtgcccctcaccccccgcccagccgggctggtgggcggcagtgctacggggctgcttgctctgtctggagccctggctgcccaggctcagctggcggcggctgtcaaggaggaccgtgcgggcgtggaggccgaggggtccagagtggagagagccccgagcaggagtgcatctccctcgccccctgagagtctcgtggaggaggagcgaccgagtggccctggtggtggcgggaagcagagagcagatgagaaggagccatcaggaccttatgaaagcgacgaagacaagagtgattacaatctggtggtggacgaggaccaaccctcagagccccccagcccggctaccaccccctgcggaaaggtacccatctgcattcctgcccgtcgggacctggtggacagtccagcctccttggcctctagccttggctcaccgctgcctagagccaaggagctcatcctgaatgaccttcccgccagcactcctgcctccaaatcctgtgactcctccccgccccaggacgcttccacccccgggcccagctcggccagtcacctctgccagcttgctgccaagccagcaccttccacggacagcgtcggtcagcagctctgtggtgtacggacgctcccccgtgatggcatttgagtctcatccccatctccgagggtcatccgtctcttcctccctacccagcatccctgggggaaagccggcctactccttccacgtgtctgcggacgggcagatgcagccggttcccttcccctcggatgcactggtaggcgcgggcatcccgcggcacgcccggcagctgcacacgctggcccatggcgaggtggtctgcgcggtcaccatcagcggctccacacagcatgtgtacacgggcggcaagggctgtgtgaaggtgtgggacgtgggccagcctggggccaagacgcccgtggcccagctcgactgcctgaaccgagacaactacattcgttcctgcaagttgctgccggatggccggagtctgatcgtgggcggtgaggccagcaccttgtccatttgggacctggcggcgcccaccccccgtatcaaggccgagctgacttcctcagccccagcctgctacgccctggccgtcagccccgacgccaaggtttgcttctcctgctgcagcgatggcaacattgtggtctgggacctgcagaatcagactatggtcaggcagttccagggccacacggacggcgccagctgcattgatatttccgattacggcactcggctctggacagggggcctggacaacacggtgcgctgctgggacctgcgggagggccgccagctgcagcagcatgacttcagctcccagattttctccctgggccactgccctaaccaggactggctggcggtcggaatggagagtagcaacgtggagatcctgcacgtccgcaagccggagaaataccagctgcacctccacgagagctgcgtgctgtccctgaagtttgcctcctgcggacggtggtttgtgagcaccgggaaggacaacctgctcaacgcctggaggacgccgtacggggccagcattttccagtccaaggagtcgtcctcagtcctgagttgtgacatctccagaaataacaaatacatcgtgacaggctcgggggacaagaaggccaccgtgtatgaggtggtctactgagacatgaccccccttcctgtacccgaagtccagactcccaggggaatcagcagccaggacagacatcctagcagccgcctcccagccctgcctaggaaccgtacatcccatctgctctctggccaacggcttcacaccttcccctgctgcatgtgggggccgatgggc

SEQ ID NO: 112857 - protein, 1125 aa, Artificial Sequence
  derived and/or modified sequence
MPVQAPQWTDFLSCPICTQTFDETIRKPISLGCGHTVCKMCLNKLHRKACPFDQTTINTDIELLPVNSALLQLVGAQVPEQQPITLCSGVEDTKHYEEAKKCVEELALYLKPLSSARGVGLNSTTQSVLSRPMQRKLVTLVHCQLVEEEGRIRAMRAARSLGERTVTELILQHQNPQQLSSNLWAAVRARGCQFLGPAMQEEALKLVLLALEDGSALSRKVLVLFVVQRLEPRFPQASKTSIGHVVQLLYRASCFKVTKRDEDSSLMQLKEEFRTYEALRREHDSQIVQIAMEAGLRIAPDQWSSLLYGDQSHKSHMQSIIDKLQTPASFAQSVQELTIALQRTGDPANLNRLRPHLELLANIDPSPDAPPPTWEQLENGLVAVRTVVHGLVDYIQNHSKKGADQQQPPQHSKYKTYMCRDMKQRGGCPRGASCTFAHSQEELEKFRKMNKRLVPRRPLSASLGQLNEVGLPSAAILPDEGAVDLPSRKPPALPNGIVSTGNTVTQLIPRGTDPSYDSSLKPGKIDHLSSSAPGSPPDLLESVPKSISALPVNPHSIPPRGPADLPPMPVTKPLQMVPRGSQLYPAQQTDVYYQDPRGAAPPFEPAPYQQGMYYTPPPQCVSRFVRPPPSAPEPAPPYLDHYPPYLQERVVNSQYGTQPQQYPPIYPSHYDGRRVYPAPSYTREEIFRESPIPIEIPPAAVPSYVPESRERYQQIESYYPVAPHPTQIRPSYLREPPYSRLPPPPQPHPSLDELHRRRKEIMAQLEERKVISPPPFAPSPTLPPTFHPEEFLDEDLKVAGKYKGNDYSQYSPWSCDTIGSYIGTKDAKPKDVVAAGSVEMMNVESKGMRDQRLDLQRRAAETSDDDLIPFGDRPTVSRFGAISRTSKTIYQGAGPMQAMAPQGAPTKSINISDYSPYGTHGGWGASPYSPHQNIPSQGHFSERERISMSEVASHGKPLPSAEREQLRLELQQLNHQISQQTQLRGLEREANTLAGQSQPPPPPPPKWPGMISSEQLSLELHQVEREIGKRTRELSMENQCSLDMKSKLNTSKQAENGQPEPQNKVPAEDLTLTFSSDVPNGSALTQENISLLSNKTSSLNLSEDPEGGGDNNDSQRSGVTPSSAP

SEQ ID NO: 112858 - DNA, 3378 bp, Artificial Sequence
  derived and/or modified sequence
atgccagtgcaggcaccccagtggaccgactttctctcctgtcccatctgcactcagacctttgacgagacaattcgcaagcccatcagtctgggttgtggccataccgtgtgtaaaatgtgcctgaataagctgcacaggaaggcttgcccgttcgatcaaactactattaatacagacatcgaattgctcccagtaaattcggctctgttgcagctggtcggtgctcaggtgcccgagcaacagccgataacactctgttccggagtcgaagataccaagcattacgaggaggctaagaagtgtgtggaggagctcgcactctatctgaagcccctgtcttccgcgcgcggggtgggtcttaacagcactacacagagcgtgctgtcccgacctatgcagcggaagctggttacactggttcattgccaactcgtggaagaagagggccgaattagagctatgcgcgccgcccggtccctgggcgaacggacggtgaccgaacttattttgcagcatcagaatccacagcaactgtcttcaaatttgtgggccgccgtgcgcgcccgcgggtgccagttccttggacccgccatgcaagaggaggctttgaaactcgtgcttcttgcccttgaggatggtagcgccctctctagaaaagtattggtgctgttcgtggtgcagcgactggagcctcggttcccacaggcgtccaagacctctatcggccacgttgtgcaattgctttatagagctagttgtttcaaagtcacaaaacgggacgaagattcatccctaatgcagctaaaggaggagtttagaacctacgaagcactccgcagggagcatgattcgcagatcgttcaaatagcaatggaggctggattgcgaatcgcccccgaccagtggtcttcacttttgtacggtgaccaatctcataagtctcacatgcagtccattattgacaaattgcagacaccagccagctttgcacagtccgtgcaagagctgactatagctctgcagcgcacaggcgaccccgcaaacctgaataggcttcgacctcatctagaactcttggccaatatcgaccccagccctgacgcgcctccccctacatgggagcagctcgagaatggcctagtggctgtccgaacggtcgtgcatgggctggtggattacatacagaatcactcaaagaaaggcgcggaccaacagcagccccctcagcatagtaagtataagacatatatgtgtagggatatgaagcaacgtggcggctgtcctcgcggtgcgagctgtacatttgcacattcacaagaagagcttgagaagttcaggaagatgaacaagaggttggtccctaggcgacctttgtccgcctcactgggtcagctaaatgaagtaggtctgcctagcgcagccattcttcctgacgagggggctgttgatctccccagcaggaaacctcctgccctccccaacggcatcgtgtctacaggcaataccgtgactcaactcattcctagaggtacggatccctcctatgactcatccctgaagcctggcaaaatcgatcacttgtcttcatccgccccgggcagcccaccggatctcttagaatcggttcccaagagtatcagtgctctaccagtgaacccgcacagcattccacctcggggccctgccgatctgccccctatgcctgtaaccaaaccgctgcagatggtgcccaggggcagccagttatatccagcgcaacagactgacgtgtattaccaagatcccagaggggccgccccacctttcgagcctgcgccataccagcaggggatgtattacaccccacccccgcaatgtgtgtctcgcttcgtcaggcccccgccctcagccccggagccagcgccaccgtatctggaccattaccccccctatttacaggaaagggtggtaaactctcaatatgggactcagccgcaacaataccccccaatctacccgtcccactacgatggacgacgggtttatccagctcccagttacaccagggaagagatcttcagagaatcaccaatccctattgaaattccacccgcggccgtgccttcttatgtgccggagtcaagggagagataccagcaaatcgagtcttactaccctgtcgccccccatcctacgcaaatcagaccttcgtatctgagagagcccccatacagcaggctcccgccaccaccccagcctcacccctccctggacgagctacaccgccggcgcaaggagatcatggcccagctcgaggagcgaaaggtgatttcaccacccccattcgccccctctccaactctacctccaaccttccatcccgaggagttcctggatgaggacctcaaagtggctggcaagtacaaagggaacgactattcacagtacagcccttggtcttgtgatactattggttcctatatcggcactaaggacgctaaaccaaaggacgtagttgcagctggatctgttgagatgatgaacgtggagtctaaaggtatgagggatcagcggctggatctgcagcggcgggcagccgagacttccgatgatgacctgattcctttcggggatcgacccactgttagcaggtttggggctatttctcgtaccagcaaaacaatctaccagggtgcaggaccaatgcaggcaatggctccacagggcgccccaacgaagagcattaacatctcagactacagcccctatggtacacacgggggctggggggctagcccctattcaccccaccagaacatcccatctcagggacacttctcggagcgggaacggatctcaatgtccgaggttgcatcacatgggaaaccacttcccagtgccgagagagagcaactgaggctcgagcttcaacaattgaatcatcagatatcccagcaaacacagctgcgaggcctcgagagggaagccaacacgctcgccggacaaagtcagccccctccccctcccccccccaaatggccgggcatgatttcatctgaacaactgtcactcgaactccaccaagtcgaacgagagatcggcaaacgaacgagagaactcagcatggaaaaccagtgctccctggatatgaagtcaaagttgaatactagcaaacaagctgagaacggtcagcctgaaccccagaacaaggttccagccgaagacctgacactgacattttctagcgacgtccccaacggatcagccctgacccaagagaatatctctctgttgagtaataagacctctagcttgaatctctcagaagatcccgagggaggcggggataacaacgactcccagcggagcggtgtcactccctccagcgccccgtag

SEQ ID NO: 112859 - DNA, 3378 bp, Artificial Sequence
  derived and/or modified sequence
atgcctgtgcaggccccccagtggacagacttcctgagctgccccatctgcacccagacctttgatgagaccatcaggaagcccatcagcctgggctgcggccacacagtgtgcaagatgtgcctgaacaagctgcacaggaaggcctgcccctttgaccagaccaccatcaacacagacatcgagctgctgcctgtgaacagcgccctgctgcagctggtgggcgcccaggtgcctgagcagcagcccatcaccctgtgcagcggcgtggaggacaccaagcactatgaggaggccaagaagtgtgtggaggagctggccctgtacctgaagcccctgagcagcgcccggggcgtgggcctgaacagcaccacccagagcgtgctgagccggcccatgcagaggaagctggtgaccctggtgcactgccagctggtggaggaggagggccgcatccgggccatgagagctgcccggagcctgggggagaggacagtgacagagctgatcctgcagcaccagaacccccagcagctgagcagcaacctgtgggccgctgtgcgggcccggggctgccagttcctgggccctgccatgcaggaggaggccctgaagctggtgctgctggccctggaggatggcagcgccctgagcaggaaggtgctggtgctgtttgtggtgcagaggctggagccccgcttcccccaggccagcaagaccagcatcggccacgtggtgcagctgctgtaccgggccagctgcttcaaggtgaccaagagagatgaggacagcagcctgatgcagctgaaggaggagttccgcacctatgaggccctgcggcgggagcatgacagccagatcgtgcagatcgccatggaggccggcctgcgcatcgccccagaccagtggagcagcctgctgtatggagaccagagccacaagagccacatgcagagcatcatcgacaagctgcagaccccagccagctttgcccagagcgtgcaggagctgaccatcgccctgcagaggactggagaccctgccaacctgaaccggctgcggccccacctggagctgctggccaacatcgaccccagcccagatgcccccccacccacctgggagcagctggagaatggcctggtggccgtgaggacagtggtgcacggcctggtggactacatccagaaccacagcaagaagggagctgaccagcagcagcccccccagcacagcaagtacaagacctacatgtgccgggacatgaagcagaggggcggctgccccaggggggccagctgcacctttgcccacagccaggaggagctggagaagttcaggaagatgaacaagaggctggtgccccggcggcccctgagcgccagcctgggccagctgaatgaggtgggcctgcccagcgctgccatcctgcctgatgaaggagctgtggacctgcccagcaggaagcccccagccctgcccaatggaattgtgtccacaggcaacacagtgacccagctgatcccccggggcacagaccccagctatgacagcagcctgaagccaggcaagattgaccacctgagcagcagcgcccctggcagccccccagacctgctggagagcgtgcccaagagcatcagcgccctgcctgtgaacccccacagcatccccccccggggccctgctgacctgccccccatgcctgtgaccaagcccctgcagatggtgccccggggcagccagctgtacccagcccagcagacagatgtgtactaccaggaccccagaggagctgcccccccatttgagcccgccccctaccagcagggcatgtactacaccccaccaccccagtgtgtgtccagatttgtgcggcccccacccagcgcccctgagcccgccccaccctacctggaccactacccaccctacctgcaggagcgggtggtgaacagccagtatggcacccagccccagcagtacccacccatctaccccagccactatgatggaagaagagtgtacccagcccccagctacacccgggaggagatcttccgggagagccccatccccatcgagatccccccagctgctgtgcccagctatgtgcctgagagccgggagcgctaccagcagatcgagagctactaccctgtggccccccaccccacccagatccggcccagctacctgcgggagcccccctacagccggctgcccccaccaccccagccccaccccagcctggatgagctgcacagaagaaggaaggagatcatggcccagctggaggagaggaaggtgatcagccccccaccatttgcccccagccccaccctgccccccaccttccaccctgaggagttcctggatgaggacctgaaggtggccggcaagtacaagggaaatgactacagccagtacagcccctggagctgtgacaccatcggcagctacatcggcaccaaggatgccaagcccaaggatgtggtggccgccggctctgtggagatgatgaatgtggagagcaagggcatgagggaccagaggctggacctgcagaggagagctgctgagaccagtgatgatgacctgatcccctttggagaccggcccaccgtgtccagatttggagccatcagcaggaccagcaagaccatctaccagggcgccggccccatgcaggccatggccccccagggcgcccccaccaagagcatcaacatcagtgactacagcccctacggcacccacggcggctggggcgccagcccctacagcccccaccagaacatccccagccagggccacttcagcgagcgggagcgcatctccatgtctgaggtggccagccacggcaagcccctgcccagcgctgagcgggagcagctgcggctggagctgcagcagctgaaccaccagatcagccagcagacccagctgcggggcctggagcgggaggccaacaccctggccggccagagccagcccccacctcctcctccacccaagtggccaggcatgatcagcagcgagcagctgagcctggagctgcaccaggtggagcgggagatcggcaagaggacccgggagctgtccatggagaaccagtgcagcctggacatgaagagcaagctgaacaccagcaagcaggctgaaaatggccagcctgagccccagaacaaggtgcctgctgaggacctgaccctgaccttcagcagtgatgtgcccaacggcagcgccctgacccaggagaacatcagcctgctgagcaacaagaccagcagcctgaacctgtctgaagatcctgagggcggcggggacaacaatgacagccagaggtctggagtgacccccagcagcgccccctag

SEQ ID NO: 112860 - DNA, 3378 bp, Artificial Sequence
  derived and/or modified sequence
atgcccgtgcaggccccccagtggaccgacttcctgagctgccccatctgtacccagaccttcgacgaaacaattaggaagccaatctcattggggtgtggacatacagtgtgcaagatgtgtctcaacaaacttcaccgcaaagcatgtccatttgaccagactaccatcaacacagacattgagctcctccctgtaaactcagccctcttgcagttagtgggagctcaggtccctgagcagcaacctattactctctgctccggggttgaggatacgaaacactacgaggaagctaaaaaatgcgtggaggagctggccctctatttaaagccactttcctccgccagaggcgttgggttaaattccacgacacagagtgttctttcacgcccgatgcaaagaaagctggttactttagttcactgccaactggtggaagaagaaggtaggatccgcgcaatgcgcgcggcaagaagcctgggtgagaggactgttacagagcttatacttcagcaccaaaacccccagcagcttagcagtaacctatgggccgcggtgcgagctcgagggtgccagttcctggggcctgccatgcaggaggaggcactgaagctagtgttgctggccttggaggacgggagcgcactctctagaaaggtactggtgctctttgttgtccaaagactcgaaccccgattcccccaagctagcaagactagcatcggacatgtggtccaacttttatacagagcatcctgtttcaaggtgactaaaagggacgaagacagctccctgatgcagcttaaggaagaattcaggacatacgaggccttgaggcgggaacatgatagtcagattgttcaaatcgccatggaagccggcttgcggattgctccagaccagtggtccagcctgttatacggagatcagtcccacaagagtcatatgcagtctataatcgataagctgcagactcccgctagctttgcccaaagcgtgcaggagctcacaatcgcacttcagcgcactggggatccagcaaacctgaaccggctgcggcctcacctcgagcttctggccaatatcgacccctctcctgacgcccccccacctacctgggaacagctggagaacggtctcgtcgcagtgcggactgtagtccacggcctggttgactatattcagaaccacagtaagaaaggcgccgaccagcagcagccaccccagcacagtaaatataaaacatatatgtgccgggacatgaagcagaggggggggtgcccacgcggggcgtcctgtactttcgcccacagccaggaagagctcgagaaattccggaagatgaataaacggctcgtaccgcggcggcccctgtccgccagtttggggcaattgaatgaggtcggactgccaagtgctgccattttgccggacgagggagccgttgacctcccgtccaggaagcccccggccctgccaaatggtatcgtgagcaccggcaacacagttacacagttgataccccggggaacagacccctcctacgattcatcgctcaaaccaggaaaaatcgatcatttatcaagctcagccccaggctcccctcctgatctgcttgagtccgtccccaagtccatttccgcactacccgtcaatccccacagcatcccccctcgagggccggctgacctcccacccatgcctgtcacgaaaccactacagatggtacccaggggcagccagctctaccctgcccagcaaacggacgtgtattaccaggatccgcggggcgccgccccacccttcgagccagcaccataccagcaagggatgtactacactccaccacctcagtgtgtgagtcgcttcgttcgccccccgccctcagcaccagagcctgctccaccatacctcgatcattatcccccctatctccaggagcgagtcgttaactcccagtacggtactcagcctcagcagtacccaccaatataccccagccactatgatggccggagagtgtacccagccccaagctacacacgcgaagaaattttccgagagagtcctataccgatcgagattccgcctgcagctgtgccatcttacgtcccagagagcagggagcgatatcagcaaatcgaaagctactatcccgttgctcctcatcctacgcagattcgcccatcatatttgagggaaccgccatactctcgacttcccccgcccccccagccccatccctctctggatgagctacatagaagacgtaaggaaatcatggcacagctcgaagagcggaaggtgatatcacctcctccttttgccccatcccccaccctcccccctacgtttcaccccgaggaattcctcgatgaggacctcaaggttgccggtaagtataaggggaacgactacagccagtactccccctggtcatgcgatactattgggagttacatcggtacaaaggatgcaaagcccaaagatgtggttgcggctggcagcgtggagatgatgaacgtagagagcaagggcatgagggatcagaggctggaccttcaacggcgtgccgccgagaccagcgacgatgatctgatcccatttggggacagaccaacagtgagccggtttggtgccatctctaggaccagcaaaactatatatcagggagctgggcctatgcaagccatggccccccagggagcgccgaccaagagcatcaatatttccgactatagcccctatgggactcacggcggctggggcgcctccccttactcgcctcaccagaatattccctcccagggtcatttctctgagcgggaaaggatctcaatgtctgaagtagcctcgcacggcaagccgctcccctctgctgagcgcgagcaattgagattagaactgcagcaactgaatcaccaaatctcacagcagacccagctgcgtggactcgaaagggaagctaataccttagcaggacagtcccagccccctccccccccccccccgaagtggcctggcatgatcagttcagaacagctctctctcgaactgcatcaggtggagagggaaataggaaagagaacccgggaattgtctatggagaaccagtgctcactggacatgaaatctaagctcaacactagtaagcaagcagaaaacggccagcctgagccccagaacaaagtgcctgcagaagacctgacccttactttttcgtccgacgtgcctaacggaagcgcacttacccaggaaaacatatccctgctgtctaataagaccagctccctcaatctgtcggaggatcctgaaggaggcggagacaataatgactctcagcgaagtggcgtgacaccaagtagcgcaccatag

SEQ ID NO: 112861 - DNA, 3378 bp, Artificial Sequence
  derived and/or modified sequence
atgcctgtgcaggccccacagtggacagactttctctcatgccctatctgcactcagacatttgacgagactattcgcaaacccatttccctcgggtgcgggcataccgtatgcaaaatgtgcctaaataagctgcaccggaaggcttgcccctttgaccaaactactataaacacggacatagaactgctgccagttaactccgccctgctgcagcttgtcggggctcaggtccccgagcaacagcctatcacgctgtgttcaggggtggaggacaccaagcattacgaggaagccaagaaatgcgtggaggagttggccttgtatctcaagcctctgagcagcgctaggggcgtaggactgaatagcacaacacaatccgtgctgagcagaccaatgcagcgcaaactggtaaccctcgtacactgtcagttagtggaggaggagggacggatccgcgcaatgcgagctgctaggtcacttggcgaacgaactgttacagaattaatcctccagcaccagaatccccagcaactgtcatctaatctttgggccgctgtgagagcacgaggttgccagttccttggtccggctatgcaggaagaggccctgaaactggttctgctcgccctggaggacggatccgcgctcagtcggaaagtcctggttctttttgtggtccagaggctggaaccacgcttcccccaggcctctaagaccagcattggccatgtggtgcagttgctgtatcgtgcttcttgtttcaaggtcaccaagcgtgatgaagattcgtctttgatgcagctgaaggaggagttccgcacctacgaggcgttacgtcgagaacacgattcgcaaatcgttcagatcgccatggaggccggactgcgaatcgcccctgatcagtggtcaagcctcttatatggcgaccagagtcacaaatcgcacatgcagtccatcatcgacaaactgcagactccagcctccttcgcgcaaagcgtacaggagcttaccatagctctgcagaggacaggagatccagccaatttgaaccggctgaggccccacctggagctactggccaatattgacccatcacccgacgcaccaccaccgacctgggaacagctggagaatgggttagtcgcggtgagaacggtggtccacggcctggttgattacattcagaatcatagcaaaaagggggctgaccagcaacagcctccacagcatagtaaatacaagacatatatgtgtcgcgatatgaagcaaagggggggatgccccaggggcgcttcctgcacctttgcccattcccaggaggaactggaaaaatttcgcaagatgaacaagaggctcgtccctagaagacccctgagtgcctcccttgggcagctcaacgaggtcgggctccccagcgccgcaatccttccagatgagggggctgtcgacctgccaagtagaaaacctccagccctgcctaacggcattgtgtccactggaaatacagtgacacagcttatcccgcgtggcactgacccctcctatgactcctccctgaagcccggaaagatcgaccacctcagttctagtgctcccggatcacctcctgacctactggagtcagtgccaaagagcatatccgccctccccgtcaacccgcacagtattcctccgagagggccagcagacctgcccccaatgccagttacaaagccactccagatggtacccagaggctcccagctgtatccggctcagcaaaccgatgtgtattatcaggaccctagaggagcggcacccccattcgaaccagcaccttatcagcagggcatgtactatacacctccccctcaatgcgtttctcgcttcgtgcgtccacctccttccgcgccagagccagccccaccctatttggaccactacccgccatacctccaggagagagtggtgaattcacagtatgggacacagccacaacaatatccgcctatctacccctcccactatgatggcagaagggtgtaccctgctcctagctacacccgggaggagattttccgtgagtctcctatccccattgagattccacccgcagcggttcccagttatgtgcctgaatctagagagcgatatcagcagattgagagctactatccagtagcgcctcatccaacacagattcgtccctcatacctgagggaacctccttactctcgccttccccctccacctcagccacacccttctctggatgagctacacagacggaggaaagagatcatggcccagttagaggagaggaaagtgatatcaccgccacccttcgctccctctccaacccttccaccaaccttccaccctgaggaattcctggacgaagacttaaaagtagccggtaagtacaagggcaatgattattcgcagtactcaccttggtcttgtgacacgataggaagttacatcggtacgaaggatgcgaagcctaaggacgtggttgcagcaggatcagtggaaatgatgaatgtcgagtcaaaaggcatgagggatcagagacttgacctacagcgacgcgctgcggaaacctctgacgacgacctgatccccttcggggacagacccacagtgtctagattcggagccatttctaggactagcaagactatttaccaaggggctggccctatgcaggccatggcccctcaaggagcccctactaagtcaattaacatcagtgattattccccctacggcacccatggcggatggggagcaagcccctattcccctcatcagaacatcccttcgcagggccacttttccgagcgcgagaggataagcatgtcagaggttgcaagccacggtaaaccactaccgtccgcggagcgagaacagttgcgccttgagctgcagcaacttaaccaccagataagccagcaaacacagctgagggggctggaaagagaagctaacacccttgcaggccagtcccagcccccaccacctccacccccaaagtggccaggaatgatctctagtgaacaactcagcctcgagctgcaccaagtggagagagagatcggaaaacgtactagggagttgtctatggaaaaccagtgctccttagacatgaagagcaagctgaacaccagcaagcaggcggagaacgggcagcctgagcctcagaacaaagtgcctgcggaagatttgactttgacattctcatcagatgtgccaaacggctcggcactgacccaggaaaacatcagtctgttgtccaataagactagctccctcaatttatcagaggatcctgagggcggtggggacaataatgatagccaacgatctggcgtgaccccttctagtgcaccctag

SEQ ID NO: 112862 - DNA, 3775 bp, Artificial Sequence
  derived and/or modified sequence
ctttttttcaaagattttgattccagtggaatctttgctttagatttgtgtgtgtgtttgtgttcgtgaattgtaactccagaagcaatgcctgtacaagctccacaatggacggatttcctctcctgcccaatttgcactcagactttcgacgaaacaattcgaaagcccatcagtttgggttgtggccatactgtctgcaagatgtgcctgaataaactccaccgcaaggcttgcccatttgaccagaccactatcaatacagacattgagctcctccctgtgaactcagcattgctgcagctcgtgggtgctcaggtccctgagcagcagcctattactttgtgtagtggggttgaagacacaaagcattatgaggaagccaagaaatgtgtagaagaattagcattgtacttaaaaccgctcagcagtgctagaggagtgggtctgaacagcactactcagagtgttctgagtcgcccaatgcagaggaagcttgtgactctagtccactgtcaactagtagaagaagaaggcaggattcgtgccatgagggcagctcgatctttaggtgaacgaacagttacagagctcattctccagcaccagaatcctcagcaactctcttccaatctttgggcagcagtaagggctaggggatgccagttccttggaccagcaatgcaggaggaagctttaaagttggttctgctggccttagaagatggttctgctttgtcaagaaaagtattggttctgtttgtggtgcaaagattggagccacggtttcctcaagcctctaaaactagcattgggcatgttgttcagctcctttatagagcctcctgtttcaaggtcaccaaacgtgatgaagactcttctttgatgcagctgaaagaagaatttagaacctatgaagctctgcggcgagaacatgactcccagatagtgcagattgctatggaagcaggcttacgaattgcaccggaccagtggtcctctttgctttatggagaccagtctcacaaatctcatatgcagtccattattgacaagttgcagactccagcctcttttgcacagagtgttcaggaactaacaattgctctccagcgaactggagacccagcaaacttgaaccgactaagaccccatttggagctgttagcaaacattgaccctagtccagatgctcctcctcctacttgggaacagctggaaaatgggctggttgctgtgcgtacagtggtacatgggctggttgattatatccagaaccacagcaaaaaaggagcagatcagcagcagcctccacagcatagcaaatacaaaacatacatgtgtcgagatatgaagcagagaggaggatgccctcgtggggccagctgtacatttgcacactcacaggaggaactggaaaaatttcgtaaaatgaataagcgcctggttccgagaagacccttgagtgcctctttgggtcaacttaatgaggtgggcctgccttcagcagctatccttccagatgaaggtgcagtggatctccctagcagaaaacctcctgctctgccaaatggaattgtatcaacagggaatacagtaacacagcttattccgcgagggacagaccccagctatgattctagtctgaaaccaggaaaaatagatcatctgagcagtagtgctcctggatcccctcctgacctgctagaatctgttcctaagagtatttctgccttacctgtgaatccacattctatacctccaagggggccagcagatctgcctccaatgcctgttaccaaaccacttcagatggtacctcgaggttctcagttatatccagcacaacagacggatgtttattatcaggatcctcgaggagcagctccgccatttgaaccagcaccttatcagcagggtatgtattatactccaccaccacaatgtgtgtcccgctttgtccgacctccaccatctgctcctgaacctgctcctccctacttggatcattatccaccctacctccaagaacgtgttgtaaactctcagtatggcacacagccacagcagtacccacctatatacccatctcactatgatggccgtcgagtgtaccctgctccgtcttacacaagagaagagatattccgagaaagccctatacccattgagattccacctgcagcagtaccatcgtatgtaccagaatccagagaaagataccaacagatcgagagttactatccagtggctcctcatccaactcagatcagaccttcgtacctcagagaacctccttatagccggcttcctcctcctccccagcctcatcctagtctagatgaactacatcgccgacgaaaggaaataatggcccagctagaggaaagaaaggttatctctccacctccttttgcaccttcaccaaccttgcctcctacctttcatccggaagaatttttggatgaagacttgaaggtagctgggaaatacaaaggaaatgattatagccaatactctccctggtcatgtgacaccatcggctcctacattggaaccaaagatgcaaaacccaaagatgttgtggcagcagggagtgtggaaatgatgaatgtggagagtaaaggaatgagggaccagcgattagatcttcagagaagagcagcagaaaccagtgatgatgacctcatcccatttggagaccgaccaacagtgtctcggtttggtgccatctcacgaacttccaaaactatatatcagggtgctggtccaatgcaggctatggcacctcagggagctcctacaaaatctattaacatttcagattatagtccatatggaacccacggtggctggggagcttctccatattcacctcatcaaaacataccttctcagggacacttcagtgagagggagagaatatctatgtcagaagtggccagtcatggaaaaccccttccatctgctgagagagaacagctacgactagaattgcagcaattgaaccatcagattagccagcagacccagctacgtggactagagagggaggcaaacaccctggcaggccagtcacagcccccaccaccgccacctccaaaatggcctgggatgatctcaagtgagcagttgagcttggaactgcaccaggtggaaagggaaatcgggaagagaacacgggaactgagtatggaaaaccagtgttctctggacatgaaaagcaaactgaatacaagtaaacaagcagaaaatggacaaccagaaccacaaaacaaggttccggctgaggaccttacattgacattcagcagtgatgtaccaaatggatcagccttgacacaagagaatatcagcctcctatcaaacaagaccagctctctgaacctgtcagaggaccctgagggaggaggggataataatgactcccagagatcaggagttactcccagttctgctccttaaaatatgaggagtcctacttttatcttctgctcctaatcagtttgtcgggcataggggtaggagaacgcataacttctaaactttttctcttaagagcggtcagagaaatccaggaaattcaccagaggcaatgtgcacaaacaccactactaaaaacaaaccctgcacatagttcacattaatgcatttttttaatttaaagaaaaagaaaattagcagtatctgcaagcaattcagattaaatttgtttttgttctgtgaatgaactttattttaataactttggacgccttggatccagggctttaaa

SEQ ID NO: 112863 - DNA, 3378 bp, Artificial Sequence
  derived and/or modified sequence
atgcccgtgcaggccccccagtggaccgacttcctgagctgccccatctgcacccagaccttcgacgagaccatcagaaagcccatcagcctgggctgcggccacaccgtgtgcaagatgtgcctgaacaagctgcacagaaaggcctgccccttcgaccagaccaccatcaacaccgacatcgagctgctgcccgtgaacagcgccctgctgcagctggtgggcgcccaggtgcccgagcagcagcccatcaccctgtgcagcggcgtggaggacaccaagcactacgaggaggccaagaagtgcgtggaggagctggccctgtacctgaagcccctgagcagcgccagaggcgtgggcctgaacagcaccacccagagcgtgctgagcagacccatgcagagaaagctggtgaccctggtgcactgccagctggtggaggaggagggcagaatcagagccatgagagccgccagaagcctgggcgagagaaccgtgaccgagctgatcctgcagcaccagaacccccagcagctgagcagcaacctgtgggccgccgtgagagccagaggctgccagttcctgggccccgccatgcaggaggaggccctgaagctggtgctgctggccctggaggacggcagcgccctgagcagaaaggtgctggtgctgttcgtggtgcagagactggagcccagattcccccaggccagcaagaccagcatcggccacgtggtgcagctgctgtacagagccagctgcttcaaggtgaccaagagagacgaggacagcagcctgatgcagctgaaggaggagttcagaacctacgaggccctgagaagagagcacgacagccagatcgtgcagatcgccatggaggccggcctgagaatcgcccccgaccagtggagcagcctgctgtacggcgaccagagccacaagagccacatgcagagcatcatcgacaagctgcagacccccgccagcttcgcccagagcgtgcaggagctgaccatcgccctgcagagaaccggcgaccccgccaacctgaacagactgagaccccacctggagctgctggccaacatcgaccccagccccgacgcccccccccccacctgggagcagctggagaacggcctggtggccgtgagaaccgtggtgcacggcctggtggactacatccagaaccacagcaagaagggcgccgaccagcagcagcccccccagcacagcaagtacaagacctacatgtgcagagacatgaagcagagaggcggctgccccagaggcgccagctgcaccttcgcccacagccaggaggagctggagaagttcagaaagatgaacaagagactggtgcccagaagacccctgagcgccagcctgggccagctgaacgaggtgggcctgcccagcgccgccatcctgcccgacgagggcgccgtggacctgcccagcagaaagccccccgccctgcccaacggcatcgtgagcaccggcaacaccgtgacccagctgatccccagaggcaccgaccccagctacgacagcagcctgaagcccggcaagatcgaccacctgagcagcagcgcccccggcagcccccccgacctgctggagagcgtgcccaagagcatcagcgccctgcccgtgaacccccacagcatcccccccagaggccccgccgacctgccccccatgcccgtgaccaagcccctgcagatggtgcccagaggcagccagctgtaccccgcccagcagaccgacgtgtactaccaggaccccagaggcgccgccccccccttcgagcccgccccctaccagcagggcatgtactacaccccccccccccagtgcgtgagcagattcgtgagacccccccccagcgcccccgagcccgcccccccctacctggaccactaccccccctacctgcaggagagagtggtgaacagccagtacggcacccagccccagcagtacccccccatctaccccagccactacgacggcagaagagtgtaccccgcccccagctacaccagagaggagatcttcagagagagccccatccccatcgagatcccccccgccgccgtgcccagctacgtgcccgagagcagagagagataccagcagatcgagagctactaccccgtggccccccaccccacccagatcagacccagctacctgagagagcccccctacagcagactgcccccccccccccagccccaccccagcctggacgagctgcacagaagaagaaaggagatcatggcccagctggaggagagaaaggtgatcagccccccccccttcgcccccagccccaccctgccccccaccttccaccccgaggagttcctggacgaggacctgaaggtggccggcaagtacaagggcaacgactacagccagtacagcccctggagctgcgacaccatcggcagctacatcggcaccaaggacgccaagcccaaggacgtggtggccgccggcagcgtggagatgatgaacgtggagagcaagggcatgagagaccagagactggacctgcagagaagagccgccgagaccagcgacgacgacctgatccccttcggcgacagacccaccgtgagcagattcggcgccatcagcagaaccagcaagaccatctaccagggcgccggccccatgcaggccatggccccccagggcgcccccaccaagagcatcaacatcagcgactacagcccctacggcacccacggcggctggggcgccagcccctacagcccccaccagaacatccccagccagggccacttcagcgagagagagagaatcagcatgagcgaggtggccagccacggcaagcccctgcccagcgccgagagagagcagctgagactggagctgcagcagctgaaccaccagatcagccagcagacccagctgagaggcctggagagagaggccaacaccctggccggccagagccagcccccccccccccccccccccaagtggcccggcatgatcagcagcgagcagctgagcctggagctgcaccaggtggagagagagatcggcaagagaaccagagagctgagcatggagaaccagtgcagcctggacatgaagagcaagctgaacaccagcaagcaggccgagaacggccagcccgagccccagaacaaggtgcccgccgaggacctgaccctgaccttcagcagcgacgtgcccaacggcagcgccctgacccaggagaacatcagcctgctgagcaacaagaccagcagcctgaacctgagcgaggaccccgagggcggcggcgacaacaacgacagccagagaagcggcgtgacccccagcagcgccccctag

SEQ ID NO: 112864 - DNA, 240 bp, Artificial Sequence
  derived and/or modified sequence
atgcggcagcgtggtcaggagcatctacccacttctgtaaaaagcgaacccagggcgtgcaataatcccaccgtggccgaaaacaggagagtgcctagcggtctggccgccgtaattcgaaatctcacggccctgtggaatccctccctcggagtatcagagaggagaggcggcgactgggagccttccagaatcccacggctgtgggcccgtgtcgggtggatccagctacctggatag

SEQ ID NO: 112865 - protein, 169 aa, Artificial Sequence
  derived and/or modified sequence
MFRDFGEPGPSSGNGGGYGGPAQPPAAAQAAQQETDKLEDEKSGLQREIEELQKQKERLELVLEAHRPICKIPEGAKEGDTGSTSGTSSPPAPCRPVPCISLSPGPVLEPEALHTPTLMTTPSLTPFTPSLVFTYPSTPEPCASAHRKSSSSSGDPSSDPLGSPTLLAL

SEQ ID NO: 112866 - DNA, 1427 bp, Artificial Sequence
  derived and/or modified sequence
ataaaaagaaaagactccgcacggcgcgggtgagtcagaacccagcagccgtgtaccccgcagagccgccagccccgggcatgttccgagacttcggggaacccggcccgagctccgggaacggcggcgggtacggcggccccgcgcagcccccggccgcagcgcaggcagcccagcaggagactgacaaactggaagatgagaaatctgggctgcagcgagagattgaggagctgcagaagcagaaggagcgcctagagctggtgctggaagcccaccgacccatctgcaaaatcccggaaggagccaaggagggggacacaggcagtaccagtggcaccagcagcccaccagccccctgccgccctgtaccttgtatctccctttccccagggcctgtgcttgaacctgaggcactgcacacccccacactcatgaccacaccctccctaactcctttcacccccagcctggtcttcacctaccccagcactcctgagccttgtgcctcagctcatcgcaagagtagcagcagcagcggagacccatcctctgacccccttggctctccaaccctcctcgctttgtgaggcgcctgagccctactccctgcagatgccaccctagccaatgtctcctccccttcccccaccggtccagctggcctggacagtatcccacatccaactccagcaacttcttctccatccctctaatgagactgaccatattgtgcttcacagtagagccagcttggggccaccaaagctgcccactgtttctcttgagctggcctctctagcacaatttgcactaaatcagagacaaaatatttcccatttgtgccagaggaatcctggcagcccagagactttgtagatccttagaggtcctctggagccctaaccccttccagatcactgccacactctccatcaccctcttcctgtgatccacccaaccctatctcctgacagaaggtgccactttacccacctagaacactaactcaccagccccactgccagcagcagcaggtgattggaccaggccattctgccgccccctcctgaaccgcacagctcaggaggcgcccttggcttctgtgatgagctgatctgcggatctcagctttgagaagccttcagctccagggaatccaagcctccacagcgagggcagctgctatttattttcctaaagagagtatttttatacaaacctaccaaaatggaataaaaggcttgaagctgtggcctgagtgcctcactggacccagaggccaatgggagagtatttggagccctaggtcccagccttagctctacagactcactgcatgaccttggacaaattctttgatatttttggactttgtcttatctgacaagtggggctacatccgctcggcctcatctccgggactg

SEQ ID NO: 112867 - DNA, 510 bp, Artificial Sequence
  derived and/or modified sequence
atgtttcgggatttcggggagcctggccctagtagcggaaacgggggggggtacggcgggccagcgcaacctcctgcggctgcacaggctgcccaacaggaaactgacaagctagaagacgaaaaatcaggattgcaaagggagatcgaagaactgcagaaacagaaagagcgattggaactggtgctggaagcccaccgacccatctgcaaaatacccgaaggcgccaaggagggggacacgggtagtactagtgggacctcttccccccccgctccatgtcgtcctgtcccatgtatttcgctgagccccgggccagtattggagcctgaggctctacacactcccactttgatgactacaccatccctgacgccttttacaccatccctcgttttcacctacccaagtacccccgagccctgcgcctccgcccaccgcaagagcagttcttctagcggggatccatctagtgacccgctcggcagccctaccctcctcgcactgtag

SEQ ID NO: 112868 - DNA, 510 bp, Artificial Sequence
  derived and/or modified sequence
atgttccgggactttggagagcccggccccagcagtggaaatggaggcggctacggcggccctgcccagcccccagctgctgcccaggccgcccagcaggagacagacaagctggaggatgagaagagcggcctgcagcgggagattgaggagctgcagaagcagaaggagcggctggagctggtgctggaggcccaccggcccatctgcaagatccctgagggcgccaaggagggggacaccggcagcaccagcggcaccagcagccccccagccccctgcaggcctgtgccctgcatcagcctgagccctggccctgtgctggagcctgaggccctgcacacccccaccctgatgaccacccccagcctgacccccttcacccccagcctggtgttcacctaccccagcaccccagagccctgtgccagcgcccacaggaagagcagcagcagcagcggggaccccagcagtgaccccctgggcagccccaccctgctggccctgtag

SEQ ID NO: 112869 - DNA, 510 bp, Artificial Sequence
  derived and/or modified sequence
atgttccgggacttcggcgagcccggccccagcagcggcaacggcgggggctacggggggcccgcccagccccctgcagccgctcaggccgcccagcaggagactgacaagttggaagacgaaaagagtggacttcaacgcgagatcgaagaactacagaaacagaaggagagactggagttagtcctggaggcacataggcctatttgcaagataccagagggtgccaaagagggagatacagggagcacttctgggacttccagcccacctgccccctgccggcccgtgccctgcatttctctctccccaggccccgttcttgagcccgaggcactccacacccctactctgatgactactccctccctcaccccttttacgcccagcctggtgtttacttatcccagcacccccgaaccctgcgctagcgcccatcgaaaatccagctcttccagcggcgacccctcctcagaccccctgggctcccccactttgctggctctgtag

SEQ ID NO: 112870 - DNA, 510 bp, Artificial Sequence
  derived and/or modified sequence
atgttcagggacttcggagagcccggacctagttcgggcaatggaggtgggtacgggggaccagcccagccccctgccgctgctcaagcggcacagcaagaaactgataaacttgaggatgagaaaagtggcctgcagagagaaatagaggagctccaaaagcagaaggaaagattggaactcgtcctggaggcacatcggcctatttgtaaaatcccagaaggcgcaaaagagggcgatactggaagcaccagcggaacatcctcccctcccgctccttgcagaccggtcccgtgcattagcctctcaccaggtccagtgctcgagcctgaagccctgcacaccccaaccctgatgacgacaccctcactaacgcctttcacgccctccttagtgtttacatatccttccacgcctgagccttgtgcctccgcgcacaggaagtcctcatctagcagcggcgacccctccagtgaccctctcgggagtcctaccctgttggcactgtag

SEQ ID NO: 112871 - DNA, 510 bp, Artificial Sequence
  derived and/or modified sequence
atgttcagagacttcggcgagcccggccccagcagcggcaacggcggcggctacggcggccccgcccagccccccgccgccgcccaggccgcccagcaggagaccgacaagctggaggacgagaagagcggcctgcagagagagatcgaggagctgcagaagcagaaggagagactggagctggtgctggaggcccacagacccatctgcaagatccccgagggcgccaaggagggcgacaccggcagcaccagcggcaccagcagcccccccgccccctgcagacccgtgccctgcatcagcctgagccccggccccgtgctggagcccgaggccctgcacacccccaccctgatgaccacccccagcctgacccccttcacccccagcctggtgttcacctaccccagcacccccgagccctgcgccagcgcccacagaaagagcagcagcagcagcggcgaccccagcagcgaccccctgggcagccccaccctgctggccctgtag

SEQ ID NO: 112872 - protein, 396 aa, Artificial Sequence
  derived and/or modified sequence
MAAAPREEKRWPQPVFSNPVVLWKFPEDFGDQEILQSVPKFCFPFDVERVSQNQVGQHFTFVLTDIESKQRFGFCRLTSGGTICLCILSYLPWFEVYYKLLNTLADYLAKELENDLNETLRSLYNHPVPKANTPVNLSVHSYFIAPDVTGLPTIPESRNLTEYFVAVDVNNMLQLYASMLHERRIVIISSKLSTLTACIHGSAALLYPMYWQHIYIPVLPPHLLDYCCAPMPYLIGIHSSLIERVKNKSLEDVVMLNVDTNTLESPFSDLNNLPSDVVSALKNKLKKQSTATGDGVARAFLRAQAALFGSYRDALRYKPGEPITFCEESFVKHRSSVMKQFLETAINLQLFKQFIDGRLAKLNAGRGFSDVFEEEITSGGFCGGKDKLQYDYPFSQ

SEQ ID NO: 112873 - DNA, 1191 bp, Artificial Sequence
  derived and/or modified sequence
atggcagccgcccccagggaggagaaaagatggccccagccagtcttctcgaacccagtggtgctgtggaagtttcccgaagactttggcgaccaggaaatactgcagagtgttccaaagttctgttttccatttgacgtggagcgcgtctcccagaaccaagttggtcagcatttcacattcgtgctgacggacatagagagcaagcaacgcttcggtttttgtcgcctcacgagcggaggcaccatatgcctttgcatcctctcctatcttccttggttcgaagtgtattacaagctcctaaatacactcgctgactacctggccaaggagttggaaaatgacctaaacgaaaccctgagatctctgtacaatcacccggtgcccaaagccaatactcctgtcaatctaagtgtgcactcttattttatcgctcctgatgttaccgggctgcctaccatacctgagtccaggaacctgactgagtacttcgtggccgtggacgtgaacaacatgttgcagttgtatgcgtctatgcttcacgagcgcaggattgtaatcatctcctccaaactcagtactctgacagcgtgcatccacggttcagccgccctcctttaccctatgtattggcagcacatttatattcctgtgcttcccccccaccttttggactattgttgcgctcctatgccttatttaatcggtattcactcaagcctcatcgagcgggtgaaaaataagtctctggaggacgtggtaatgttaaatgtcgatactaacacactggagagtcctttttctgatcttaacaacttaccttctgatgtcgtctccgcactaaagaacaagctgaaaaaacagtcaacggccaccggtgacggcgtagcaagagcgttcctgagagcccaagccgcccttttcggatcctatagagatgccctgaggtacaaacccggtgagcccatcactttctgcgaagagtctttcgtgaagcaccggtcttctgtcatgaagcagtttctagagaccgcaattaatctacagctctttaaacaatttatcgacggaaggcttgcaaagctgaacgcgggacgtggatttagcgatgtctttgaagaggagattacaagtggtggtttctgcggcgggaaggacaagctccagtatgactatcccttttcccaatag

SEQ ID NO: 112874 - DNA, 1191 bp, Artificial Sequence
  derived and/or modified sequence
atggctgccgctcctcgggaggagaagagatggcctcagccggtctttagtaatcctgtcgttttgtggaaatttcccgaggatttcggagatcaagagattctccagtcagtgccaaaattctgtttcccctttgatgtagaacgagtgagccaaaaccaggtgggccagcacttcacatttgtccttacggatatcgagtcaaaacaacgattcggcttctgccgtttaacatcgggtggcacaatctgtctgtgcatcctttcatacttgccatggttcgaagtttactacaagttactcaacaccctggccgactatttggctaaggaactcgagaacgaccttaacgagaccctccgatccctgtataatcaccccgtccccaaagccaacacccctgtaaacctcagcgtacacagttactttattgctcctgatgtgacaggacttcccaccatccccgagtctcgcaatcttactgagtattttgtcgctgtcgatgtgaacaatatgttacaactctacgcatctatgcttcacgaaaggagaatcgtcattatctctagcaaattgtccacgctgacggcctgtattcacggcagcgccgccctgctgtacccaatgtactggcagcacatctatatcccggttctcccacctcacctccttgactactgttgtgcccccatgccgtatctcatcggcatccacagctcactaatcgaacgcgttaagaataaatctcttgaggacgtcgtaatgctgaatgtggatacaaatacccttgaatctccttttagcgacctgaacaacttgccgtccgatgtcgtctccgccctaaagaataagcttaagaaacagtccacagccactggcgatggggtggctagggcatttctcagagcccaagctgccctgtttgggtcctacagagacgctctgcgctataagcccggcgaacccattaccttctgcgaagagtctttcgtcaaacaccgatcctcggtgatgaaacagttcctggagacagcaattaatttgcagctgtttaaacagttcatcgacggtaggctcgccaaattgaacgccgggcgcggcttcagcgatgtcttcgaagaggaaattacctcaggggggttctgcggaggaaaggacaaacttcagtatgactacccgttcagccagtag

SEQ ID NO: 112875 - DNA, 1191 bp, Artificial Sequence
  derived and/or modified sequence
atggctgctgccccccgggaggagaagcgctggccccagcccgtcttcagcaaccctgtggtgctgtggaagttcccagaagattttggagaccaggagatcctgcagagcgtgcccaagttctgcttcccctttgatgtggagcgggtgtcccagaaccaggtgggccagcacttcacctttgtgctgacagacatcgagagcaagcagcgcttcggcttctgccgcctgaccagcggcggcaccatctgcctgtgcatcctgagctacctgccctggtttgaggtgtactacaagctgctgaacaccctggccgactacctggccaaggagctggagaatgacctgaatgagaccctgcggagcctgtacaaccaccctgtgcccaaggccaacacccctgtgaacctgtctgtgcacagctacttcatcgccccagatgtgacaggcctgcccaccatccctgagagcaggaacctgacagagtactttgtggccgtggatgtgaacaacatgctgcagctgtatgcctccatgctgcatgaaagaagaattgtcatcatcagcagcaagctgagcaccctgacagcctgcatccacggcagcgctgccctgctgtaccccatgtactggcagcacatctacatccctgtgctgcccccccacctgctggactactgctgtgcccccatgccctacctgattggcatccacagcagcctcatcgagcgggtgaagaacaagagcctggaggatgtggtgatgctgaatgtggacaccaacaccctggagagccccttcagtgacctgaacaacctgcccagtgatgtggtgtctgccctgaagaacaagctgaagaagcagagcacagccactggagatggagtggcccgggccttcctgcgggcccaggccgccctgtttggcagctacagagatgccctgcgctacaagccaggagagcccatcaccttctgtgaggagagctttgtgaagcacaggagctctgtgatgaagcagttcctggagacagccatcaacctgcagctgttcaagcagttcattgatggccgcctggccaagctgaatgccggccggggcttcagtgatgtgtttgaggaggagatcaccagcggcggcttctgtggcggcaaggacaagctgcagtatgactaccccttcagccagtag

SEQ ID NO: 112876 - DNA, 1191 bp, Artificial Sequence
  derived and/or modified sequence
atggccgccgccccccgggaggagaagcggtggccccagcccgtgttctccaaccccgtggtgttgtggaaattcccagaggacttcggcgaccaagagattctccaaagcgtgccaaagttttgcttcccgttcgacgtcgaacgagtgagtcagaaccaggtcggccagcactttacgttcgtgctgactgatatagagagcaagcagcgctttgggttctgccggctgacatcaggaggcacaatctgtttgtgtattctgtcatatttgccttggtttgaggtctattataagctccttaacacactcgccgattaccttgcaaaagagctggagaacgatctcaacgagaccttgcgttccctctacaatcatcctgtgccaaaagccaatacacctgtgaacctttctgtgcattcctattttatcgcgccggatgtaactggcctgcctaccatccctgagtcacggaatttgactgaatactttgttgcagtagacgttaataacatgctgcagttatacgcctccatgcttcacgaaagaaggatagttatcatcagctctaaattgtccacattgaccgcttgcattcacggctctgcagcgctgctgtaccctatgtattggcagcatatttacatccctgttctgcccccccatttgttggattactgttgcgcacctatgccttatctcattggaatccactcatcgctaatcgaacgagtcaaaaacaagagcctggaggatgtcgtgatgctcaatgtagacacaaacaccctggaatctcctttttccgatctaaataatctaccgagcgacgtcgtgtccgccctgaagaataaattaaaaaagcaaagtaccgcaaccggagatggggtggcccgggcttttctgcgagcacaggccgcgctttttggaagctaccgtgacgccttaagatataaacccggcgagccaatcactttttgtgaagagtcttttgttaagcatagaagcagtgttatgaaacagttcctagagacggcaattaaccttcagctgtttaagcagttcatcgacgggagactggctaagctgaatgctgggcgggggtttagcgatgtcttcgaagaggaaatcaccagcggtggcttttgcggggggaaagacaagctccaatatgactatcctttctctcagtag

SEQ ID NO: 112877 - DNA, 1191 bp, Artificial Sequence
  derived and/or modified sequence
atggccgccgccccccgggaggagaagcggtggccccagcccgtgttttcaaatccagtcgtgctgtggaagtttccagaggactttggtgaccaagagatactgcaatctgtaccaaaattctgcttcccctttgacgtggagagagtgagccaaaatcaggttggacagcattttaccttcgttctgactgacattgagtctaaacagcggtttgggttctgtcgtcttacatctggcgggaccatctgcttatgcatcctctcataccttccttggtttgaggtttactacaagctccttaataccctagcggattatctcgccaaggaacttgagaatgacctcaacgagactttaaggtctctgtacaatcaccccgttccgaaagctaacacaccagtcaatctttcagtccatagttatttcatagcccctgatgttaccggacttccaaccattcctgaaagtcgaaacctgacggaatattttgttgccgtagatgtgaacaacatgttacagctgtatgcttcaatgttgcacgagcggcgtattgtgatcatttccagcaaactatctactttaacagcatgtatccatggtagcgctgcgctcctctatcctatgtactggcaacatatttacatccccgtactgccacctcacttgctcgactattgctgtgcgcccatgccatacctcatcggtattcactccagtctgattgagagggtgaaaaacaagtcactagaggacgtcgtgatgctgaatgtggacactaacacattggagtctccattcagcgacctcaataacttaccgagcgacgttgtaagtgccctcaagaataagctgaaaaaacagtccactgctaccggagacggtgttgcccgagcctttctgcgagcacaagcggctctattcggcagttaccgggacgccctccgatacaaacctggcgagcccatcacattttgtgaagagtcctttgtgaagcaccgaagctctgttatgaagcagtttctggagacagccataaatctgcagctctttaaacagtttattgacgggaggcttgctaagttaaatgcagggcgggggttttcggatgtctttgaggaggaaatcacaagcggaggcttctgtggcggaaaggacaagcttcagtacgactaccccttcagccagtag

SEQ ID NO: 112878 - DNA, 1191 bp, Artificial Sequence
  derived and/or modified sequence
atggccgcagccccaagggaggagaagcgctggccccagcccgtctttagcaaccctgtggtgctttggaaattccctgaagactttggggaccaggaaatcctccagtccgtccccaagttctgtttcccatttgacgtggagagagtgtcccagaatcaagtgggacagcatttcactttcgtgcttacagacattgaaagtaaacagaggttcggtttctgcaggcttacatcgggaggcactatctgcctctgtattctctcctacctcccctggtttgaggtctactacaagcttctgaacactctcgccgattacctggctaaggaactcgaaaacgacttaaacgagacactgagaagcctgtacaaccacccagtgcccaaggccaacacccctgtaaatctgagtgtgcactcctatttcattgcacccgacgtgaccggcttgcctacaatccccgaatcccgcaatctaaccgagtactttgtggcggtggacgtcaacaatatgttgcaactatacgcctccatgttgcacgaacgacgcatagtgatcatctcatccaaactgagcactctgacagcttgcatacatggaagcgccgctcttctgtatcccatgtactggcagcacatatacatcccggtcctgcctcctcatctgctcgattattgttgcgctccaatgccctatctgatcggcatccacagtagtctgatagagagagtgaaaaacaagtccttggaagatgttgtgatgctcaatgtagacaccaacacgctggagagcccatttagcgacctgaacaatctgccaagcgacgttgtttctgcattgaagaacaagctcaaaaaacagtccacagcaactggagacggcgttgcaagggctttcctgcgcgctcaggccgctctgttcggttcttatcgcgatgcattacgatacaaacctggcgagccaattaccttttgtgaggagtccttcgtaaagcatcggagcagcgtgatgaaacaattccttgagacagccattaacctccaactgtttaagcagtttatagacggacgtctggcaaagctgaacgcgggacgcggattttctgatgtgttcgaagaagaaatcacatctgggggtttctgtgggggaaaggacaaactccaatatgactatccttttagccagtag

SEQ ID NO: 112879 - DNA, 1191 bp, Artificial Sequence
  derived and/or modified sequence
atggctgccgctccacgagaagaaaagcgctggccccagccagtgttctccaacccagtggttttgtggaaatttcctgaggactttggagaccaggagattctgcagtctgtgcccaaattctgcttcccctttgatgtggagagagtgtctcagaatcaggttggacagcatttcaccttcgtactaacagatatagaatctaagcagagatttggcttctgtagacttacttctggcggaactatttgtctatgcatcttatcttacctaccttggttcgaggtgtactacaagttgttgaacacattggctgattatttggcaaaggaactggagaacgatctgaacgagacactgcgtagcctctataatcacccagtccccaaggcgaacactcccgtgaacttaagcgttcatagctacttcattgccccagatgtaacaggactcccgaccatccctgagagtcggaacctcacggagtactttgtggcagtcgacgtgaacaatatgctgcagctgtatgccagcatgcttcacgaaagaaggatcgttataatttcgtccaagctttctacgctaactgcctgcatccacggaagcgcggctcttctataccctatgtactggcaacacatctatatcccggtcttaccccctcacttgcttgactactgttgcgcgcctatgccatatttgatcggaatacactcctccctgattgagcgagttaaaaacaagagcctggaagatgtggtgatgctgaacgtggacacaaatacactggaatcccctttcagcgaccttaacaatctgccatccgatgtggtgtcagcgctgaagaacaagctcaagaaacagagcactgccactggcgatggtgtcgcaagggccttcctgagagcgcaggccgctttattcggcagctacagagacgctcttaggtacaaacctggcgaacccatcactttctgtgaagagagttttgtgaagcaccggtcatccgtcatgaaacagtttttggagacagctattaacctgcagctgttcaaacagtttattgacggcaggttagccaaacttaacgcaggcagagggttctctgatgtatttgaagaggaaattacctcagggggattttgtggaggaaaagacaagctacagtatgactatcctttctcccagtag

SEQ ID NO: 112880 - DNA, 1191 bp, Artificial Sequence
  derived and/or modified sequence
atggccgccgcccccagagaggagaagagatggccccagcccgtgttcagcaaccccgtggtgctgtggaagttccccgaggacttcggcgaccaggagatcctgcagagcgtgcccaagttctgcttccccttcgacgtggagagagtgagccagaaccaggtgggccagcacttcaccttcgtgctgaccgacatcgagagcaagcagagattcggcttctgcagactgaccagcggcggcaccatctgcctgtgcatcctgagctacctgccctggttcgaggtgtactacaagctgctgaacaccctggccgactacctggccaaggagctggagaacgacctgaacgagaccctgagaagcctgtacaaccaccccgtgcccaaggccaacacccccgtgaacctgagcgtgcacagctacttcatcgcccccgacgtgaccggcctgcccaccatccccgagagcagaaacctgaccgagtacttcgtggccgtggacgtgaacaacatgctgcagctgtacgccagcatgctgcacgagagaagaatcgtgatcatcagcagcaagctgagcaccctgaccgcctgcatccacggcagcgccgccctgctgtaccccatgtactggcagcacatctacatccccgtgctgcccccccacctgctggactactgctgcgcccccatgccctacctgatcggcatccacagcagcctgatcgagagagtgaagaacaagagcctggaggacgtggtgatgctgaacgtggacaccaacaccctggagagccccttcagcgacctgaacaacctgcccagcgacgtggtgagcgccctgaagaacaagctgaagaagcagagcaccgccaccggcgacggcgtggccagagccttcctgagagcccaggccgccctgttcggcagctacagagacgccctgagatacaagcccggcgagcccatcaccttctgcgaggagagcttcgtgaagcacagaagcagcgtgatgaagcagttcctggagaccgccatcaacctgcagctgttcaagcagttcatcgacggcagactggccaagctgaacgccggcagaggcttcagcgacgtgttcgaggaggagatcaccagcggcggcttctgcggcggcaaggacaagctgcagtacgactaccccttcagccagtag

SEQ ID NO: 112881 - DNA, 2195 bp, Artificial Sequence
  derived and/or modified sequence
gggggccggacggacagccccacaccgacatgtaaccatggactgcaggaccaaggcaaatccagacagaacctttgacttggtgttgaaagtgaaatgtcatgcctctgaaaatgaagaggacagtccagcttatctgccgaggattccccctggaaaagtacgccgattcgcattttgcattaagaaactggaaaactttcctgtcggtcctggcgtagcgcctcccgtgtccggggtagaccttgtaccggctgaaaccgcatagctcgaccttcatggcggcagctccacgggaggagaaaagatggccccaacctgtattttcgaatcctgtggtattgtggaaattcccagaggactttggagaccaggaaatactacagagtgtgccaaagttctgttttccctttgacgttgaaagggtgtctcagaatcaagttggacagcactttacctttgtactgacagacattgaaagtaaacagagatttggattctgcagactgacgtcaggaggcacaatttgtttatgcatccttagttaccttccctggtttgaagtgtattacaagcttctaaatactcttgcagattacttggctaaggaactggaaaatgatttgaatgaaactctcagatcactgtataaccacccagtaccaaaggcaaatactcctgtaaatttgagtgtgcattcctacttcattgcccctgatgtaactggactcccaacaatacccgagagtagaaatcttacagaatattttgttgccgtggatgtgaacaacatgctgcagctgtatgccagtatgctgcatgaaaggcgcatcgtgattatctcgagcaaattaagcactttaactgcctgtatccatggatcagctgctcttctatacccaatgtattggcaacacatatacatcccagtgcttcctccacacctgctggactactgctgtgccccaatgccatacctgattggaatacactccagcctcatagagagagtgaaaaacaaatcattggaagatgttgttatgttaaatgttgatacaaacacattagaatcaccatttagtgacttgaacaacctaccaagtgatgtggtctcggccttgaaaaataaactgaagaagcagtctacagctacgggtgatggagtagctagggcctttcttagagcacaggctgctttgtttggatcctacagagatgcactgagatacaaacctggtgagcccatcactttctgtgaggagagttttgtaaagcaccgctcaagcgtgatgaaacagttcctggaaactgccattaacctccagctttttaagcagtttatcgatggtcgactggcaaaactaaatgcaggaaggggtttctctgatgtatttgaagaagagatcacttcaggtggcttttgtggaggtaaagacaagttacaatatgattatccattttctcaataacaattttcttggtctttgcacttgtgtctgataaaacctatttcataaacaactaatgatttcctcctaaatatgtaatgtcttaaatacatttttcatcttataaaagctatggaattagcttattttgcctgatacctgttactcaaggcattaagttggcctcctgaattggcagctgttggcctcgataatctcttaatattgctggaaattagtaatacagaaatccaatcaactcatatcttcctgtctttccttctgaatagtagtattctctgctagaaaactactagtgatggttattactgagtatgaatttaagaactgaggttatgattggtaatacaatccaaaaagaagggtctgaacaccaaaattctttatacatatttaagtaactgtattattattatacagatgtctttacctttttgactttatagatcactgcagcattaagaaagtttccagtttaccattccataagtacaattaatccttctagtgtaaatgttcaaatactgttataattatctaggcaattaataatttacaaactgatatttttgcacgattgtagtggtgtatagtcttgacttgcagagcattttgcttgagtccttgaaatgtcgtgttcattcattatttgctgagtgcttacaatgtattaggcactgttctaaatattaagtgtactaaataaacaaaaatccttgtattctg

SEQ ID NO: 112882 - DNA, 1917 bp, Artificial Sequence
  derived and/or modified sequence
atggcggcagctccacgggaggagaaaagatggccccaacctgtattttcgaatcctgtggtattgtggaaattcccagaggactttggagaccaggaaatactacagagtgtgccaaagttctgttttccctttgacgttgaaagggtgtctcagaatcaagttggacagcactttacctttgtactgacagacattgaaagtaaacagagatttggattctgcagactgacgtcaggaggcacaatttgtttatgcatccttagttaccttccctggtttgaagtgtattacaagcttctaaatactcttgcagattacttggctaaggaactggaaaatgatttgaatgaaactctcagatcactgtataaccacccagtaccaaaggcaaatactcctgtaaatttgagtgtgcattcctacttcattgcccctgatgtaactggactcccaacaatacccgagagtagaaatcttacagaatattttgttgccgtggatgtgaacaacatgctgcagctgtatgccagtatgctgcatgaaaggcgcatcgtgattatctcgagcaaattaagcactttaactgcctgtatccatggatcagctgctcttctatacccaatgtattggcaacacatatacatcccagtgcttcctccacacctgctggactactgctgtgccccaatgccatacctgattggaatacactccagcctcatagagagagtgaaaaacaaatcattggaagatgttgttatgttaaatgttgatacaaacacattagaatcaccatttagtgacttgaacaacctaccaagtgatgtggtctcggccttgaaaaataaactgaagaagcagtctacagctacgggtgatggagtagctagggcctttcttagagcacaggctgctttgtttggatcctacagagatgcactgagatacaaacctggtgagcccatcactttctgtgaggagagttttgtaaagcaccgctcaagcgtgatgaaacagttcctggaaactgccattaacctccagctttttaagcagtttatcgatggtcgactggcaaaactaaatgcaggaaggggtttctctgatgtatttgaagaagagatcacttcaggtggcttttgtggaggtaaagacaagttacaatatgattatccattttctcaataacaattttcttggtctttgcacttgtgtctgataaaacctatttcataaacaactaatgatttcctcctaaatatgtaatgtcttaaatacatttttcatcttataaaagctatggaattagcttattttgcctgatacctgttactcaaggcattaagttggcctcctgaattggcagctgttggcctcgataatctcttaatattgctggaaattagtaatacagaaatccaatcaactcatatcttcctgtctttccttctgaatagtagtattctctgctagaaaactactagtgatggttattactgagtatgaatttaagaactgaggttatgattggtaatacaatccaaaaagaagggtctgaacaccaaaattctttatacatatttaagtaactgtattattattatacagatgtctttacctttttgactttatagatcactgcagcattaagaaagtttccagtttaccattccataagtacaattaatccttctagtgtaaatgttcaaatactgttataattatctaggcaattaataatttacaaactgatatttttgcacgattgtagtggtgtatagtcttgacttgcagagcattttgcttgagtccttgaaatgtcgtgttcattcattatttgctgagtgcttacaatgtattaggcactgttctaaatattaagtgtactaaataaacaaaaatccttgtattctg

SEQ ID NO: 112883 - protein, 1032 aa, Artificial Sequence
  derived and/or modified sequence
MGRESRHYRKRSASRGRSGSRSRSRSPSDKRSKRGDDRRSRSRDRDRRRERSRSRDKRRSRSRDRKRLRRSRSRERDRSRERRRSRSRDRRRSRSRSRGRRSRSSSPGNKSKKTENRSRSKEKTDGGESSKEKKKDKDDKEDEKEKDAGNFDQNKLEEEMRKRKERVEKWREEQRKKAMENIGELKKEIEEMKQGKKWSLEDDDDDEDDPAEAEKEGNEMEGEELDPLDAYMEEVKEEVKKFNMRSVKGGGGNEKKSGPTVTKVVTVVTTKKAVVDSDKKKGELMENDQDAMEYSSEEEEVDLQTALTGYQTKQRKLLEPVDHGKIEYEPFRKNFYVEVPELAKMSQEEVNVFRLEMEGITVKGKGCPKPIKSWVQCGISMKILNSLKKHGYEKPTPIQTQAIPAIMSGRDLIGIAKTGSGKTIAFLLPMFRHIMDQRSLEEGEGPIAVIMTPTRELALQITKECKKFSKTLGLRVVCVYGGTGISEQIAELKRGAEIIVCTPGRMIDMLAANSGRVTNLRRVTYVVLDEADRMFDMGFEPQVMRIVDNVRPDRQTVMFSATFPRAMEALARRILSKPIEVQVGGRSVVCSDVEQQVIVIEEEKKFLKLLELLGHYQESGSVIIFVDKQEHADGLLKDLMRASYPCMSLHGGIDQYDRDSIINDFKNGTCKLLVATSVAARGLDVKHLILVVNYSCPNHYEDYVHRAGRTGRAGNKGYAYTFITEDQARYAGDIIKALELSGTAVPPDLEKLWSDFKDQQKAEGKIIKKSSGFSGKGFKFDETEQALANERKKLQKAALGLQDSDDEDAAVDIDEQIESMFNSKKRVKDMAAPGTSSVPAPTAGNAEKLEIAKRLALRINAQKNLGIESQVDVMQQATNAILRGGTILAPTVSAKTIAEQLAEKINAKLNYVPLEKQEEERQDGGQNESFKRYEEELEINDFPQTARWKVTSKEALQRISEYSEAAITIRGTYFPPGKEPKEGERKIYLAIESANELAVQKAKAEITRLIKEELIRLQNSYQPTNKGRYKVL

SEQ ID NO: 112884 - DNA, 3099 bp, Artificial Sequence
  derived and/or modified sequence
atggggcgggaatcgcgccactaccggaagagaagcgcttcacggggtcgctccggcagtaggtcccgctcccgctccccctccgataagcgatccaagaggggagatgatagacggtcccgaagcagagaccgggatcgccggagggaacggtctaggtcaagggataagagacgctccaggagtagggatcggaaaagactccggagatccagaagtagagaaagagatcgctcaagggagaggcgaaggtcccggtcccgggatcgtagaaggagtaggtcacgttcacgcggcaggcgctccaggagctcttctcctggaaacaagagtaagaagaccgaaaacagatcaaggagcaaagagaaaactgacggcggagagtcctctaaagaaaaaaaaaaggacaaggacgacaaagaggacgaaaaagagaaagacgcaggaaatttcgaccaaaataagctggaggaggagatgcgaaagagaaaagaacgggtggaaaagtggagagaggagcagcgtaagaaggccatggagaacattggagagctgaagaaggagattgaggaaatgaaacagggtaagaaatggtctttggaggacgacgatgatgatgaggacgatcccgccgaggccgaaaaagagggtaacgaaatggagggggaggaacttgatcctctggacgcttatatggaggaggtaaaagaggaagtcaaaaagttcaacatgagaagtgtgaaaggcggcggcggaaacgagaagaagtctggcccaacagtgactaaagtcgtgacggtggttactactaagaaggctgtggtggactcggataagaaaaaaggcgagcttatggagaatgaccaagatgccatggagtactcttccgaagaggaagaagtggacctgcaaaccgcactaaccggttatcagactaaacagagaaaacttctggaaccagtggatcatgggaagattgagtatgagcccttcaggaagaatttctatgtggaggtgcctgaactagcgaaaatgagccaggaagaagttaacgtgtttcgcttggagatggagggaatcaccgtaaagggaaagggctgtcctaagcctatcaagagttgggtgcaatgtgggatctctatgaaaatcctaaactccttgaagaagcatggctacgaaaagccaacaccaatccaaacgcaggccattccggctataatgtctggccgagacctgatagggatcgccaagaccggttctgggaagaccatcgccttcctgctgcctatgtttcggcatatcatggatcagcggtccctagaagaaggggagggaccaatcgccgtgattatgaccccgaccagggagctggcactgcagattaccaaagagtgcaagaaatttagtaagaccctcggccttcgtgtggtttgcgtctatggcggcactggaattagtgagcagatcgctgaacttaaacgtggagcagagatcatcgtttgcaccccagggagaatgattgacatgctcgccgctaatagcggccgtgtaacaaacctaaggagggttacttatgtggttttggatgaggctgatcggatgttcgatatgggctttgagcctcaggttatgcggattgtcgacaatgtcagacccgaccgccagacggtgatgttttctgcaactttcccaagggcaatggaggcgcttgcacggagaatactttcgaagcccattgaagttcaggtgggaggccgaagtgtcgtctgtagtgatgtcgagcagcaagtgatcgtgattgaagaagaaaaaaagttcttgaagttactggagctactgggccactaccaggagtcgggctccgtcatcattttcgtggataagcaggagcacgcagatggactcctgaaggatctgatgcgcgcttcttacccgtgtatgagcctccacggaggtatcgaccaatacgatcgcgatagcataatcaacgattttaaaaatggcacttgcaagctgttagtggccacctctgtagccgcaagaggattggacgttaagcatctaattttggttgtaaactactcttgtcccaatcattatgaggattacgtccaccgcgcgggccgaaccggcagagctggtaacaaaggatatgcttatacatttatcacagaggatcaggctcgttatgctggtgacatcatcaaagccctggagctcagcgggactgccgtccccccggatctggaaaaattgtggagtgacttcaaggaccagcagaaggccgaaggtaaaataattaagaagtcttcaggcttctctggtaagggtttcaagttcgacgagactgaacaagccctggcaaacgagcgcaaaaaacttcagaaggccgccctaggattacaggacagcgacgacgaggacgcagccgttgacatagatgagcaaatcgagagtatgtttaacagtaagaagcgcgtgaaggatatggccgctccaggcacaagctccgtaccagcgcccactgctggaaatgcggagaaactggagattgctaaaaggcttgcgctgaggatcaacgctcagaagaatctggggattgaatcacaggtcgacgtcatgcaacaggccacaaatgctatcctcaggggcggtaccatcctcgcccctacggtgtctgccaagacaattgccgaacagctcgccgaaaagataaacgctaagctgaattatgtccccctggagaaacaggaagaggagcgccaggatggcgggcagaatgagagcttcaagcgctatgaggaagaactggaaatcaatgatttcccgcagaccgcgaggtggaaggtgacctcgaaggaggcacttcaacggattagcgaatattccgaagcagccataacaattagaggaacttactttcccccaggaaaggagcctaaggaaggtgaacggaagatctatctggcgattgagtccgctaatgagcttgctgtgcaaaaggccaaagctgagatcacccggctaatcaaagaggagctgatccgcttgcagaactcttaccagcctacaaataaaggccggtataaggtcctttag

SEQ ID NO: 112885 - DNA, 3099 bp, Artificial Sequence
  derived and/or modified sequence
atgggccgggagagccgccactacaggaagaggtctgccagccggggccgcagcggcagccgcagccgcagccgcagccccagcgacaagaggagcaagagaggagatgaccggcgcagccgcagccgggaccgggacagaagaagagagaggagccgcagccgggacaagaggaggagccgcagccgggacaggaagaggctgcggcgcagccgcagccgggagcgggacaggagccgggagaggagaagaagccgcagccgggacagaagaagaagccgcagccgcagccggggccgccgcagccgcagcagcagccctggcaacaagagcaagaagacagaaaatagaagccgcagcaaggagaagacagatggaggagagagcagcaaggagaagaagaaggacaaggatgacaaggaggatgagaaggagaaggatgctggcaactttgaccagaacaagctggaggaggagatgaggaagaggaaggagcgggtggagaagtggagggaggagcagaggaagaaggccatggagaacatcggggagctgaagaaggagattgaggagatgaagcagggcaagaagtggagcctggaggatgatgatgatgatgaagatgatcctgctgaggccgagaaggagggcaatgagatggagggggaggagctggaccccctggatgcctacatggaggaggtgaaggaggaggtgaagaagttcaacatgaggtctgtgaagggcggcggcggcaatgagaagaagagcggccccaccgtgaccaaggtggtgacagtggtgaccaccaagaaggctgtggtggacagcgacaagaagaagggggagctgatggagaatgaccaggatgccatggagtacagcagcgaggaggaggaggtggacctgcagacagccctgaccggctaccagaccaagcagaggaagctgctggagcctgtggaccacggcaagattgaatatgagcccttcaggaagaacttctacgtggaggtgcctgagctggccaagatgagccaggaggaggtgaatgtgttccggctggagatggagggcatcaccgtgaagggcaagggctgccccaagcccatcaagtcctgggtgcagtgtggcatctccatgaagatcctgaacagcctgaagaagcacggctatgagaagcccacccccatccagacccaggccatcccagccatcatgagcggccgggacctgattggaattgccaagacaggcagcggcaagaccatcgccttcctgctgcccatgttccgccacatcatggaccagaggagcctggaggagggggagggccccatcgccgtcatcatgacccccacccgggagctggccctgcagatcaccaaggagtgcaagaagttcagcaagaccctgggcctgcgggtggtgtgtgtgtatggaggcaccggcatcagcgagcagattgctgagctgaagagaggagctgagatcatcgtgtgcaccccaggccgcatgattgacatgctggccgccaacagcggccgggtgaccaacctgcggcgggtgacctacgtggtgctggatgaagctgacaggatgtttgacatgggctttgagccccaggtgatgagaattgtggacaacgtgcggccagaccggcagacagtgatgttcagcgccaccttcccccgggccatggaggccctggcccggcgcatcctgagcaagcccatcgaggtgcaggtgggcggccgctctgtggtgtgcagtgatgtggagcagcaggtgattgtcatcgaggaggagaagaagttcctgaagctgctggagctgctgggccactaccaggagagcggcagcgtcatcatctttgtggacaagcaggagcacgcagatggcctgctgaaggacctgatgagggccagctacccctgcatgagcctgcacggcggcatcgaccagtatgaccgggacagcatcatcaatgacttcaagaatggcacctgcaagctgctggtggccacctctgtggccgcccggggcctggatgtgaagcacctgatcctggtggtgaactacagctgccccaaccactatgaagattatgtgcacagagctggccgcacaggccgggccggcaacaagggctacgcctacaccttcatcacagaggaccaggcccgctatgctggggacatcatcaaggccctggagctgtctggaacagctgtgcccccagacctggagaagctgtggagcgacttcaaggaccagcagaaggccgagggcaagatcatcaagaagagcagcggcttcagcggcaagggcttcaagtttgatgaaacagagcaggccctggccaatgaaaggaagaagctgcagaaggccgccctgggcctgcaggacagtgatgatgaagatgctgctgtggacattgatgagcagattgaatccatgttcaacagcaagaagagggtgaaggacatggccgcccctggcaccagctctgtgcctgcccccacagctggaaatgctgagaagctggagatcgccaagaggctggccctgcgcatcaatgcccagaagaacctgggcatcgagagccaggtggatgtgatgcagcaggccaccaatgccatcctgcggggcggcaccatcctggcccccaccgtgtctgccaagaccatcgccgagcagctggccgagaagatcaatgccaagctgaactacgtgcccctggagaagcaggaggaggagcggcaggacggcggccagaatgaaagcttcaagagatatgaggaggagctggagatcaatgacttcccccagacagcccgctggaaggtgaccagcaaggaggccctgcagaggatcagcgagtacagcgaggccgccatcaccatccggggcacctacttccccccaggcaaggagcccaaggagggggagaggaagatctacctggccattgaaagtgccaatgagctggccgtgcagaaggccaaggccgagatcaccaggctcatcaaggaggagctgatccggctgcagaacagctaccagcccaccaacaagggccgctacaaggtgctgtag

SEQ ID NO: 112886 - DNA, 3099 bp, Artificial Sequence
  derived and/or modified sequence
atgggccgggagagccggcactaccggaagcggagcgccagccgggggaggagtggctctcgctctcgcagccgttcccctagtgataagcgcagtaaaaggggcgatgacagacgcagtcgaagccgcgatcgtgataggaggagagaaagaagtagatcacgggacaagaggcgatctaggtctcgagacaggaagcgattgaggaggagcaggagtagagagcgcgaccggagcagagagcgaagaagatctcgttctagagaccgtcgacggagcagatctcggtcccggggaaggagatcccgcagtagtagtcctggaaacaagtctaagaaaaccgaaaaccgctcccgatctaaagagaaaaccgatggaggcgaatcatccaaggaaaaaaagaaggataaagacgacaaggaggacgagaaagagaaagacgcggggaattttgaccaaaataagctcgaagaggagatgcgaaaacggaaagagagggtcgaaaaatggagagaggaacagcgtaagaaggcgatggagaatattggcgagctgaaaaaggaaatcgaagagatgaagcagggcaagaagtggagtctggaagacgacgacgacgatgaggatgatccagcagaggctgagaaagaggggaacgagatggagggagaggagttggaccccctggatgcctatatggaggaagtgaaggaagaagtaaagaaatttaacatgaggtctgtgaagggcggtggcggtaatgaaaaaaagtcgggcccaaccgtgactaaagtggtcacagtggtgacgactaaaaaagcggtcgttgatagtgataagaaaaaaggggaactcatggaaaacgatcaagacgctatggaatatagcagcgaggaagaagaggttgacctgcagaccgctctgacaggctatcagaccaaacagaggaaacttctcgagcccgtggatcatggaaagatcgagtatgagcctttccgtaaaaatttttacgtggaagtccccgagctcgctaagatgtcgcaggaggaggttaatgttttccgtttggaaatggaaggaattactgttaaggggaaaggctgccctaagcctatcaaatcctgggttcagtgtggcattagcatgaagattctgaacagcctgaagaagcacggctatgagaaacccacgccgatccagacccaggccatccctgccatcatgtcaggacgcgatttgattgggatcgccaagaccggttccggcaagaccatcgcgtttttgctaccaatgtttagacatattatggatcagagatcccttgaagaaggcgaaggaccgatagccgtgatcatgacccccacacgtgagctggcgctgcagattactaaagagtgcaaaaagttttctaaaactctcggcctgagagttgtgtgcgtgtatggcggtaccggcataagcgagcagatcgcagagcttaagagaggtgccgagatcattgtgtgcacgcccggcagaatgatcgatatgctcgccgccaacagcggtcgcgtcaccaacctgagaagagtaacgtacgtagtcctcgatgaggctgatcggatgttcgacatgggttttgagccacaggtgatgagaatcgtcgacaatgtccgcccagatcggcagacagtcatgttctccgctacttttccgagggccatggaggcactggctcggcgtattctctccaaacccatcgaggtacaggttggcggcagaagcgtggtgtgttcagatgtggagcagcaagtaattgtgatcgaggaggagaagaagtttttgaaactcttggagttgctgggacattaccaggagagcggctcagtgattatctttgtggataagcaggaacacgccgatggactacttaaagacctaatgagggcttcatacccctgcatgtcactgcatggaggaatcgatcagtatgatagagactccattatcaatgatttcaaaaatggaacctgcaaactgttggtcgccacttccgtggcagctcgggggctggacgtgaagcacctgatccttgtagtcaattatagctgcccaaatcactatgaggactatgtccatagagctggacgaactgggagagctggaaacaaagggtacgcatacacatttatcaccgaggatcaggccagatacgcaggcgacattataaaggcccttgagctgtccggtaccgctgtacccccagatctggagaagctttggtccgactttaaagatcagcaaaaggctgagggaaagatcattaagaaaagctcgggtttttctgggaagggctttaagtttgatgagaccgagcaagccttggcgaacgaaagaaagaaactccagaaggccgccctggggctgcaagattcagatgacgaagatgcagccgtcgacatcgacgagcaaatcgagtcaatgtttaactcgaaaaagcgtgtgaaagatatggctgcaccaggtactagctccgtccccgccccgaccgcaggtaacgccgagaagctggaaatcgccaagcggctcgcccttcgcatcaacgcccaaaagaacctggggattgaatctcaggtggacgtcatgcaacaagctaccaacgcaattctccgaggaggcaccattcttgcaccaacggtcagcgccaaaaccatcgcagagcagcttgctgagaaaattaatgcaaaactgaactacgtccccctggaaaaacaagaggaggagcgccaggacggggggcagaatgaatcattcaagcggtatgaggaggagcttgaaatcaatgactttcctcagactgcccgatggaaggtcacatccaaggaggccctgcagcgcatttcagagtattctgaagcagccattaccatacgggggacttatttccctcccggaaaagaacctaaggagggggagagaaaaatctacttggcaattgagtcagcgaacgaactcgccgtgcagaaagccaaagctgaaatcacgcgtcttatcaaggaggagcttatccgactgcagaacagttatcagcccacaaacaaaggaaggtataaggtgttatag

SEQ ID NO: 112887 - DNA, 3099 bp, Artificial Sequence
  derived and/or modified sequence
atgggacgcgagagtaggcactatcgcaagaggtcagcatctcggggacgctcaggaagcaggagtcggtcacggagtccttcagacaagcgaagcaagaggggtgatgaccgacggtctaggtccagggacagagaccgccgaagggagcggagtcgaagccgtgacaagaggcgctctaggtcacgtgaccgcaagaggctgcgcaggtctaggagcagagaacgagacaggagtcgagagcgcagaaggtcaaggagccgggatcgaagacgcagccggagtagaagcagaggtagacggtcacgatcttcctcccctgggaacaagtccaagaagaccgaaaacagatcccgcagtaaggagaagactgacggaggcgaatccagtaaagagaaaaagaaggacaaagacgacaaagaggatgaaaaggaaaaggatgccggaaatttcgaccagaataaactagaggaagagatgcgaaaacgaaaagagcgggtggagaaatggagagaggaacaaaggaagaaagcaatggaaaacatcggagagctgaagaaagagattgaggagatgaagcagggaaaaaaatggagtttggaagacgacgacgatgatgaggacgatcccgctgaagcggagaaggaggggaacgaaatggaaggagaagagttggacccccttgatgcatatatggaggaggtaaaggaggaagttaagaagttcaatatgagatctgtgaagggaggcggaggcaatgaaaagaaaagtggccctacagtcaccaaggtagtcactgtggtcaccacaaagaaagccgtggtggattctgataagaaaaaaggagagctgatggagaacgatcaggatgccatggagtattctagcgaagaggaagaagtagacctccagacagctctgaccgggtaccagactaaacagaggaagctgctagaacccgttgatcatggcaagatcgagtatgaaccttttcggaagaatttctatgtcgaagtgcctgagctcgcgaaaatgtcacaggaggaggtaaacgttttccgacttgagatggaggggatcaccgtcaaggggaaaggatgtccaaaacccataaagtcctgggtgcaatgcggaatctctatgaaaattctgaacagcctgaaaaaacacggctacgagaaaccgacccccattcagactcaggctattccagccatcatgagtggcagggacctcattggtatcgccaaaacagggtccggcaagaccatcgcctttctcttgcctatgtttaggcacattatggatcagcgctccctcgaggaaggtgagggccctatcgccgttataatgactcccaccagagaacttgcccttcagatcaccaaagaatgtaaaaagttcagtaagactctaggtctgagagtcgtctgtgtttacgggggaaccggtataagtgaacagatcgccgagttaaagagaggggcagagattatagtctgtaccccagggcgaatgatcgatatgctggcagccaatagcggccgagtgaccaatttgcggagggtgacctacgtagtgttggacgaggccgacaggatgtttgatatgggctttgagccccaggtgatgcggatcgtggataacgtccgccctgatagacagaccgtgatgttttcggctacatttcctcgagctatggaggcgctcgccagaagaatactgagcaagcctatagaggtgcaggttgggggacgcagcgtggtgtgcagtgacgtcgaacagcaggtgattgtgatcgaggaggaaaaaaaatttctgaagcttctcgaactcctggggcactaccaggagagcggttcagtcattatctttgtagataagcaagaacatgccgacggtctactgaaagacctcatgcgggcttcctatccttgtatgagtctgcacggtggtatcgatcagtacgaccgagattctattatcaatgatttcaaaaacgggacgtgcaaactcctcgttgctactagcgtggccgcaagggggctggatgtaaaacatctcatactagtggttaattattcatgccctaatcactacgaggattatgtccaccgcgcaggacggacagggagggctgggaataagggctatgcctatacctttatcaccgaggaccaggctaggtatgctggagacatcataaaagccctcgagttgtctggaaccgccgtgcctcctgatctggaaaaactatggagcgattttaaggatcagcagaaagcagaaggcaagatcatcaaaaaaagctcaggtttcagcggaaaaggtttcaaatttgacgaaaccgagcaagccctcgctaacgagagaaaaaaactccagaaggccgctctggggctccaggactcagacgacgaggacgctgccgtagacattgatgagcagatagagtccatgttcaatagcaagaagcgtgttaaagatatggcagcccctgggacaagtagcgtcccagcccctaccgcaggtaatgctgagaaattggagatcgcgaagagactcgccctccgcatcaacgcacagaagaatctgggaattgagtctcaggtggacgttatgcagcaggcaactaacgccatccttcgtggtggaaccattctcgcgcctaccgtgagcgctaaaacgattgctgaacagctagccgagaaaattaatgccaagctaaattacgtcccactggagaagcaggaagaggagcggcaggacggcggacagaacgaatccttcaagaggtatgaggaagagctagaaatcaatgattttccacaaacagccagatggaaggtcactagcaaagaagcactgcagcgaatatcagagtactcggaggctgcaattacaatcaggggaacgtacttcccaccagggaaagagcccaaggagggcgagaggaaaatctaccttgctatagaaagcgctaacgagctggctgttcaaaaagccaaagcagagattacccgcctgattaaggaagaactcatcaggttgcagaattcctaccaacccaccaataaaggtaggtacaaggtcctgtag

SEQ ID NO: 112888 - DNA, 5689 bp, Artificial Sequence
  derived and/or modified sequence
gttttcgttggccgcgctgggatggccgccacagctgtaggtgctgctagtgtttagcgctggtctttgccgggcgttgagggcagctcagcctccttgtttgtccggttcgcctgtgcgtggtactcaagggcaccagtattcccgcggtcggcagcatgggtcgggagtcacgccactatcgaaaacgatcggcatcccggggtcgctctggaagtcggtctagaagtcgctcaccctcagacaaaagaagtaaacgtggagatgacagacggtctagaagtagagatagagataggaggagagagaggtctcgtagcagggataaaagaagatctcggtcaagggacaggaagcgtctgagacgttccagaagtagagagagagacagaagccgagagcgaagaagatctcgaagtagagacaggagacgctcaaggagtagaagccggggccggcgatcccgatcctccagtcctggaaataaaagcaagaaaactgagaatagatctaggtccaaagagaaaactgatggtggggaaagttctaaagagaagaaaaaagacaaagatgacaaggaggatgaaaaagaaaaagatgctggcaactttgaccagaataagctggaagaagaaatgagaaagcgaaaagaaagagtagaaaaatggcgagaagagcaacgtaaaaaggctatggaaaacataggagaactgaaaaaggaaatcgaagagatgaaacaagggaaaaagtggagtttagaggacgatgatgatgacgaagatgatcctgcagaagctgaaaaggagggaaatgaaatggagggtgaggagttagatccattagatgcttacatggaagaagtgaaagaggaagtaaaaaaatttaacatgagaagtgtaaaaggtggtgggggaaatgaaaagaagtctgggccaacggtcacaaaagttgtcactgttgtgacaaccaaaaaagcagttgtggattctgataagaagaaaggtgagctgatggagaatgaccaggatgccatggagtattcttcagaggaggaagaagttgatcttcagacagcccttacagggtatcaaacaaaacagcgaaagcttctagaaccagttgatcatggaaaaattgagtatgagccatttaggaaaaacttctatgttgaagttccagaactagcaaaaatgtctcaagaagaggtaaatgtgtttcgattggaaatggagggcattacagttaaaggaaaaggttgccccaaaccaattaaatcctgggtccagtgtggaatttccatgaagatcttaaattccctcaagaagcatggctatgaaaagcccacgcccatccaaacccaagctattcctgctataatgtctggacgagatttgattggcattgccaaaacaggaagtggaaagaccattgcttttctgttgcccatgtttagacacatcatggatcagaggtcattagaggaaggagaggggccaatagctgtcatcatgactccaactcgagaactggctttacagattactaaagagtgtaagaagttttccaagactttgggacttagagtggtctgtgtttacggaggaacaggaatcagtgagcagattgctgagctgaaaagaggtgctgaaattattgtttgcacacctggtcgaatgattgacatgttagccgctaacagtggtcgggtcacaaatcttcgaagagtgacatatgttgttttagatgaagcagacagaatgtttgacatgggttttgaaccccaggtcatgcgcatcgtggataatgttcgtcctgatcgacagacggttatgttttcagctactttccccagagctatggaggctttggctcgcaggatcctcagtaaacctattgaagtacaagttggaggcaggagtgtggtttgctcagatgtggagcaacaagtgattgtgattgaagaagaaaagaaattcttgaagttacttgagcttctaggccattatcaagagtcaggatctgtcattatatttgtggataagcaggaacatgctgatggtcttcttaaggatttaatgagagcatcttatccttgcatgtctcttcatggaggcattgatcaatatgacagagatagcatcataaatgactttaagaatgggacctgcaaacttcttgtggctacctctgttgctgcccgaggtctagatgtgaaacatctgattcttgtagtaaattatagctgccccaaccattatgaggattatgtacacagagcagggcggactggaagagcaggaaacaagggttatgcttatacttttatcacagaggatcaagctcgctatgctggtgacataattaaagctcttgaattgtcagggactgcagtacctcctgatttagagaaactgtggagtgatttcaaagatcagcagaaagctgaggggaaaataattaaaaagagtagtgggttctctggtaagggattcaagtttgatgaaacagaacaagctttggctaatgagaggaagaagttacaaaaagcagctcttggtctacaagattcagatgatgaggatgctgcagttgatattgatgagcaaattgaaagcatgtttaattcaaagaagagagtaaaggatatggctgctcctggaacatcaagtgttcctgctccaactgcaggaaatgctgagaaattagaaattgctaagagattggctcttagaatcaatgcccagaagaatttgggcatcgagtctcaggtagatgtgatgcagcaggccaccaatgcaattcttaggggtggcaccattctggctcccactgtttctgcaaaaaccattgcagaacaacttgctgaaaagatcaatgccaagctcaattatgtgccgttagagaaacaagaagaagagagacaggatggtggacagaatgaatcttttaagagatatgaagaagaattagagatcaatgacttcccacagactgctaggtggaaagttacctctaaggaagctctgcagagaatcagtgaatactctgaagccgcaattacaatcagaggaacctacttccctcctggcaaagaacccaaggaaggcgagcggaagatttacttggcaattgaaagtgccaatgaactggctgtgcagaaagcaaaggcagaaatcaccaggctcataaaagaagagctgatccggctgcaaaattcataccaaccaacaaataaaggaagatacaaagtcttatagacatccggaaaaaagatttttacctgtgctggtctatgatgtatgtggcagttgctgtctgcagtttacaatgtattgtaaatgaagattttttaaattctatcttgctgattttttttaaatataagaaactggtacttggtaaagaaatctgtccgtaagtacccccacaatcagtcaaactatatttaaagccagcctgttttcagagtatgatgtcctttaatgtaaactcaaatatcaatattttaaatgtccggataatattctagaggtttaaaaaatggaaatatttgaactttctattgaagacaataaagtacacaagtcgttaaggggctattcactttatcctgtactttcaatgaaattgtgatcatttcctaagaaaaggtaaaattcactatcatattttgtgtccccaccttgatgttacatgactctggaacaatatgaactggatttaagaatgttataatagaagtcttacaaaatgggttgagagtttttgtttcaatttttatcatcataaatgggcaaaaagtagttggactaatttcggtttttatacaagtaaagatttaatagtataaggatttttttgcatttctttacactgagtgtaaaactctacaaagagttatagtatttactactttgaggtttccctcacaacttctggctccatacctagcccctcttttataatcttccttaaaagaaagagtgtagcctataaatactaaatatgataccttttccttctagaaagtgtttatttatatatctatacatgttgtatgtacaaatatcctactacttttaatctgatttttcttcaggattattgagtaggttgtgaattttctttcttaaaaattgtaaaacataatggtacccaagttttaaacttagatgtgcttcatcttagtgaaatttaattcacaaggaatcataaattgtgtttttgaggctgggcgcagtgactcacacctgtatcccagcaatttgggaggccgaggtgggcagatcacttgaggtcaggagttcaagactagcctggtcaacatggtgaaaccctgtctctactaaaaatacaaaaattagtcggcatggtggtgggtggctgtaatcccagctactcaggaggctgaggcagaagaatctgagccaagataacaccattgcactccagcctgggcgacagagtgagactatctcaaaaataaataaataaataaataaatagtatttttgagccttcaagatacagttcctgaatattctaatttaaattgttataattggattacctaatattcttttcaagactcctgatgtattaacttcatgttattgtcacttttcaaaaaaggaatttttttcaggagttaaataaagtcagtcttttatatccaagggtttcaaacccacagattaaaccaaccacagatcaaaaatagaaaaaaaaaaaaaaagaaaaaaagaatgtaaaattttaaaaatacagtttaacagctgtaaaagttttactataacatttacattgtgttaggtattttaagtaatttaaaggttacagtatacaggcggttaaagtatacaggaggatgtgcatcggttatatgcatatagcaagccatttcatataagaggcttgaacatccatggattttggtatagaggaggggtttaaggggtgtcctgcaatcagtccccctctcataccaaaggatgactgtatatttcttaaatgaagagactttcattctttaaatattattgacttacagtttaaaaataaataaataaaagcatactatagttgtaaaaacaaataattttaatagtatattcagtggctgaagtgatagggagtattaatcattatttcttcagtataaagttattcttcctgaaaaagtaagatatacctgggaaatattcttggatccttcacacatccacttaatttcttgaaggaagaaaacagacaaaagacatgtaacaacagaaacaaataaaccacttactgtaaaatttcagaaattgtgggctcattccctccctctagtttatttatttgctcatctttatcacctaatggtagtttgttttctttggtagagtatatggcagtcccacatcgatgataattggtgctcccttcatccaactggatcactttgagattcagttttacatcattttagcattttgtttgtatatcagttgtgatgagccactgataaaattttgttctaaaatgaaacatattactttgttagtacattttttagtgtcacactgacttttaaaatttgaatgatatatagactttgtttttttaatgcaatatgaatatttgctcatgttttctaaattccttataaaataaaattaattcgaattcaatctgcactttcttaaaa

SEQ ID NO: 112889 - DNA, 3099 bp, Artificial Sequence
  derived and/or modified sequence
atgggcagagagagcagacactacagaaagagaagcgccagcagaggcagaagcggcagcagaagcagaagcagaagccccagcgacaagagaagcaagagaggcgacgacagaagaagcagaagcagagacagagacagaagaagagagagaagcagaagcagagacaagagaagaagcagaagcagagacagaaagagactgagaagaagcagaagcagagagagagacagaagcagagagagaagaagaagcagaagcagagacagaagaagaagcagaagcagaagcagaggcagaagaagcagaagcagcagccccggcaacaagagcaagaagaccgagaacagaagcagaagcaaggagaagaccgacggcggcgagagcagcaaggagaagaagaaggacaaggacgacaaggaggacgagaaggagaaggacgccggcaacttcgaccagaacaagctggaggaggagatgagaaagagaaaggagagagtggagaagtggagagaggagcagagaaagaaggccatggagaacatcggcgagctgaagaaggagatcgaggagatgaagcagggcaagaagtggagcctggaggacgacgacgacgacgaggacgaccccgccgaggccgagaaggagggcaacgagatggagggcgaggagctggaccccctggacgcctacatggaggaggtgaaggaggaggtgaagaagttcaacatgagaagcgtgaagggcggcggcggcaacgagaagaagagcggccccaccgtgaccaaggtggtgaccgtggtgaccaccaagaaggccgtggtggacagcgacaagaagaagggcgagctgatggagaacgaccaggacgccatggagtacagcagcgaggaggaggaggtggacctgcagaccgccctgaccggctaccagaccaagcagagaaagctgctggagcccgtggaccacggcaagatcgagtacgagcccttcagaaagaacttctacgtggaggtgcccgagctggccaagatgagccaggaggaggtgaacgtgttcagactggagatggagggcatcaccgtgaagggcaagggctgccccaagcccatcaagagctgggtgcagtgcggcatcagcatgaagatcctgaacagcctgaagaagcacggctacgagaagcccacccccatccagacccaggccatccccgccatcatgagcggcagagacctgatcggcatcgccaagaccggcagcggcaagaccatcgccttcctgctgcccatgttcagacacatcatggaccagagaagcctggaggagggcgagggccccatcgccgtgatcatgacccccaccagagagctggccctgcagatcaccaaggagtgcaagaagttcagcaagaccctgggcctgagagtggtgtgcgtgtacggcggcaccggcatcagcgagcagatcgccgagctgaagagaggcgccgagatcatcgtgtgcacccccggcagaatgatcgacatgctggccgccaacagcggcagagtgaccaacctgagaagagtgacctacgtggtgctggacgaggccgacagaatgttcgacatgggcttcgagccccaggtgatgagaatcgtggacaacgtgagacccgacagacagaccgtgatgttcagcgccaccttccccagagccatggaggccctggccagaagaatcctgagcaagcccatcgaggtgcaggtgggcggcagaagcgtggtgtgcagcgacgtggagcagcaggtgatcgtgatcgaggaggagaagaagttcctgaagctgctggagctgctgggccactaccaggagagcggcagcgtgatcatcttcgtggacaagcaggagcacgccgacggcctgctgaaggacctgatgagagccagctacccctgcatgagcctgcacggcggcatcgaccagtacgacagagacagcatcatcaacgacttcaagaacggcacctgcaagctgctggtggccaccagcgtggccgccagaggcctggacgtgaagcacctgatcctggtggtgaactacagctgccccaaccactacgaggactacgtgcacagagccggcagaaccggcagagccggcaacaagggctacgcctacaccttcatcaccgaggaccaggccagatacgccggcgacatcatcaaggccctggagctgagcggcaccgccgtgccccccgacctggagaagctgtggagcgacttcaaggaccagcagaaggccgagggcaagatcatcaagaagagcagcggcttcagcggcaagggcttcaagttcgacgagaccgagcaggccctggccaacgagagaaagaagctgcagaaggccgccctgggcctgcaggacagcgacgacgaggacgccgccgtggacatcgacgagcagatcgagagcatgttcaacagcaagaagagagtgaaggacatggccgcccccggcaccagcagcgtgcccgcccccaccgccggcaacgccgagaagctggagatcgccaagagactggccctgagaatcaacgcccagaagaacctgggcatcgagagccaggtggacgtgatgcagcaggccaccaacgccatcctgagaggcggcaccatcctggcccccaccgtgagcgccaagaccatcgccgagcagctggccgagaagatcaacgccaagctgaactacgtgcccctggagaagcaggaggaggagagacaggacggcggccagaacgagagcttcaagagatacgaggaggagctggagatcaacgacttcccccagaccgccagatggaaggtgaccagcaaggaggccctgcagagaatcagcgagtacagcgaggccgccatcaccatcagaggcacctacttcccccccggcaaggagcccaaggagggcgagagaaagatctacctggccatcgagagcgccaacgagctggccgtgcagaaggccaaggccgagatcaccagactgatcaaggaggagctgatcagactgcagaacagctaccagcccaccaacaagggcagatacaaggtgctgtag

SEQ ID NO: 112890 - protein, 1177 aa, Artificial Sequence
  derived and/or modified sequence
MRSRNQGGESASDGHISCPKPSIIGNAGEKSLSEDAKKKKKSNRKEDDVMASGTVKRHLKTSGECERKTKKSLELSKEDLIQLLSIMEGELQAREDVIHMLKTEKTKPEVLEAHYGSAEPEKVLRVLHRDAILAQEKSIGEDVYEKPISELDRLEEKQKETYRRMLEQLLLAEKCHRRTVYELENEKHKHTDYMNKSDDFTNLLEQERERLKKLLEQEKAYQARKEKENAKRLNKLRDELVKLKSFALMLVDERQMHIEQLGLQSQKVQDLTQKLREEEEKLKAITSKSKEDRQKLLKLEVDFEHKASRFSQEHEEMNAKLANQESHNRQLRLKLVGLTQRIEELEETNKNLQKAEEELQELRDKIAKGECGNSSLMAEVENLRKRVLEMEGKDEEITKTESQCRELRKKLQEEEHHSKELRLEVEKLQKRMSELEKLEEAFSKSKSECTQLHLNLEKEKNLTKDLLNELEVVKSRVKELECSESRLEKAELSLKDDLTKLKSFTVMLVDERKNMMEKIKQEERKVDGLNKNFKVEQGKVMDVTEKLIEESKKLLKLKSEMEEKVYNLTRERDELIGKLKSEEEKSSELSCSVDLLKKRLDGIEEVEREITRGRSRKGSELTCPEDNKIKELTLEIERLKKRLQQLEVVEGDLMKTEDEYDQLEQKFRTEQDKANFLSQQLEEIKHQIAKNKAIEKGEVVSQEAELRHRFRLEEAKSRDLKAEVQALKEKIHELMNKEDQLSQLQVDYSVLQQRFMEEENKNKNMGQEVLNLTKELELSKRYSRALRPSVNGRRMVDVPVTSTGVQTDAVSGEAAEEETPAVFIRKSFQEENHIMSNLRQVGLKKPVERSSVLDRYPPAANELTMRKSWIPWMRKRENGPSITQEKGPRTNSSPGHPGEVVLSPKQGQPLHIRVTPDHENSTATLEITSPTSEEFFSSTTVIPTLGNQKPRITIIPSPNVMPQKQKSGDTTLGPERAMSPVTITTFSREKTPESGRGAFADRPTSPIQIMTVSTSAAPAEIAVSPESQEMPMGRTILKVTPEKQTVPTPVRKYNSNANIITTEDNKIHIHLGSQFKRSPGTSGEGVSPVITVRPVNVTAEKEVSTGTVLRSPRNHLSSRPGASKVTSTITITPVTTSSARGTQSVSGQDGSSQRPTPTRIPMSKESIIIHQLRMNSR

SEQ ID NO: 112891 - DNA, 3534 bp, Artificial Sequence
  derived and/or modified sequence
atgagaagcagaaaccagggcggcgagagcgccagcgacggccacatcagctgccccaagcccagcatcatcggcaacgccggcgagaagagcctgagcgaggacgccaagaagaagaagaagagcaacagaaaggaggacgacgtgatggccagcggcaccgtgaagagacacctgaagaccagcggcgagtgcgagagaaagaccaagaagagcctggagctgagcaaggaggacctgatccagctgctgagcatcatggagggcgagctgcaggccagagaggacgtgatccacatgctgaagaccgagaagaccaagcccgaggtgctggaggcccactacggcagcgccgagcccgagaaggtgctgagagtgctgcacagagacgccatcctggcccaggagaagagcatcggcgaggacgtgtacgagaagcccatcagcgagctggacagactggaggagaagcagaaggagacctacagaagaatgctggagcagctgctgctggccgagaagtgccacagaagaaccgtgtacgagctggagaacgagaagcacaagcacaccgactacatgaacaagagcgacgacttcaccaacctgctggagcaggagagagagagactgaagaagctgctggagcaggagaaggcctaccaggccagaaaggagaaggagaacgccaagagactgaacaagctgagagacgagctggtgaagctgaagagcttcgccctgatgctggtggacgagagacagatgcacatcgagcagctgggcctgcagagccagaaggtgcaggacctgacccagaagctgagagaggaggaggagaagctgaaggccatcaccagcaagagcaaggaggacagacagaagctgctgaagctggaggtggacttcgagcacaaggccagcagattcagccaggagcacgaggagatgaacgccaagctggccaaccaggagagccacaacagacagctgagactgaagctggtgggcctgacccagagaatcgaggagctggaggagaccaacaagaacctgcagaaggccgaggaggagctgcaggagctgagagacaagatcgccaagggcgagtgcggcaacagcagcctgatggccgaggtggagaacctgagaaagagagtgctggagatggagggcaaggacgaggagatcaccaagaccgagagccagtgcagagagctgagaaagaagctgcaggaggaggagcaccacagcaaggagctgagactggaggtggagaagctgcagaagagaatgagcgagctggagaagctggaggaggccttcagcaagagcaagagcgagtgcacccagctgcacctgaacctggagaaggagaagaacctgaccaaggacctgctgaacgagctggaggtggtgaagagcagagtgaaggagctggagtgcagcgagagcagactggagaaggccgagctgagcctgaaggacgacctgaccaagctgaagagcttcaccgtgatgctggtggacgagagaaagaacatgatggagaagatcaagcaggaggagagaaaggtggacggcctgaacaagaacttcaaggtggagcagggcaaggtgatggacgtgaccgagaagctgatcgaggagagcaagaagctgctgaagctgaagagcgagatggaggagaaggtgtacaacctgaccagagagagagacgagctgatcggcaagctgaagagcgaggaggagaagagcagcgagctgagctgcagcgtggacctgctgaagaagagactggacggcatcgaggaggtggagagagagatcaccagaggcagaagcagaaagggcagcgagctgacctgccccgaggacaacaagatcaaggagctgaccctggagatcgagagactgaagaagagactgcagcagctggaggtggtggagggcgacctgatgaagaccgaggacgagtacgaccagctggagcagaagttcagaaccgagcaggacaaggccaacttcctgagccagcagctggaggagatcaagcaccagatcgccaagaacaaggccatcgagaagggcgaggtggtgagccaggaggccgagctgagacacagattcagactggaggaggccaagagcagagacctgaaggccgaggtgcaggccctgaaggagaagatccacgagctgatgaacaaggaggaccagctgagccagctgcaggtggactacagcgtgctgcagcagagattcatggaggaggagaacaagaacaagaacatgggccaggaggtgctgaacctgaccaaggagctggagctgagcaagagatacagcagagccctgagacccagcgtgaacggcagaagaatggtggacgtgcccgtgaccagcaccggcgtgcagaccgacgccgtgagcggcgaggccgccgaggaggagacccccgccgtgttcatcagaaagagcttccaggaggagaaccacatcatgagcaacctgagacaggtgggcctgaagaagcccgtggagagaagcagcgtgctggacagatacccccccgccgccaacgagctgaccatgagaaagagctggatcccctggatgagaaagagagagaacggccccagcatcacccaggagaagggccccagaaccaacagcagccccggccaccccggcgaggtggtgctgagccccaagcagggccagcccctgcacatcagagtgacccccgaccacgagaacagcaccgccaccctggagatcaccagccccaccagcgaggagttcttcagcagcaccaccgtgatccccaccctgggcaaccagaagcccagaatcaccatcatccccagccccaacgtgatgccccagaagcagaagagcggcgacaccaccctgggccccgagagagccatgagccccgtgaccatcaccaccttcagcagagagaagacccccgagagcggcagaggcgccttcgccgacagacccaccagccccatccagatcatgaccgtgagcaccagcgccgcccccgccgagatcgccgtgagccccgagagccaggagatgcccatgggcagaaccatcctgaaggtgacccccgagaagcagaccgtgcccacccccgtgagaaagtacaacagcaacgccaacatcatcaccaccgaggacaacaagatccacatccacctgggcagccagttcaagagaagccccggcaccagcggcgagggcgtgagccccgtgatcaccgtgagacccgtgaacgtgaccgccgagaaggaggtgagcaccggcaccgtgctgagaagccccagaaaccacctgagcagcagacccggcgccagcaaggtgaccagcaccatcaccatcacccccgtgaccaccagcagcgccagaggcacccagagcgtgagcggccaggacggcagcagccagagacccacccccaccagaatccccatgagcaaggagagcatcatcatccaccagctgagaatgaacagcagatag

SEQ ID NO: 112892 - DNA, 3534 bp, Artificial Sequence
  derived and/or modified sequence
atgcggtccagaaatcagggtggcgagtcagcttccgatggccatatctcatgccccaaaccctctatcatcggaaatgcaggtgaaaagtccctgagcgaagacgctaagaagaaaaaaaaaagcaatcgaaaggaggacgatgtgatggccagcggaacagtgaaaagacatttgaaaacctcaggcgagtgtgagcgaaagacaaagaagtctctggagctgtctaaggaagatctgattcagctgctatccattatggagggcgaactgcaggctcgtgaagacgttattcacatgcttaagacggaaaagaccaaacccgaagtgctcgaggcccattacggctctgcggagcctgaaaaagtactgcgggtgttgcacagagatgccatccttgctcaggagaaatcaatcggagaggacgtatacgagaagcctatatccgaactcgatcgcttggaagaaaagcaaaaggagacataccgaaggatgttagagcaactgttgctcgcagaaaagtgccatagacgaacagtgtatgagctggagaacgagaaacataagcacaccgattacatgaacaaaagtgatgacttcactaatctactggagcaagagcgagagagactcaagaaactcctggaacaggaaaaagcctaccaagctagaaaagagaaagaaaacgcaaagcgcctcaacaagctaagagatgaactggtaaagctcaagtcctttgccctgatgcttgtcgacgaaaggcaaatgcatatcgagcagctcgggctgcagtcgcagaaggtgcaggatttgacacaaaagctgagggaagaggaagagaaactcaaggccattaccagcaagagcaaagaggacaggcaaaaattgttgaaactggaggtagactttgagcataaggcctcacgattcagtcaggaacacgaggaaatgaatgcgaaactggccaaccaagagagccataacagacagttgcggctgaaactggtaggcttgacccagagaatcgaagaactggaggaaaccaacaaaaaccttcagaaggcagaggaggagctgcaagaactgcgggataaaattgcgaagggcgagtgtggcaatagttccttgatggccgaggttgagaatctgaggaagagagtcctcgagatggagggcaaggatgaagaaatcacaaagaccgaatcccagtgtcgcgagctgaggaaaaagcttcaggaggaggagcaccatagtaaagaattgagacttgaggtggaaaagctgcagaagcgaatgagtgagctcgagaaactggaggaggccttttccaagtctaagtcagaatgcacccaactgcacttaaatctcgagaaagagaaaaatctgacaaaagacctgttaaatgaactggaggtggtcaaatcgcgggtgaaggagctggagtgtagcgagtccaggctcgaaaaagcagaactttctctcaaggacgatttgactaaactgaaaagtttcactgttatgctagtggatgaacgcaagaacatgatggaaaagatcaaacaggaagagcgcaaggtagatggtctgaacaagaatttcaaggtcgagcaggggaaggtgatggacgtcaccgagaagctgattgaggaatcaaaaaaactgctcaagcttaaatctgagatggaggagaaggtttataatctcacccgggaaagggatgagttgatcgggaaactgaagtctgaggaggaaaagtcatccgaattgagctgctcagtggacctcttaaagaaacgtctggacgggattgaagaagtggagcgggagataactagaggtaggtccagaaagggaagtgagctgacttgccctgaagacaacaagatcaaagagctgacgcttgaaattgaacggcttaagaagagactacagcagctcgaagtcgtggagggggacttaatgaagactgaagacgagtatgaccagctggaacaaaaattccggaccgaacaggataaggcaaactttttgtctcagcaattggaggaaattaaacaccagatagcgaagaacaaagccatagagaaaggagaggtcgtaagccaggaggccgaacttcggcacaggtttagactcgaggaggcaaaatctcgcgacctgaaggcagaggtgcaggccctgaaggaaaagattcacgaactgatgaataaagaggaccaactgtctcagctgcaggtcgattattcagtgctccagcagcggtttatggaagaggagaataagaacaaaaacatgggacaggaagttctgaacctcacaaaagagctcgaactgagcaagaggtactcccgtgccctgagaccatccgtcaatggacggcggatggtcgatgtaccagtgacctccaccggagtacagactgatgcggtgagcggtgaggcggctgaggaggaaacgccagctgtgttcatccgcaagtcctttcaggaggagaaccacatcatgagcaacctcaggcaggtgggcctgaagaagcctgtggagcggagctcagtgttggataggtatccaccggccgctaatgagctcaccatgaggaagagctggatcccatggatgcggaagagggagaatggacctagcatcacccaagagaagggtccgaggactaattcctcacccgggcaccccggagaggttgtcttaagtccaaagcagggacagccactacacattagggtgactcctgaccacgaaaactccactgcgactcttgagatcacttccccaaccagtgaagaatttttctccagtacaactgtaattccaactctaggaaatcagaagccaagaatcaccatcattccatccccgaacgttatgcctcagaagcaaaagtcgggtgataccaccttgggccccgaaagagccatgagccctgtgactattactacattcagccgcgaaaagacacctgagtccgggcgcggcgcatttgctgaccggccaacatctcccattcagatcatgacggtcagtacttcagctgcccccgccgaaatcgccgtctcaccagaatcacaagaaatgcctatggggcgcaccatccttaaggttacgcccgagaagcagactgtgccaacacccgttcgaaagtacaactctaacgccaatattatcaccactgaggataacaaaatccatatccacttggggtcacagttcaagcgcagcccgggaacatcaggcgagggagtctctcccgtgattactgtgcggcctgttaacgttaccgcagaaaaggaagtatccactggtaccgtgctgaggtctcccaggaatcatctgtcgtcacggccaggcgcatctaaggtgacctcaaccatcaccatcacccccgtcactaccagctcagctaggggcactcaatcagtgtcaggtcaggacggcagttcgcagagacccactcccactagaattccgatgtcgaaggagtccattatcatccaccaactgcgcatgaactcaagatag

SEQ ID NO: 112893 - DNA, 3907 bp, Artificial Sequence
  derived and/or modified sequence
agtgttgtgaagggagcagaagaggagaaacctaatctccgaacccaacaacacctagcaacagtagaaaaaacttttaaacaaaagtctgggtgggagatatacaacaacttccaatttctgctgatcgggatttcagggagaagaagctgctttccctcctctctactctgtttcctgcatgacttcagctattggctggtcctgggaaagaaagtgggaaaagctttttcctctgtattcttttgggctggatagtttttgagaactcgaatctgtcttgggctgtgagacaagccactgggttcttcaaaggataaactacctacatagaggacatacctttggttaaaggagctgccgtcaggtgggaatgagatctcgaaaccaaggtggtgaaagtgcatctgatgggcatatctcctgtcccaagccctccatcatcggcaatgctggtgaaaaaagtctctcagaagatgcaaaaaagaagaagaaatcaaataggaaggaggatgatgtcatggcctcaggaactgtcaaacgacacctaaaaacatctggagaatgtgaacgaaaaactaagaaatccctggagttatccaaagaagacctcatccaactactcagtataatggaaggggagttgcaggccagagaagatgtgatccacatgctgaagacagagaaaaccaagcctgaggttctggaggctcattacgggtctgcggagccagagaaagtgctgcgggtcctgcaccgagatgccattcttgcccaggagaaatccataggagaagatgtctatgagaaaccgatttcagagctggacagacttgaggaaaaacagaaagaaacctaccggcgcatgctagagcagctgttgctggccgagaagtgtcataggcgcaccgtatacgagttagagaacgagaagcataaacacactgactacatgaacaagagcgacgacttcaccaacctgctggagcaggagcgggagaggttaaaaaagctccttgaacaagaaaaggcttatcaagcccgcaaagaaaaggaaaatgctaaacgactcaataaactaagagatgagcttgttaaactcaaatcctttgcactcatgctggtggatgaaagacaaatgcacattgaacaacttggcctgcaaagccagaaagtacaggatcttactcagaagctgagggaagaagaagagaagctcaaagccattacttccaaatccaaagaagacagacagaaattgctcaagttagaagtggactttgaacacaaggcttcgaggttttctcaagagcatgaagagatgaacgctaaactggctaatcaagagtctcacaataggcaacttagactcaagctggttggcttaacccaaagaatcgaggagctagaagagaccaacaaaaatctgcagaaggcagaggaagaacttcaagaattaagagataaaattgccaaaggagaatgtggaaactctagcctcatggcagaagtggaaaatcttcgaaagcgtgtgcttgaaatggaaggtaaagatgaggagatcactaaaactgaatcccagtgtagggaattgaggaagaagctgcaagaggaagaacaccatagtaaggagctcagacttgaagttgagaagctacagaagagaatgtctgaactagagaaattggaagaagcatttagcaagagtaaatctgagtgcacccagctacatttaaatctggagaaagaaaagaacttaaccaaagacctgctaaatgaattggaggtggtcaagagtcgagttaaagaattggaatgttctgaaagtagattggaaaaggctgaattaagcctaaaagatgatcttaccaagttgaagtcatttaccgtgatgctggttgatgaaaggaaaaatatgatggaaaaaataaaacaagaagagagaaaagtggatggactcaataaaaattttaaggtggaacaaggaaaagttatggatgtaactgaaaaactaattgaagaaagtaagaaacttttaaaactaaaatctgaaatggaggaaaaagtatacaacttgacaagagaaagagatgagttgataggcaaattgaaaagtgaagaagaaaaatcctctgaattaagctgcagtgttgacttactaaagaagagacttgatggtatagaggaagtggaaagagaaataacaagaggaaggtcacgaaaagggtctgagctcacctgcccggaagataataagattaaggaactaacacttgaaattgagagactgaagaaacgtctccaacaattggaagtggtcgaaggggatttgatgaagacagaagatgagtatgatcagctggaacagaaatttagaactgagcaggataaggctaacttcctctctcaacaactagaggagatcaagcaccaaattgccaagaataaagcaatagagaagggtgaggttgtgagccaggaagctgaactgagacacagatttcggttggaagaagctaaaagtcgagacttaaaagccgaagtacaagctcttaaagagaagattcacgaattaatgaacaaagaagatcagctttctcagctccaggtagattattctgtacttcaacaaagatttatggaagaagaaaataagaacaaaaacatggggcaggaggttctcaatctgaccaaagagttggagctttccaagcgctacagcagagctcttaggcccagtgtgaatggaagaagaatggtggatgttcctgtgacgtcaactggagtccaaactgatgcagtcagcggtgaagcagcagaggaagaaacgccagctgtattcatacggaaatccttccaggaagaaaatcatattatgagtaatcttcggcaggtgggattgaagaaacccgtggaaagatcttctgttctagacaggtatcctccagcagcaaatgagctcactatgagaaagtcttggattccatggatgagaaagagggaaaacggcccctccatcactcaggagaaagggccccgaacaaattccagtccagggcacccaggagaggtagtcctttcaccaaagcagggccagcccctgcatattcgagtgacaccagaccacgagaacagcactgcgactttggagataacaagcccgacatctgaagaatttttttctagtaccactgtcattcctaccttagggaatcagaaaccaagaataaccattattccatcaccaaacgttatgcctcaaaaacaaaaaagtggagatactactcttggcccagaacgagccatgtccccagtcacaattactacattttccagagagaagactccagaaagtggaagaggcgcatttgcagacaggcccacatcccctattcagataatgacggtgtctacatcagcagcaccagctgagattgcagtttctcccgaatcccaggaaatgcccatgggacggacaatcctcaaagtcaccccagaaaaacagactgttccaactccagtacggaaatacaactccaatgccaatatcataaccacagaggacaataaaattcacattcacttagggtctcagtttaaacggtcccctgggacttcaggtgaaggagtcagtccagttattactgtccgaccagtaaacgtgacagccgaaaaggaggtttccaccggcactgtccttcgctctcccaggaatcacctctcctcacggcctggtgcaagcaaagtgacgagcactatcaccataacaccggtcacaacgtcatctgctcgaggaacccagtcagtgtcaggacaagacgggtcatcccagcggcctacacccacccgcattcctatgtcaaaagaaagcatcatcattcaccagttacgaatgaactccagatga

SEQ ID NO: 112894 - DNA, 3534 bp, Artificial Sequence
  derived and/or modified sequence
atgaggagcaggaaccagggcggggagagcgccagtgatggccacatcagctgccccaagcccagcatcattggaaatgctggggagaagagcctgtctgaagatgccaagaagaagaagaagagcaacaggaaggaggatgatgtgatggccagcggcaccgtgaagaggcacctgaagaccagcggggagtgtgagaggaagaccaagaagagcctggagctgagcaaggaggacctgatccagctgctgagcatcatggagggggagctgcaggccagagaagatgtgatccacatgctgaagacagagaagaccaagccagaggtgctggaggcccactacggcagcgctgagcctgagaaggtgctgcgggtgctgcacagagatgccatcctggcccaggagaagagcattggagaagatgtgtatgagaagcccatcagcgagctggaccggctggaggagaagcagaaggagacctacagaaggatgctggagcagctgctgctggccgagaagtgccacagaagaacagtgtatgagctggagaatgagaagcacaagcacacagactacatgaacaagagtgatgacttcaccaacctgctggagcaggagcgggagcggctgaagaagctgctggagcaggagaaggcctaccaggccaggaaggagaaggaaaatgccaagaggctgaacaagctgagagatgagctggtgaagctgaagagctttgccctgatgctggtggatgagcggcagatgcacatcgagcagctgggcctgcagagccagaaggtgcaggacctgacccagaagctgcgggaggaggaggagaagctgaaggccatcaccagcaagagcaaagaagatcggcagaagctgctgaagctggaggtggactttgagcacaaggccagccgcttcagccaggagcacgaggagatgaatgccaagctggccaaccaggagagccacaaccggcagctgcggctgaagctggtgggcctgacccagagaattgaggagctggaggagaccaacaagaacctgcagaaggccgaggaggagctgcaggagctgcgggacaagatcgccaagggggagtgtggcaacagcagcctgatggccgaggtggagaacctgaggaagagggtgctggagatggagggcaaggatgaggagatcaccaagacagagagccagtgccgggagctgaggaagaagctgcaggaggaggagcaccacagcaaggagctgcggctggaggtggagaagctgcagaagaggatgtctgagctggagaagctggaggaggccttcagcaagagcaagtctgagtgcacccagctgcacctgaacctggagaaggagaagaacctgaccaaggacctgctgaatgagctggaggtggtgaagagccgggtgaaggagctggagtgcagcgagagccggctggagaaggccgagctgagcctgaaggatgacctgaccaagctgaagagcttcaccgtgatgctggtggatgagaggaagaacatgatggagaagatcaagcaggaggagaggaaggtggatggcctgaacaagaacttcaaggtggagcagggcaaggtgatggatgtgacagagaagctgattgaggagagcaagaagctgctgaagctgaagtctgagatggaggagaaggtgtacaacctgacccgggagagagatgagctgattggcaagctgaagtctgaggaggagaagagcagcgagctgagctgcagcgtggacctgctgaagaagaggctggatggcatcgaggaggtggagcgggagatcacccggggccgcagcaggaaaggaagtgagctgacctgcccagaggacaacaagatcaaggagctgaccctggagattgaaaggctgaagaagaggctgcagcagctggaggtggtggagggggacctgatgaagacagaagatgaatatgaccagctggagcagaagttcagaacagagcaggacaaggccaacttcctgagccagcagctggaggagatcaagcaccagatcgccaagaacaaggccatcgagaagggggaggtggtgtcccaggaggccgagctgcggcaccgcttccggctggaggaggccaagagccgggacctgaaggccgaggtgcaggccctgaaggagaagatccacgagctgatgaacaaggaggaccagctgagccagctgcaggtggactacagcgtgctgcagcagcgcttcatggaggaggagaacaagaacaagaacatgggccaggaggtgctgaacctgaccaaggagctggagctgagcaagcgctacagccgggccctgcggcccagcgtgaatggaagaaggatggtggatgtgcctgtgaccagcactggagtgcagacagatgctgtgtctggagaggccgctgaggaggagaccccagctgtgttcatcaggaagagcttccaggaggagaaccacatcatgagcaacctgcggcaggtgggcctgaagaagcctgtggagaggagctctgtgctggaccgctacccacctgctgccaatgagctgaccatgaggaagtcctggatcccctggatgaggaagagagaaaatggccccagcatcacccaggagaagggccccaggaccaacagcagccctggccaccctggagaggtggtgctgagccccaagcagggccagcccctgcacatccgggtgaccccagaccacgagaacagcacagccaccctggagatcaccagccccaccagcgaggagttcttcagcagcaccaccgtcatccccaccctgggcaaccagaagccccgcatcaccatcatccccagccccaacgtgatgccccagaagcagaagagcggggacaccaccctgggccctgagcgggccatgagccctgtgaccatcaccaccttcagccgggagaagaccccagagagcggccgcggggcctttgctgaccggcccaccagccccatccagatcatgacagtgtccaccagcgctgccccagctgagattgctgtgtccccagagagccaggagatgcccatgggccgcaccatcctgaaggtgaccccagagaagcagacagtgcccacccctgtgaggaagtacaacagcaatgccaacatcatcaccacagaggacaacaagatccacatccacctgggcagccagttcaagaggagccctggcaccagcggggagggcgtgtcccctgtgatcaccgtgcggcctgtgaatgtgacagctgagaaggaggtgtccactggaacagtgctgcggagccccaggaaccacctgagcagcaggcctggggccagcaaggtgaccagcaccatcaccatcacccctgtgaccaccagcagcgcccggggcacccagagcgtgtctggccaggacggcagcagccagaggcccacccccacccgcatccccatgagcaaggagagcatcatcatccaccagctgaggatgaacagcaggtag

SEQ ID NO: 112895 - DNA, 3534 bp, Artificial Sequence
  derived and/or modified sequence
atgcggagccggaaccagggcggcgagagcgccagcgacggccacatctcctgtcctaagccatcaatcataggcaacgccggcgagaaaagcctgtccgaggacgctaagaaaaagaagaagtctaacagaaaggaagatgacgttatggcctccggcacagtgaaacgtcatttaaagaccagcggcgagtgtgaacggaaaacgaagaaatccctcgaactctccaaagaagacttaatacaactgctgagcatcatggaaggggagttgcaggccagagaggacgtaatccacatgttgaaaaccgagaagaccaagcccgaagtgctcgaagcccactatggaagcgccgagcccgaaaaggtcctccgtgtcctacacagggacgcaattttggcccaggaaaagtccattggtgaggatgtttacgagaaacccatctccgagctggataggctggaagaaaagcagaaagagacttacagacgtatgctcgaacaacttctcctggcagagaaatgccaccgaagaactgtctacgaactggagaacgaaaagcataaacacactgactatatgaataagagtgacgattttacaaatctgttggagcaggagcgtgagcggcttaagaagctacttgaacaagaaaaggcctaccaggcgcggaaagaaaaagaaaacgccaagagacttaacaagctgcgggatgaactggtcaagctaaaatcattcgcgctgatgctggtcgatgaacgccagatgcacattgaacagctcggtctccaaagccaaaaggttcaggatctgacccaaaagctgcgtgaagaagaggagaaattgaaggccataacatccaaatcaaaggaagatagacagaaactcctgaagctggaggttgattttgagcacaaagcatccaggttctctcaggagcatgaagaaatgaatgcgaagctggccaatcaggagtcacataaccggcagcttcgtcttaaactcgtggggttgacacagagaatagaggagcttgaagagactaataaaaacctgcagaaagccgaggaagagcttcaggagctcagggataagattgccaaaggtgagtgcggaaacagtagtttgatggcggaagtggagaatttgcggaaacgcgtcctggagatggagggcaaagatgaagagatcacgaaaactgagagccagtgtcgtgagctacgaaagaagctgcaggaagaagagcatcactcgaaggagctgcggctggaagtcgagaaactccaaaaacgaatgtctgaactggaaaaactggaggaggcattttctaagagcaagtcagagtgcacccagttgcatctcaatctggaaaaggagaagaacctcacaaaggacttgctcaacgaactcgaggtagtgaagtcaagagttaaagaactggagtgctccgagtctagattagaaaaagcggaactttctctgaaagatgatcttactaagcttaagtcctttacagttatgctcgtggacgagagaaagaacatgatggagaaaatcaagcaggaagagcgtaaggtagatgggctcaacaagaactttaaggtggagcagggaaaggtaatggatgtgaccgagaaactgattgaggagagcaagaagttgctcaaactgaaatctgaaatggaagagaaggtctataatctcacgagagagcgcgacgagttaattggcaagctaaaatccgaggaggagaagtcttcagagctctcttgttcagtcgacctgcttaagaagcgcttggatggtattgaagaagtagaacgcgaaatcaccagaggaagaagccggaagggatccgaactcacgtgtcctgaagacaataagataaaggagctcacactggagatcgagcggctcaaaaaacggctccagcagctggaagttgttgagggagacctgatgaagacggaagatgaatacgaccaactcgaacagaagtttcggacggaacaggacaaagctaactttttaagccagcagttagaggaaatcaaacaccaaattgccaagaacaaagcgattgagaaaggagaggttgtctcccaggaagcagaactgaggcacaggttcagattggaggaggcgaagtctcgggatcttaaggccgaggtccaggcactaaaggaaaagatacatgagctcatgaataaggaggaccagttgtctcaactgcaagtggactattcagtccttcagcagcgctttatggaggaagaaaataaaaataaaaacatgggccaggaagtgcttaacctgacaaaggaactggagttgtctaaaaggtatagcagagccctgcgcccctcagtcaacgggagaagaatggtggacgtgcctgtgacttcaacaggggtccagactgatgctgttagcggcgaagcagcggaggaagaaacgccggccgtctttattcgtaagtcctttcaggaggaaaatcacatcatgagtaacctacgtcaagtaggccttaagaaaccagtcgaaagaagctcggtactggataggtacccgccagccgctaacgagctgaccatgagaaaatcctggatcccgtggatgcggaagagggagaatgggccctcaataacacaggaaaaaggccccaggacaaacagctcccctggccaccctggcgaggtcgtgctgtcacccaaacagggccagcccctgcatatccgcgttactcctgatcatgagaacagcaccgccaccctggagatcacctccccaacctccgaggagttcttcagttccaccactgttatccccacgctgggaaatcagaaaccccgcattactatcatcccttctccaaatgtcatgcctcaaaagcaaaagagcggagatacaactctcggccccgaaagggcaatgtcacccgtaaccataaccacattttctcgcgaaaaaacccctgagagtggtaggggcgcatttgctgacagacctacttcgccaattcagataatgactgtctcgacatccgccgctcccgctgagatagccgtctcccccgagtcccaggagatgcccatgggccggacaatcttgaaggtcacccctgaaaagcagaccgtgcctacaccggtgcggaaatacaatagcaacgcaaatattatcaccactgaagataacaagattcatatccacctcggaagccagtttaagcgcagccccggaacatccggagaaggcgtttctcccgtgatcaccgtaaggcctgttaatgtgacagctgagaaggaagtgtctaccggcacggttctgaggagccctaggaatcacctgtcatcccgccccggcgcgtcaaaggtgaccagtactatcacgattactcccgtgacaactagctcagctcggggcactcaatctgtgtctgggcaagatggctctagtcagaggcctacccccacgcgtatcccaatgagtaaggagagtattatcatccatcaacttcgaatgaacagcagatag

SEQ ID NO: 112896 - DNA, 3534 bp, Artificial Sequence
  derived and/or modified sequence
atgagatcccgtaatcagggaggtgagagtgctagtgatggccatatttcttgccccaagccctcaatcataggcaatgctggagagaagagcctgtccgaggacgcaaaaaagaagaagaaatctaaccgcaaagaagacgatgtgatggcaagcggcacagtcaaaagacacctgaagacctctggggagtgtgagcgtaaaactaagaagtccctcgaattaagcaaggaagatctgatacaactgctaagtattatggagggggaactccaagcgcgtgaggatgtgatccacatgcttaaaaccgaaaaaactaaaccagaagttctggaggcacactatggctccgccgagccggaaaaggtgctgagagtgttacatcgtgacgccatcctcgcacaagagaagagtattggcgaggatgtatatgaaaaacctatctcagagctggatcgtctggaagagaagcagaaagagacttaccgtcggatgttggagcagctcctcttagccgagaagtgtcacagacgaacagtttacgaactcgagaatgagaaacataagcacacagactatatgaacaaaagtgacgactttacgaacttgctggaacaggagcgtgagcgacttaaaaagctgctggagcaggaaaaggcctaccaagctcgaaaagaaaaagagaacgcgaagaggctaaacaagctgcgggatgagctcgtgaagctaaagagcttcgcattaatgctcgtggacgagcgccagatgcatattgagcaattgggactgcaatctcaaaaggtccaagacctgacacagaagttgagggaggaggaggagaaactgaaggcaatcacatctaaaagcaaagaggaccggcagaaactgctcaagttggaagtcgacttcgagcataaagcatcccgctttagtcaagagcacgaagagatgaacgcgaagttagccaaccaggaatctcacaataggcagctcagactgaagctggtgggcctgacccaacggattgaagagctggaggaaaccaataaaaatctgcagaaggccgaagaggagctgcaggaactgagagataagattgcgaagggcgaatgcgggaattctagcttaatggccgaagtcgaaaatctgagaaagcgtgttctggagatggaaggcaaggacgaggagatcactaagacagagtctcagtgtcgggagttgcgaaagaagctgcaggaagaagagcaccactctaaggagttaagactggaggttgagaagcttcagaaacggatgagcgaactggagaagctggaagaagctttttcaaaatctaaatcagaatgtacgcagctgcacctgaacctggaaaaggaaaagaatctgactaaggaccttctgaatgaattagaggtagtgaagtctcgggtgaaggagcttgagtgttccgaatccagactagagaaggccgaactctctttgaaggatgacctgacgaagttaaagtcgtttacggtcatgcttgtggatgagcgcaagaatatgatggagaagattaaacaagaggaacggaaggtcgacgggctaaataaaaatttcaaggtggagcaaggcaaggttatggacgtcactgagaagttgatcgaagagtctaaaaagctgctgaaactgaagagcgaaatggaggagaaagtgtataatctgacgcgggagcgcgatgagcttatcggcaaactgaaatcagaagaggaaaaatccagcgaactgtcttgctctgtggatctgctcaagaagaggttggatgggattgaggaagtggaacgcgagataacccggggtaggtccagaaaaggatcagagctgacatgtccggaggataacaagatcaaagagctcactttggaaattgaacggctgaagaaacggctgcagcaactggaggtggtggagggcgatctgatgaaaaccgaagacgagtacgatcagctggagcagaagtttcgaactgaacaggacaaagcaaactttctgagtcagcaactggaggaaataaagcaccagatcgctaaaaataaggcaatcgagaagggggaggttgtctcacaagaggccgaactccgccacaggttccgattggaggaggccaaatctagagacctcaaagctgaggtccaagcattgaaagaaaagattcatgaactcatgaataaggaggaccaactatcccagctgcaagtcgattattctgtgcttcagcaaagatttatggaagaggaaaataaaaataaaaatatggggcaagaggtgctgaacttgacgaaggagttggaactttccaagagatactccagggcattacgcccttcagtgaatggtcggagaatggtggacgttccagtgacctctactggtgtgcaaacagacgccgtcagcggagaggctgctgaagaagagacacctgcggtcttcattaggaagagctttcaagaggagaatcatattatgtcaaacctccgccaggtcggcctgaaaaaaccagtggagcgctccagcgtgctcgacaggtatccgccagccgctaatgagctcacaatgagaaaaagctggataccgtggatgcgaaaacgcgaaaacggaccaagtatcacccaggaaaagggccctcgtaccaactcgagtcccggacatcccggtgaggttgtgctctccccgaagcaaggacagccccttcacatcagagtgacacccgaccacgaaaactccaccgctactctggaaattacatctcccactagtgaggaattctttagctcaacgacggtgatccccacacttggcaaccagaaacctaggatcacaattatccctagccccaacgtgatgccacaaaagcaaaagagtggtgataccaccctcggcccagaacgggcaatgtcccctgtgactataacgacattctcccgggagaagacaccagagagcgggaggggtgccttcgctgacagacctacaagcccgattcaaatcatgaccgtgtctacttctgcagcgcctgcggaaatagcagtttccccagagtctcaagaaatgccaatgggccgaacaatcctgaaggtaacgccagaaaagcagaccgttccaacccccgttagaaagtataatagtaatgctaatattatcactacggaggacaacaagattcacattcatttgggatcccaatttaagaggtcccctggcacctcaggagagggggttagtcctgtgattacagtcagacctgtgaatgtgacggcagaaaaggaggtgagcactggaaccgtactgcggtccccgagaaaccatctgtcaagccgacccggagcctctaaggtcacctccaccataaccatcaccccagtgacaaccagctccgcccgaggtacccagtccgtgagcggtcaggatggcagctcacagcgtcccaccccaacccgtatacccatgtccaaagagtctattatcattcatcagctaagaatgaactcccgctag

SEQ ID NO: 112897 - protein, 785 aa, Artificial Sequence
  derived and/or modified sequence
MDSVPATVPSIAATPGDPELVGPLSVLYAAFIAKLLELVATLPDDVQPGPDFYGLPWKPVFITAFLGIASFAIFLWRTVLVVTDTLVSVTEQQISEKLKTIMKENTELVQKLSNYEQKIKESKKHVQETRKQNMILSDEAIKYKDKIKTLEKNQEILDDTAKNLRVMLESEREQNVKNQDLISENKKSIEKLKDVISMNASEFSEVQIALNEAKLSEEKVKSECHRVQEENARLKKKKEQLQQEIEDWSKLHAELSEQIKSFEKSQKDLEVALTHKDDNINALTNCITQLNLLECESESEGQNKGGNDSDELANGEVGGDRNEKMKNQIKQMMDVSRTQTAISVVEEDLKLLQLKLRASVSTKCNLEDQVKKLEDDRNSLQAAKAGLEDECKTLRQKVEILNELYQQKEMALQKKLSQEEYERQEREHRLSAADEKAVSAAEEVKTYKRRIEEMEDELQKTERSFKNQIATHEKKAHENWLKARAAERAIAEEKREAANLRHKLLELTQKMAMLQEEPVIVKPMPGKPNTQNPPRRGPLSQNGSFGPSPVSGGECSPPLTVEPPVRPLSATLNRRDMPRSEFGSVDGPLPHPRWSAEASGKPSPSDPGSGTATMMNSSSRGSSPTRVLDEGKVNMAPKGPPPFPGVPLMSTPMGGPVPPPIRYGPPPQLCGPFGPRPLPPPFGPGMRPPLGLREFAPGVPPGRRDLPLHPRGFLPGHAPFRPLGSLGPREYFIPGTRLPPPTHGPQEYPPPPAVRDLLPSGSRDEPPPASQSTSQDCSQALKQSP

SEQ ID NO: 112898 - protein, 785 aa, Artificial Sequence
  derived and/or modified sequence
MDSVPATVPSIAATPGDPELVGPLSVLYAAFIAKLLELVATLPDDVQPGPDFYGLPWKPVFITAFLGIASFAIFLWRTVLVVKDRVYQVTEQQISEKLKTIMKENTELVQKLSNYEQKIKESKKHVQETRKQNMILSDEAIKYKDKIKTLEKNQEILDDTAKNLRVMLESEREQNVKNQDLISENKKSIEKLKDVISMNASEFSEVQIALNEAKLSEEKVKSECHRVQEENARLKKKKEQLQQEIEDWSKLHAELSEQIKSFEKSQKDLEVALTHKDDNINALTNCITQLNLLECESESEGQNKGGNDSDELANGEVGGDRNEKMKNQIKQMMDVSRTQTAISVVEEDLKLLQLKLRASVSTKCNLEDQVKKLEDDRNSLQAAKAGLEDECKTLRQKVEILNELYQQKEMALQKKLSQEEYERQEREHRLSAADEKAVSAAEEVKTYKRRIEEMEDELQKTERSFKNQIATHEKKAHENWLKARAAERAIAEEKREAANLRHKLLELTQKMAMLQEEPVIVKPMPGKPNTQNPPRRGPLSQNGSFGPSPVSGGECSPPLTVEPPVRPLSATLNRRDMPRSEFGSVDGPLPHPRWSAEASGKPSPSDPGSGTATMMNSSSRGSSPTRVLDEGKVNMAPKGPPPFPGVPLMSTPMGGPVPPPIRYGPPPQLCGPFGPRPLPPPFGPGMRPPLGLREFAPGVPPGRRDLPLHPRGFLPGHAPFRPLGSLGPREYFIPGTRLPPPTHGPQEYPPPPAVRDLLPSGSRDEPPPASQSTSQDCSQALKQSP

SEQ ID NO: 112899 - protein, 107 aa, Artificial Sequence
  derived and/or modified sequence
  misc_feature (1)..(1): Xaa can be any naturally occurring amino acid
XSAEASGKPSPSDPGSGTATMMNSSSRGSSPTRVLDEGKVNMAPKGPPPFPGVPLMSTPMGGPVPPPIRYGPPPQLCGPFGPRPLPPPFDKDGRPGTVAHACNPSTL

SEQ ID NO: 112900 - DNA, 2358 bp, Artificial Sequence
  derived and/or modified sequence
atggatagcgtccccgcaaccgtgccttcgatcgcagccacccctggcgatcccgagctggtcgggcctttgagtgttctctacgctgcttttatagccaagctgcttgagctggtggcaacgctgccggacgatgtccagccaggccccgatttctacgggctcccctggaagcccgtctttatcacggccttcttgggaatagccagctttgcaatctttctttggaggaccgtcttggtcgtaactgacactctagtgtccgtcaccgagcagcagatctctgaaaaattaaagacaataatgaaagagaacactgagctcgttcaaaagctttcgaactacgaacagaaaatcaaagagtctaaaaagcacgtacaggagacacgcaagcagaacatgatcctgagcgacgaagccattaagtataaagacaaaattaagacactggaaaaaaaccaggagattctcgatgataccgccaagaacttgagagttatgctggaatcagagcgtgaacagaacgtaaaaaaccaggacctgatctcagaaaataagaaatcaatcgaaaaactcaaggatgttatatccatgaacgcatctgaattcagcgaggtgcagatcgctttaaacgaagcaaagttgtcagaagaaaaggtcaaatctgaatgccaccgcgtgcaggaagagaacgctaggcttaagaaaaaaaaggaacagctccaacaggaaatcgaagactggagcaagctgcatgcggagctgtcggagcagattaagagttttgagaagagccagaaggatctcgaagttgcattgactcataaggatgataacattaacgccctgacaaactgcattactcagctgaacctcctagagtgcgaatccgagtctgaggggcaaaacaagggaggtaatgactcagatgaactcgccaacggagaagttgggggtgacagaaatgaaaagatgaaaaaccaaatcaaacaaatgatggatgtgtccagaacccaaacggctatcagcgtggtggaggaagatctcaaactgctgcagttgaagctcagggcttctgtctctaccaagtgtaacctggaagatcaggtgaaaaaactggaagatgataggaactccttgcaggccgctaaggctggactggaagacgagtgcaaaacgttaagacagaaggtggaaattctgaacgagttatatcagcaaaaggaaatggccctccagaagaaactgagccaggaggagtacgagcgccaagagagagagcatcggctatcagccgccgatgaaaaagctgtgagcgctgctgaggaggtgaaaacatataagagacggatcgaggagatggaggatgaactgcagaagaccgagagaagcttcaaaaaccaaattgcaactcacgaaaagaaagctcacgaaaattggcttaaggctcgcgcggcagaacgtgcaatcgcagaggagaaacgagaagccgcaaacctcagacacaaactgttagaacttacacagaaaatggctatgctgcaggaagaacctgtgatagtcaagcccatgcccggaaagcccaatactcagaatcccccacggcgcgggccactttcccagaatggatccttcggccccagccctgtgagtggaggcgagtgctccccaccgctcacagtggaaccccctgtcagaccactgtccgcgactctcaataggagagacatgccacgcagtgaattcggctcagttgacgggcctctgccacacccccgctggagtgcagaggcgtccggaaagccgtctcccagcgatccagggtctggcaccgccactatgatgaatagctcgagcaggggttcctctcctacccgcgtgctggatgagggtaaagtaaatatggcacctaaaggacctcctccatttcctggagttcccctgatgtccactccaatgggcggaccagtcccccctcccatcagatatggacctcccccacagctgtgcggcccttttggccctaggcctttgcctcccccttttggacctgggatgaggccgcctctcggcctgcgggagttcgcccctggggtcccgccaggtagacgagatttgccactgcatcctagaggcttcctacccggtcacgcccccttcaggccgcttgggtctctgggtccacgcgaatattttatcccaggcacacggctgcctccccccacccatggcccacaggagtacccacctccccctgccgtgcgtgaccttctaccttccggctctagggatgagccgccgcctgcaagtcagtctacttcacaggactgctcccaggcgctgaagcagtcgccttag

SEQ ID NO: 112901 - DNA, 2358 bp, Artificial Sequence
  derived and/or modified sequence
atggacagcgtacccgctacagttcccagcatcgctgctactccgggtgaccctgagctcgttggacccttatcggttctgtacgctgcatttattgcaaagctgctcgagctggtcgccaccctgcccgatgatgttcaaccaggccctgatttctacgggctgccttggaaacccgtcttcatcactgcttttcttggcatagcctctttcgccatctttctgtggcggacagtgctggtggttaaggatcgcgtctaccaggttacggaacagcagatcagcgaaaagcttaaaaccattatgaaggagaatacggagctggtccagaagctgtccaactatgaacagaagattaaggaaagcaaaaaacacgtccaggagacaagaaagcagaacatgatcctcagcgacgaagccatcaagtacaaagacaaaataaagacgttagaaaaaaaccaggaaatattagatgacactgcaaagaacctgagagttatgctagaatctgagcgcgaacaaaacgtgaaaaaccaggatctgatatctgaaaacaagaagagcatcgagaagttgaaggacgtcatctctatgaacgcctctgagttcagcgaagtccaaattgctctgaatgaggctaagcttagcgaggaaaaggtgaaatccgaatgccaccgcgtgcaggaagagaacgcacgtcttaagaaaaaaaaagaacaattgcagcaggagatcgaagattggagcaagctgcatgccgagctgagcgagcagatcaagtcattcgagaagagccaaaaggatttggaggttgctcttacccataaagatgacaacattaacgcactgacgaattgcataacgcagcttaaccttcttgagtgtgagtcagagagtgaaggccagaataaaggcggtaacgactctgatgagctagccaatggtgaggtgggaggcgatcggaacgagaagatgaagaaccagattaagcagatgatggatgtgagtcgtacccagaccgctatttccgtggtggaagaggacctgaagctcctgcaactcaaacttcgcgcgtctgtgtcaacaaagtgcaatctggaagaccaggttaaaaagttagaggatgaccggaattccctgcaggctgccaaggctggattagaagatgagtgtaagaccctcagacaaaaggtcgaaattctcaatgagctgtatcagcaaaaggaaatggcgctgcagaagaagctctctcaggaggagtatgagaggcaggaacgggagcatcgcctgagtgcggccgacgaaaaggctgtcagcgctgcggaagaggttaaaacatataaacgtaggatagaagaaatggaagacgagctgcagaaaacggagcggagctttaagaatcaaatcgccacccatgagaagaaggcccatgaaaattggttgaaggcccgggcggccgaacgggccatcgcagaggaaaagagggaggctgccaacctgcggcataagttgttggagctgacccagaaaatggccatgttacaggaggagccagtaattgtgaaacctatgccagggaagcccaatacgcaaaacccccctagacgggggcctctgtctcagaatggttccttcgggccatcccctgtctcgggcggcgagtgcagtcctccacttacagtggagccacctgtcagaccccttagcgccactttaaacaggcgggacatgccaagatccgaatttggcagtgtagacggcccgctgcctcatcctagatggagtgccgaggcgagcggaaagccatctccctcagacccggggtccgggactgccacaatgatgaactcttcctcccggggaagctcgcccactcgagtgctggacgaggggaaagtcaatatggctcctaaagggcctccaccattccccggagttcctttgatgagcactcctatgggtggccccgtgccacctcctataaggtacggaccccctccacaactgtgtggtccttttggacctcgtcccctgcctcccccatttggccctggtatgagacctcctttaggactaagggagttcgcccccggtgtgccacccggaagacgagacttaccccttcacccacgcgggttcctgccaggccacgcaccattcagaccactgggttcccttggacctcgtgaatactttattcctggtaccaggctaccacctcccacacatggaccacaggagtaccctcctccgcccgccgtaagggatctgctcccctccggaagccgagatgagccccctcccgcctcgcagtctaccagccaggattgcagtcaggccttaaagcagtccccttag

SEQ ID NO: 112902 - DNA, 324 bp, Artificial Sequence
  derived and/or modified sequence
tgaagcgccgaggcctctggcaagccttccccttctgaccctggatctggaaccgccacgatgatgaattcctcctctcgcggtagttctccaactagggtccttgatgaaggcaaagttaatatggcccccaaaggccccccaccctttccgggggtacctctaatgagcacacccatggggggacccgtgcccccacccatccggtatggtcctcccccccagctctgtggaccatttgggccaagaccactgccaccaccatttgataaagatgggcgccccggtacagtcgcgcatgcgtgtaacccatccactttgtag

SEQ ID NO: 112903 - DNA, 2358 bp, Artificial Sequence
  derived and/or modified sequence
atggattctgtgcctgccaccgtgcccagcattgctgccacccctggggaccctgagctggtgggccccctgtctgtgctgtatgctgccttcatcgccaagctgctggagctggtggccaccctgcctgatgatgtgcagcccggccctgacttctacggcctgccctggaagcctgtgttcatcacagccttcctgggcatcgccagctttgccatcttcctgtggaggacagtgctggtggtgacagacaccctggtgtctgtgacagagcagcagatcagcgagaagctgaagaccatcatgaaggagaacacagagctggtgcagaagctgagcaactatgagcagaagatcaaggagagcaagaagcacgtgcaggagaccaggaagcagaacatgatcctgagtgatgaggccatcaagtacaaggacaagatcaagaccctggagaagaaccaggagatcctggatgacacagccaagaacctgcgggtgatgctggagagcgagcgggagcagaatgtgaagaaccaggacctgatcagcgagaacaagaagagcattgagaagctgaaggatgtgatctccatgaatgccagcgagttcagcgaggtgcagatcgccctgaatgaggccaagctgtctgaggagaaggtgaagtctgagtgccaccgggtgcaggaggagaatgcccggctgaagaagaagaaggagcagctgcagcaggagattgaggactggagcaagctgcatgctgagctgtctgagcagatcaagagctttgagaagagccagaaggacctggaggtggccctgacccacaaggatgacaacatcaatgccctgaccaactgcatcacccagctgaacctgctggagtgtgagagcgagagcgagggccagaacaagggcggcaatgacagtgatgagctggccaacggggaggtgggcggggacagaaatgagaagatgaagaaccagatcaagcagatgatggatgtgtccaggacccagacagccatctctgtggtggaggaggacctgaagctgctgcagctgaagctgcgggcctctgtgtccaccaagtgcaacctggaggaccaggtgaagaagctggaggatgacaggaacagcctgcaggccgccaaggccggcctggaggatgagtgcaagaccctgcggcagaaggtggagatcctgaatgagctgtaccagcagaaggagatggccctgcagaagaagctgagccaggaggagtatgagcggcaggagcgggagcaccggctgtctgctgctgatgagaaggctgtgtctgctgctgaggaggtgaagacctacaagagaagaattgaggagatggaggatgagctgcagaagacagagaggagcttcaagaaccagatcgccacccatgagaagaaggcccacgagaactggctgaaggcccgggctgctgagcgggccatcgccgaggagaagcgggaggccgccaacctgcggcacaagctgctggagctgacccagaagatggccatgctgcaggaggagcccgtcatcgtgaagcccatgcctgggaagcccaacacccagaaccccccaagaagaggccccctgagccagaatggcagctttggccccagccctgtgtctggaggagagtgcagcccccccctgactgtggagccccctgtgcggcccctgagcgccaccctgaacagaagagacatgcccaggagtgaatttggatctgtggatggccccctgccccacccccgctggagcgctgaggccagcggcaagcccagccccagcgaccccggcagcggcacagccaccatgatgaacagcagcagccggggcagcagccccaccagggtgctggatgagggcaaggtgaacatggcccccaagggccccccacccttccctggggtgcccctgatgagcacccccatgggcggccctgtgcccccacccatccgctatggccccccaccccagctgtgtggccccttcggcccccggcccctgcccccacccttcggccctggcatgaggcctcccctgggcctgcgggagtttgcccctggggtgcccccaggaagaagagacctgcccctgcacccccggggcttcctgcccggccacgcccccttccggcccctgggcagcctgggcccccgggagtacttcatccctggcacccggctgcccccacccacccacggcccccaggagtacccacctcctcctgctgtgcgggacctgctgcccagcggcagcagagatgagcccccaccagccagccagagcaccagccaggactgcagccaggccctgaagcagagcccctag

SEQ ID NO: 112904 - DNA, 2358 bp, Artificial Sequence
  derived and/or modified sequence
atggattctgtgcctgccaccgtgcccagcattgctgccacccctggggaccctgagctggtgggccccctgtctgtgctgtatgctgccttcatcgccaagctgctggagctggtggccaccctgcctgatgatgtgcagcccggccctgacttctacggcctgccctggaagcctgtgttcatcacagccttcctgggcatcgccagctttgccatcttcctgtggaggacagtgctggtggtgaaggacagagtgtaccaggtgacagagcagcagatcagcgagaagctgaagaccatcatgaaggagaacacagagctggtgcagaagctgagcaactatgagcagaagatcaaggagagcaagaagcacgtgcaggagaccaggaagcagaacatgatcctgagtgatgaggccatcaagtacaaggacaagatcaagaccctggagaagaaccaggagatcctggatgacacagccaagaacctgcgggtgatgctggagagcgagcgggagcagaatgtgaagaaccaggacctgatcagcgagaacaagaagagcattgagaagctgaaggatgtgatctccatgaatgccagcgagttcagcgaggtgcagatcgccctgaatgaggccaagctgtctgaggagaaggtgaagtctgagtgccaccgggtgcaggaggagaatgcccggctgaagaagaagaaggagcagctgcagcaggagattgaggactggagcaagctgcatgctgagctgtctgagcagatcaagagctttgagaagagccagaaggacctggaggtggccctgacccacaaggatgacaacatcaatgccctgaccaactgcatcacccagctgaacctgctggagtgtgagagcgagagcgagggccagaacaagggcggcaatgacagtgatgagctggccaacggggaggtgggcggggacagaaatgagaagatgaagaaccagatcaagcagatgatggatgtgtccaggacccagacagccatctctgtggtggaggaggacctgaagctgctgcagctgaagctgcgggcctctgtgtccaccaagtgcaacctggaggaccaggtgaagaagctggaggatgacaggaacagcctgcaggccgccaaggccggcctggaggatgagtgcaagaccctgcggcagaaggtggagatcctgaatgagctgtaccagcagaaggagatggccctgcagaagaagctgagccaggaggagtatgagcggcaggagcgggagcaccggctgtctgctgctgatgagaaggctgtgtctgctgctgaggaggtgaagacctacaagagaagaattgaggagatggaggatgagctgcagaagacagagaggagcttcaagaaccagatcgccacccatgagaagaaggcccacgagaactggctgaaggcccgggctgctgagcgggccatcgccgaggagaagcgggaggccgccaacctgcggcacaagctgctggagctgacccagaagatggccatgctgcaggaggagcccgtcatcgtgaagcccatgcctgggaagcccaacacccagaaccccccaagaagaggccccctgagccagaatggcagctttggccccagccctgtgtctggaggagagtgcagcccccccctgactgtggagccccctgtgcggcccctgagcgccaccctgaacagaagagacatgcccaggagtgaatttggatctgtggatggccccctgccccacccccgctggagcgctgaggccagcggcaagcccagccccagcgaccccggcagcggcacagccaccatgatgaacagcagcagccggggcagcagccccaccagggtgctggatgagggcaaggtgaacatggcccccaagggccccccacccttccctggggtgcccctgatgagcacccccatgggcggccctgtgcccccacccatccgctatggccccccaccccagctgtgtggccccttcggcccccggcccctgcccccacccttcggccctggcatgaggcctcccctgggcctgcgggagtttgcccctggggtgcccccaggaagaagagacctgcccctgcacccccggggcttcctgcccggccacgcccccttccggcccctgggcagcctgggcccccgggagtacttcatccctggcacccggctgcccccacccacccacggcccccaggagtacccacctcctcctgctgtgcgggacctgctgcccagcggcagcagagatgagcccccaccagccagccagagcaccagccaggactgcagccaggccctgaagcagagcccctag

SEQ ID NO: 112905 - DNA, 324 bp, Artificial Sequence
  derived and/or modified sequence
tgaagtgctgaggccagcggcaagcccagccccagcgaccccggcagcggcacagccaccatgatgaacagcagcagccggggcagcagccccaccagggtgctggatgagggcaaggtgaacatggcccccaagggccccccacccttccctggggtgcccctgatgagcacccccatgggcggccctgtgcccccacccatccgctatggccccccaccccagctgtgtggccccttcggcccccggcccctgcccccaccatttgacaaggatggccggcccggcaccgtggcccacgcctgcaaccccagcaccctgtag

SEQ ID NO: 112906 - DNA, 4748 bp, Artificial Sequence
  derived and/or modified sequence
atggactcagtacctgccactgtgccttctatcgccgctaccccgggggacccggaacttgtgggacccttgtctgtgctctacgcagccttcatagccaagctgctggagctagttgctacattgcctgatgatgttcagcctgggcctgatttttatggactgccatggaaacctgtatttatcactgccttcttgggaattgcttcgtttgccattttcttatggagaactgtccttgttgtgactgatacattggtttcagtcacggaacagcaaatttctgagaagttgaagactatcatgaaagaaaatacagaacttgtacaaaaattgtcaaattatgaacagaagatcaaggaatcaaagaaacatgttcaggaaaccaggaaacaaaatatgattctctctgatgaagcaattaaatataaggataaaatcaagacacttgaaaaaaatcaggaaattctggatgacacagctaaaaatcttcgtgttatgctagaatctgagagagaacagaatgtcaagaatcaggacttgatatcagaaaacaagaaatctatagagaagttaaaggatgttatttcaatgaatgcctcagaattttcagaggttcagattgcacttaatgaagctaagcttagtgaagagaaggtgaagtctgaatgccatcgggttcaagaagaaaatgctaggcttaagaagaaaaaagagcagttgcagcaggaaatcgaagactggagtaaattacatgctgagctcagtgagcaaatcaaatcatttgagaagtctcagaaagatttggaagtagctcttactcacaaggatgataatattaatgctttgactaactgcattacacagttgaatctgttagagtgtgaatctgaatctgagggtcaaaataaaggtggaaatgattcagatgaattagcaaatggagaagtgggaggtgaccggaatgagaagatgaaaaatcaaattaagcagatgatggatgtctctcggacacagactgcaatatcggtagttgaagaggatctaaagcttttacagcttaagctaagagcctccgtgtccactaaatgtaacctggaagaccaggtaaagaaattggaagatgaccgcaactcactacaagctgccaaagctggactggaagatgaatgcaaaaccttgaggcagaaagtggagattctgaatgagctctatcagcagaaggagatggctttgcaaaagaaactgagtcaagaagagtatgaacggcaagaaagagagcacaggctgtcagctgcagatgaaaaggcagtttcggctgcagaggaagtaaaaacttacaagcggagaattgaagaaatggaggatgaattacagaagacagagcggtcatttaaaaaccagatcgctacccatgagaagaaagctcatgaaaactggctcaaagctcgtgctgcagaaagagctatagctgaagagaaaagggaagctgccaatttgagacacaaattattagaattaacacaaaagatggcaatgctgcaagaagaacctgtgattgtaaaaccaatgccaggaaaaccaaatacacaaaaccctccacggagaggtcctctgagccagaatggctcttttggcccatcccctgtgagtggtggagaatgctcccctccattgacagtggagccacctgtgagacctctctctgctactctcaatcgaagagatatgcctagaagtgaatttggatcagtggacgggcctctacctcatcctcgatggtcagctgaggcatctgggaaaccctctccttctgatccaggatctggtacagctaccatgatgaacagcagctcaagaggctcttcccctaccagggtactcgatgaaggcaaggttaatatggctccaaaagggccccctcctttcccaggagtccctctcatgagcacccccatgggaggccctgtaccaccacccattcgatatggaccaccacctcagctctgcggaccttttgggcctcggccacttcctccaccctttggccctggtatgcgtccaccactaggcttaagagaatttgcaccaggcgttccaccaggaagacgggacctgcctctccaccctcggggatttttacctggacacgcaccatttagacctttaggttcacttggcccaagagagtactttattcctggtacccgattaccacccccaacccatggtccccaggaatacccaccaccacctgctgtaagagacttactgccgtcaggctctagagatgagcctccacctgcctctcagagcactagccaggactgttcacaggctttaaaacagagcccataaaactatgacctctgaggtttcattggaaagaaagtgtactgtgcattatccattacagtaaaggatttcattggcttcaaaatccaaaagtttattttaaaaggtttgttgttagaactaagctgccttggcagtgtgcatttttgagccaaacaattcaaaaatgtcatttcttccctaaataaaaatcaccttttaagctagagcgtccttacaactttgaaatgtgcaataaagaatacctgtgttttagctaatgtagcatatgtaattgcaaaatgatttagaatgtcatgaaaaatatgaacatttcctgtggaaatgctttaagaacatgtatttccattatcctatttttagtgtacaccagctgaatacggagcaatggtgtttataagcgtttttttaaactatctggtcacaaagactgttacgctaaaaatgtttactaaaagatcactaaactatctcccctcttgctgaagttctttgtagtaatagctcataaaaatttgtttattaatatttcccaagtgtctgttgactcattggactgttatgaggcttgtgccatttggggaacatgtaaactcaggctcccagaactgaagatggtggctggtggcacacttccggctgctcctccgtcacctgtgaactctacaagtgacgtctttttatttcaaagaagtttatttcccacttgtatagcattcacatgctttctttacgatcctcattgtctatttgagaatggttttctgagagtgagtttacattagtagcaagagttgtttgacctgatgttccattgtttttaccattcctgtagaaaaagggtgcacaacagaaaaatgaaaatgatgtgtcatggccataaaagtatagaaatctttaaaaattttaaaatgtacagtcccttatctatctttcccattccttgccactgatttttgaggaatataataaaaagattggaagagtataatgccatgagaaagaatgatttaggactgtgagggttataacatgccctaggtcagcaaccaagggttgaaatcagttctgttttagggggaaatgggggcgacagatattattccaaaattaatattaattaatatttaaacgttggtgtttttatttaaaaatcagtaactaaccatctggaattgcaccatacttaaagtcttatccattactacactgtctttaaaacaatgtttctttaaatactctacaacgtttctaagaacgaacttcagacattttaattacagtaataatagcactccttttaaggagtttcagatccacactaaaactaaaatcataaaaggctgatacttttgtttgctgctaggctatattcttccattctttgaagtcctatgatgtaatatttttgaaacctagtgtatgtcttgtcactgttgtgatatttaatcgattaagaataccttgtaaaaaggagcaaaagcttcaatgtgaaacaattttctctctttatactaaacaactgaagatagatagtttagaaagataaggacctttgaaagaagacaactctgtcaaagttcataaggaatataaaaattcttcaggaaaagagaattcaatctatatgtcctcccgtttaatatcaagaatagaagaaattaagaggaaaactccacagaagagcataggccacttttagccatgtaaaaataagattaagtcacaaatacaacttttgaatttacctgtcaatatctctttaggacacaaaacaatgctgaagttaatataatttctaattttaaatgtcatttaagtgtagattatgccatctaggaaggtaagtaggaaaggtaaattaaatctatttttaaaattcaaaatattagagtatttttcccctctaaagccttttttggtgattattctgtatctgacataattgagaaactggtaagctgtaaagattccagtgtagcttctctgagaagttgtgagccagtccataactgcttcctcacatccatctgattgcaccatttctgcagcaaaccccaaagcagggtgccaatatgcagatggcatagggagtatcatccctcagccaaatcacttttccatctctaaagtttcatctattttggaagtcatctccaactaattgtgtctggatttagttgctaaaattgtcttatttatgaagcagcaatattcagcctgaaagcatttctgccatagttgttgtagttatatcgccaatggctgatttttttcattggaaagtaaatttaagtaattcgtgggatgtggtatattctgtgtcaacttcaagataatcactcattttctcgttatattcaggtctgaattaaagttaagttaatcacaca

SEQ ID NO: 112907 - DNA, 2735 bp, Artificial Sequence
  derived and/or modified sequence
gacgtgttttataggcggcataaagcgaaagtgcaggcagctgtggaaggcgaagttcaatcccagagtccgccccctgaattggggcctttccggaggaggaagctctgaaaaacagggggcccagtgccattccgcagggaattgtcgcttgcgttcagctgttctacacaatggactcagtacctgccactgtgccttctatcgccgctaccccgggggacccggaacttgtgggacccttgtctgtgctctacgcagccttcatagccaagctgctggagctagttgctacattgcctgatgatgttcagcctgggcctgatttttatggactgccatggaaacctgtatttatcactgccttcttgggaattgcttcgtttgccattttcttatggagaactgtccttgttgtgaaggatagagtatatcaagtcacggaacagcaaatttctgagaagttgaagactatcatgaaagaaaatacagaacttgtacaaaaattgtcaaattatgaacagaagatcaaggaatcaaagaaacatgttcaggaaaccaggaaacaaaatatgattctctctgatgaagcaattaaatataaggataaaatcaagacacttgaaaaaaatcaggaaattctggatgacacagctaaaaatcttcgtgttatgctagaatctgagagagaacagaatgtcaagaatcaggacttgatatcagaaaacaagaaatctatagagaagttaaaggatgttatttcaatgaatgcctcagaattttcagaggttcagattgcacttaatgaagctaagcttagtgaagagaaggtgaagtctgaatgccatcgggttcaagaagaaaatgctaggcttaagaagaaaaaagagcagttgcagcaggaaatcgaagactggagtaaattacatgctgagctcagtgagcaaatcaaatcatttgagaagtctcagaaagatttggaagtagctcttactcacaaggatgataatattaatgctttgactaactgcattacacagttgaatctgttagagtgtgaatctgaatctgagggtcaaaataaaggtggaaatgattcagatgaattagcaaatggagaagtgggaggtgaccggaatgagaagatgaaaaatcaaattaagcagatgatggatgtctctcggacacagactgcaatatcggtagttgaagaggatctaaagcttttacagcttaagctaagagcctccgtgtccactaaatgtaacctggaagaccaggtaaagaaattggaagatgaccgcaactcactacaagctgccaaagctggactggaagatgaatgcaaaaccttgaggcagaaagtggagattctgaatgagctctatcagcagaaggagatggctttgcaaaagaaactgagtcaagaagagtatgaacggcaagaaagagagcacaggctgtcagctgcagatgaaaaggcagtttcggctgcagaggaagtaaaaacttacaagcggagaattgaagaaatggaggatgaattacagaagacagagcggtcatttaaaaaccagatcgctacccatgagaagaaagctcatgaaaactggctcaaagctcgtgctgcagaaagagctatagctgaagagaaaagggaagctgccaatttgagacacaaattattagaattaacacaaaagatggcaatgctgcaagaagaacctgtgattgtaaaaccaatgccaggaaaaccaaatacacaaaaccctccacggagaggtcctctgagccagaatggctcttttggcccatcccctgtgagtggtggagaatgctcccctccattgacagtggagccacctgtgagacctctctctgctactctcaatcgaagagatatgcctagaagtgaatttggatcagtggacgggcctctacctcatcctcgatggtcagctgaggcatctgggaaaccctctccttctgatccaggatctggtacagctaccatgatgaacagcagctcaagaggctcttcccctaccagggtactcgatgaaggcaaggttaatatggctccaaaagggccccctcctttcccaggagtccctctcatgagcacccccatgggaggccctgtaccaccacccattcgatatggaccaccacctcagctctgcggaccttttgggcctcggccacttcctccaccctttggccctggtatgcgtccaccactaggcttaagagaatttgcaccaggcgttccaccaggaagacgggacctgcctctccaccctcggggatttttacctggacacgcaccatttagacctttaggttcacttggcccaagagagtactttattcctggtacccgattaccacccccaacccatggtccccaggaatacccaccaccacctgctgtaagagacttactgccgtcaggctctagagatgagcctccacctgcctctcagagcactagccaggactgttcacaggctttaaaacagagcccataaaactatgacctctgaggtttcattggaaagaaagtgtactgtgcattatccattacagtaaaggatttcattggcttcaaaatccaaaagtttattttaaaaggtttgttgttagaactaagctgccttggcagtgtgcatttttgagccaaacaattcaaaaatgtcatttcttccctaaataaaaatcaccttttaagctag

SEQ ID NO: 112908 - DNA, 2358 bp, Artificial Sequence
  derived and/or modified sequence
atggacagcgtgcccgccaccgtgcccagcatcgccgccacccccggcgatcccgagttggttggcccactgagtgtgctgtacgctgcatttatcgccaagttgcttgagcttgttgctacgctgccagacgatgtgcagccagggccggatttctatgggctaccgtggaaacccgtctttatcacggctttcctggggatcgcgtccttcgcgatctttctttggcgcacagtccttgttgtcactgataccttagttagcgtaacagagcagcagattagtgaaaaactgaaaactattatgaaggaaaacaccgagttggtgcagaagctgtctaactacgagcagaaaataaaggagagcaagaaacacgtgcaggagactagaaagcaaaacatgatcttaagcgatgaggcgatcaaatataaggataagataaagaccctcgagaagaatcaagaaattctcgacgacactgctaagaatcttcgcgtgatgctggagtcagaaagagaacagaacgtgaagaatcaagacctgatttcagagaataaaaaaagcatcgagaaacttaaagacgtgatcagtatgaacgcctcagagttttcagaagtccagattgcccttaacgaggcaaagctctccgaagaaaaagtcaagtctgagtgccaccgcgtgcaggaagaaaacgcccgcttgaagaagaaaaaggaacaactgcagcaggaaattgaggattggagtaagctgcacgcagaactgagtgagcaaatcaagagcttcgagaagagccagaaggatctggaggtcgccctgactcacaaggatgataacatcaacgccttaaccaattgtattacgcagttaaatttgcttgagtgcgaaagcgagtctgaaggtcagaacaaaggaggcaatgactcagatgagctcgccaatggagaagtaggcggtgataggaacgagaagatgaagaaccaaatcaaacaaatgatggatgtgagcagaactcagaccgcaatcagcgtagtggaagaggacctgaaattactgcagctcaaattacgcgcatctgtgtccaccaaatgcaatctagaggaccaggtcaagaaactggaagatgatcgcaattcattacaagccgccaaggctggtctggaggacgaatgtaagacactcagacaaaaggtcgagatcttaaacgaactgtaccagcagaaagagatggccctgcaaaagaaactttcacaagaagagtatgaaagacaggagcgtgaacaccgcttgagcgctgctgatgagaaggcagtttcagccgcagaggaggtaaaaacctacaaacgacgaattgaagaaatggaggacgaattgcagaagaccgagcgctctttcaagaatcagatcgcgactcatgaaaagaaggcccatgagaattggctaaaagcccgcgctgcggaaagagcaatagcggaggaaaagagggaagccgcgaacttacggcacaaactgctggagctgactcagaaaatggcaatgctgcaggaagaaccagtaattgtgaagcccatgcccggcaaacctaatacccagaatcccccgcggcgaggcccactctctcagaatgggtcattcggcccttctcccgtgtccggcggcgagtgtagtccgccactcacggtcgagccgcctgtgcgcccccttagcgccaccctgaaccgaagggatatgcctcgcagcgaatttggctcagtggatgggccgcttccccatccccggtggtctgctgaggcaagtggtaagccttctccttcagacccgggttcaggcacggccaccatgatgaactccagctcacgggggagctcccctacacgagtgttggatgagggcaaagtgaatatggctccgaaagggccccccccctttcccggtgtccctctgatgtccacccccatgggcgggcctgtcccacctcccatccggtatggcccaccaccgcagctgtgcggaccatttggcccccggcccttgcctccaccctttggacccgggatgaggccacccctgggactgcgggaatttgctccgggggtcccaccaggaaggcgggatttgccacttcacccccgcggcttcttgcctggacacgcccccttccggcccttgggcagtcttggacctcgggaatacttcatcccaggcacaaggctacctcctcccacccacggcccgcaggaatacccacccccacctgccgttcgcgacctcctgccaagcggctcaagggatgaaccgcctcccgcctcccagtccacatcacaggactgttcccaggcgctgaaacagagtccgtag

SEQ ID NO: 112909 - DNA, 2358 bp, Artificial Sequence
  derived and/or modified sequence
atggacagcgtgcccgccaccgtgcccagcatcgccgccacccccggagatcctgagctcgttggacccctttcggtcttatatgccgcctttatagcgaagctattggagctcgtggcgacactaccggatgacgtacaacccggccccgacttctatgggctgccctggaaacctgtgtttattactgccttcctgggaatagccagttttgcaatttttctctggcgaaccgttcttgtggttaaggatagggtctatcaggtgactgaacaacaaattagtgaaaagctaaagacaataatgaaagaaaatactgagctggtccagaagctctctaattacgagcagaagatcaaggagtcgaaaaaacacgtccaggagacaagaaaacagaatatgatattgagcgatgaagctatcaaatataaagataagattaaaactttagagaaaaatcaggagatactggacgataccgccaaaaatctgcgggtgatgcttgaaagtgagcgagagcagaacgtcaaaaaccaggaccttatttcagagaacaagaagagcattgaaaagctgaaggacgttatcagtatgaacgcgtcagaatttagcgaggtgcagatcgccctcaatgaggccaagcttagcgaagagaaagttaaaagtgagtgtcatcgggtgcaggaagagaacgcgagactgaagaagaaaaaggagcagctccagcaggagattgaggactggtctaagttgcatgcggagctttctgagcagataaagtccttcgagaaatcccagaaagacttagaggttgctctgacccataaggacgacaacattaacgcactaaccaactgcatcactcagttaaatctgctagaatgtgaatcggagagtgaaggacaaaataagggagggaacgactccgacgagttggcgaacggcgaagtagggggtgacaggaatgagaagatgaaaaatcagatcaagcagatgatggatgtaagtagaacccagactgccataagcgtcgtggaagaagatctgaaactcttgcagctgaagctacgggccagtgtgtccaccaaatgcaatttggaagatcaggtgaaaaaattagaggatgacaggaacagtctgcaggccgccaaagcgggtctcgaagacgagtgcaaaactctcagacagaaagtggaaatcctcaatgagctgtaccaacagaaggagatggccctccagaagaaattgagccaagaagagtacgagcgccaggaaagggagcatcgtttgtcagccgctgacgagaaggctgtcagcgcagccgaagaggtcaaaacgtataaacgaagaatagaagagatggaggatgagctgcagaagaccgagcgaagcttcaagaatcagattgctacacacgaaaagaaggcccacgaaaattggctaaaggcccgagccgcagagcgggctattgcagaggagaagagggaagctgctaacctgaggcataaacttttagagctgactcagaaaatggctatgctgcaggaggagcccgtgattgtcaagcctatgcccggaaagcccaatacacagaatcctcccaggcgtgggcccctctcacagaatggctccttcggccccagccccgtcagtgggggagagtgcagtccgccattaacggtagaaccacctgttagacctctatcagccacccttaatcgtagggatatgcctcggtcagaattcggaagtgttgatggccctcttccccatcccaggtggtccgctgaggcgagcggaaagcccagcccttctgatcccgggagcggcaccgccactatgatgaatagtagcagtcgaggctccagcccaacgagagtgctggacgaggggaaagtcaacatggcacccaagggaccccctccctttcctggggtgcccctaatgtcgacgcccatgggtggacccgtgccccctcccattaggtacggccccccacctcagctctgcggcccatttggacctcgacccctgccacccccttttggccccggcatgagaccacctttgggcctgcgggaattcgccccaggcgtgccacccggtaggcgcgacttacccctccatccacgagggtttttgcccggccatgctccatttcgcccactgggttcactaggcccacgagaatacttcataccaggaacccgactacccccccctacgcacggtccacaggagtaccctcctccccctgccgttcgcgatcttctgccgagtggttcgagagacgagcctccgccagccagccaatcaactagccaggactgtagccaggcgctgaaacagtccccgtag

SEQ ID NO: 112910 - DNA, 324 bp, Artificial Sequence
  derived and/or modified sequence
tgaagcgccgaggccagcggcaagcccagccccagcgaccccggcagcggtacagccactatgatgaatagctctagtcgcggatcgtctccaactcgagttcttgatgaggggaaagttaacatggcacccaagggcccacccccattccccggcgtccctctgatgtcgacccccatgggcggacctgtgcccccccccatacgttacgggcctcctcctcaactctgcgggccctttgggccaaggcctcttccgcccccttttgacaaggatgggcgcccaggaaccgtggctcatgcatgtaacccatctaccctctag

SEQ ID NO: 112911 - DNA, 2358 bp, Artificial Sequence
  derived and/or modified sequence
atggactccgtgccagctactgtgcctagcatagcagccacaccaggagatcccgagctcgttggcccacttagtgtgctgtacgctgccttcatcgctaagttactggagttggtggcaacactccccgacgatgtgcaaccgggtcctgatttctacggtctgccatggaagcccgtgttcataactgcattcctcggcattgcgtcctttgctatattcctctggcgcacagtcctcgtggtgactgacacactggtatctgtaacagaacagcagatctcagagaaattgaaaacgattatgaaagagaatacagagctggtgcagaagctatctaattatgagcaaaaaataaaggaaagcaaaaagcacgtccaggaaaccagaaagcagaacatgatcctcagtgacgaggcaatcaaatataaagataagatcaagaccctggagaaaaatcaggaaattctggacgacactgctaaaaacctgagggtgatgctggaaagcgaaagggagcagaatgtaaaaaatcaggacctgatctcagagaataagaagtcgattgaaaagctgaaagatgtgatctccatgaatgccagtgagttttcggaggtccagatagcactcaacgaggctaagctatccgaggagaaagttaagagtgagtgccaccgggtgcaagaagaaaacgctcgactgaagaaaaagaaggagcagctgcagcaggagatcgaagattggtcgaaactgcacgccgaactgagcgagcagatcaaaagctttgagaaatcccagaaggacctggaggttgcattgacacacaaagacgacaacatcaatgcgttgacgaactgtatcactcaattaaacctgctggaatgtgaatccgagagcgaggggcagaataagggcggtaatgattctgatgagctcgccaatggggaagtggggggagaccgcaacgagaaaatgaagaatcaaataaagcaaatgatggacgtatcacgtacccagacagccattagcgtggtcgaggaggatctgaagctgctgcagctgaagctcagggcctcggtcagtacaaagtgcaacctcgaagaccaggtaaagaagctcgaagatgatcgtaactctttacaggccgcaaaggccggactggaagatgaatgcaaaacgctgaggcagaaggtggagatcttaaacgaactgtatcagcagaaagagatggccctccagaaaaagctgtcacaggaagaatatgagcgacaggagagggaacatcgcctgtctgcagcagacgaaaaggcagtgagcgctgctgaggaggtaaagacctataagcgtcgtatcgaggaaatggaggatgagcttcagaagaccgaaagaagtttcaaaaatcagattgcaacccacgagaaaaaggcccatgagaattggttgaaggctagagccgcagagagggccattgctgaagagaaaagagaagctgccaatctgagacacaagctcctggagctcacacagaagatggccatgttgcaggaggaaccggttatagttaagcctatgccgggtaaacctaatactcagaatccccctagacggggacctcttagccagaatgggtctttcgggccatctcctgtgagcggcggagaatgctctcctccattgactgtcgaacccccagtgcggccactgagcgctaccttgaataggagggatatgccaagaagtgagttcggcagcgtcgatggacccctacctcatccacgctggagcgccgaggcgagcggcaagccatcaccatcggaccctggaagtggtaccgctacaatgatgaatagttcctccaggggcagttccccaacaagagttctcgatgagggcaaagtcaacatggccccaaaagggccaccacctttccccggagtgccgctcatgagcacaccaatggggggtcccgtacctcctcccattaggtatgggcctcccccacagttatgtggaccctttggacccaggcccctcccacctcccttcggacctggtatgaggcctcccctcgggctcagggagtttgctcctggcgtgccgcctggtcgacgagacctacctcttcatcctcgcggattcttgcctggtcacgccccattcaggccgctgggttcactcggaccacgagagtattttatcccgggaactcgacttccacccccaacgcacgggcctcaggaatatccccctccccctgcggtacgagatttattgcctagcggaagtcgggacgagccccctccggcatcccaatccaccagccaagattgttctcaggcgctgaagcagtcgccttag

SEQ ID NO: 112912 - DNA, 2358 bp, Artificial Sequence
  derived and/or modified sequence
atggactccgttcctgccactgtccccagtattgccgctacaccaggggatcctgagctggtgggtcctttgtcggtactgtacgccgctttcattgctaaactgcttgagctcgttgctaccttaccagacgatgtccaacccggaccagatttttacggtttgccctggaagcctgtgtttatcaccgccttcttagggatagcttcatttgcgattttcttatggcgcactgtcctcgtggtaaaggaccgcgtgtaccaagtgacggagcagcagatctctgaaaaactgaaaacaattatgaaagagaacactgagctcgttcagaaactttcgaattatgagcagaagattaaagagtccaagaaacacgtgcaggagactagaaaacaaaatatgatcctgtccgacgaggccatcaagtataaagacaagatcaagactctcgaaaagaaccaggaaattctggacgataccgctaagaacctgcgcgtgatgctggagagcgaacgggagcaaaacgtcaaaaatcaagatttaatttccgagaataaaaaatcaatcgagaaactcaaagacgtcatttctatgaatgcatccgagttctccgaagtacaaattgcactcaacgaagcaaaattgtcggaagaaaaagttaaaagcgagtgccaccgtgtgcaggaagaaaacgccagactaaaaaagaagaaagaacagctgcaacaggagatcgaggattggagcaaactgcatgccgaactaagcgagcaaattaaatcctttgaaaagtcccagaaggacctcgaggttgctttgacgcacaaagatgacaatattaatgctctgacgaactgcataactcagctgaaccttctagagtgcgaatctgaatctgagggacagaataagggagggaacgactctgacgaattggcaaatggagaagtgggaggagacagaaatgagaagatgaagaaccagataaagcagatgatggatgtgtcaagaactcagactgccatctctgtagtggaagaagatctcaagttgttgcagctcaagctcagggcatcggtgagtactaagtgtaaccttgaggatcaggttaaaaaactggaggacgaccgcaattctctgcaggcagccaaggccggtctcgaagacgagtgcaaaaccttgcgacaaaaggttgaaattctgaacgagctctaccagcagaaggaaatggctctacagaaaaagttatcacaggaggagtacgagaggcaagagcgcgagcatcgactctctgccgctgacgagaaggccgtctcagccgcagaagaggtgaaaacctacaaacggagaattgaggaaatggaggatgagctccagaagaccgagagatcattcaagaaccagatcgcaactcatgaaaaaaaagcacatgagaactggcttaaggctagagccgcagaacgagctatcgcagaagaaaaacgggaggccgctaatttacgtcataaactcctcgaactgactcaaaagatggccatgctgcaagaggagccagtgatcgtgaagcctatgccaggaaagcccaacactcagaatccaccccgaagggggccactgagccagaatgggtcattcggcccaagccctgtgtccggaggcgagtgctcccccccactgacagtggaaccacccgtccggcctctctcagccactctgaatcgcagagacatgccacgcagtgagttcgggagcgtagatgggcctttgcctcacccaaggtggtccgcagaggcgagcggaaagccttccccatcagatccaggaagtgggaccgctaccatgatgaactcatctagcagaggaagcagccctacccgtgtcctcgacgaaggaaaggtcaacatggccccaaaaggaccccctccttttccaggggttccactcatgtcaactcccatgggtggacctgtgcctcccccaatccgctacggccctcccccacagctatgcggaccatttggaccacggccactcccacctcccttcgggccaggaatgagaccccctctcggccttcgagaattcgcccctggagtcccgccaggaagacgtgacctaccattgcatcctagggggtttctaccaggccatgctcctttccgccctttgggatcacttggtccccgagagtactttattccaggaaccaggctgccaccccctacgcatggacctcaggaataccctccgccacctgcggtgcgggatctgctcccttcgggatcaagggacgagccgccacctgcctcccaaagtacatctcaggactgttcccaagcccttaaacagtccccatag

SEQ ID NO: 112913 - DNA, 324 bp, Artificial Sequence
  derived and/or modified sequence
tagtcggcggaagcttctggtaaaccaagtccaagcgacccgggttccggcactgccaccatgatgaattccagcagtcgcggttcttcacccacaagggttctggacgagggcaaagttaacatggctcctaaaggcccaccccctttccccggtgttccactgatgtctaccccaatgggagggcctgtgccaccccctattcgctatgggccacctccccagctatgcggccctttcggacctaggcctctcccaccgccatttgacaaagatggcagaccaggcactgtcgcacacgcttgtaaccccagtacattgtag

SEQ ID NO: 112914 - DNA, 2358 bp, Artificial Sequence
  derived and/or modified sequence
atggacagcgtgcccgccaccgtgcccagcatcgccgccacccccggcgaccccgagctggtgggccccctgagcgtgctgtacgccgccttcatcgccaagctgctggagctggtggccaccctgcccgacgacgtgcagcccggccccgacttctacggcctgccctggaagcccgtgttcatcaccgccttcctgggcatcgccagcttcgccatcttcctgtggagaaccgtgctggtggtgaccgacaccctggtgagcgtgaccgagcagcagatcagcgagaagctgaagaccatcatgaaggagaacaccgagctggtgcagaagctgagcaactacgagcagaagatcaaggagagcaagaagcacgtgcaggagaccagaaagcagaacatgatcctgagcgacgaggccatcaagtacaaggacaagatcaagaccctggagaagaaccaggagatcctggacgacaccgccaagaacctgagagtgatgctggagagcgagagagagcagaacgtgaagaaccaggacctgatcagcgagaacaagaagagcatcgagaagctgaaggacgtgatcagcatgaacgccagcgagttcagcgaggtgcagatcgccctgaacgaggccaagctgagcgaggagaaggtgaagagcgagtgccacagagtgcaggaggagaacgccagactgaagaagaagaaggagcagctgcagcaggagatcgaggactggagcaagctgcacgccgagctgagcgagcagatcaagagcttcgagaagagccagaaggacctggaggtggccctgacccacaaggacgacaacatcaacgccctgaccaactgcatcacccagctgaacctgctggagtgcgagagcgagagcgagggccagaacaagggcggcaacgacagcgacgagctggccaacggcgaggtgggcggcgacagaaacgagaagatgaagaaccagatcaagcagatgatggacgtgagcagaacccagaccgccatcagcgtggtggaggaggacctgaagctgctgcagctgaagctgagagccagcgtgagcaccaagtgcaacctggaggaccaggtgaagaagctggaggacgacagaaacagcctgcaggccgccaaggccggcctggaggacgagtgcaagaccctgagacagaaggtggagatcctgaacgagctgtaccagcagaaggagatggccctgcagaagaagctgagccaggaggagtacgagagacaggagagagagcacagactgagcgccgccgacgagaaggccgtgagcgccgccgaggaggtgaagacctacaagagaagaatcgaggagatggaggacgagctgcagaagaccgagagaagcttcaagaaccagatcgccacccacgagaagaaggcccacgagaactggctgaaggccagagccgccgagagagccatcgccgaggagaagagagaggccgccaacctgagacacaagctgctggagctgacccagaagatggccatgctgcaggaggagcccgtgatcgtgaagcccatgcccggcaagcccaacacccagaacccccccagaagaggccccctgagccagaacggcagcttcggccccagccccgtgagcggcggcgagtgcagcccccccctgaccgtggagccccccgtgagacccctgagcgccaccctgaacagaagagacatgcccagaagcgagttcggcagcgtggacggccccctgccccaccccagatggagcgccgaggccagcggcaagcccagccccagcgaccccggcagcggcaccgccaccatgatgaacagcagcagcagaggcagcagccccaccagagtgctggacgagggcaaggtgaacatggcccccaagggccccccccccttccccggcgtgcccctgatgagcacccccatgggcggccccgtgcccccccccatcagatacggcccccccccccagctgtgcggccccttcggccccagacccctgcccccccccttcggccccggcatgagaccccccctgggcctgagagagttcgcccccggcgtgccccccggcagaagagacctgcccctgcaccccagaggcttcctgcccggccacgcccccttcagacccctgggcagcctgggccccagagagtacttcatccccggcaccagactgcccccccccacccacggcccccaggagtacccccccccccccgccgtgagagacctgctgcccagcggcagcagagacgagcccccccccgccagccagagcaccagccaggactgcagccaggccctgaagcagagcccctag

SEQ ID NO: 112915 - DNA, 2358 bp, Artificial Sequence
  derived and/or modified sequence
atggacagcgtgcccgccaccgtgcccagcatcgccgccacccccggcgaccccgagctggtgggccccctgagcgtgctgtacgccgccttcatcgccaagctgctggagctggtggccaccctgcccgacgacgtgcagcccggccccgacttctacggcctgccctggaagcccgtgttcatcaccgccttcctgggcatcgccagcttcgccatcttcctgtggagaaccgtgctggtggtgaaggacagagtgtaccaggtgaccgagcagcagatcagcgagaagctgaagaccatcatgaaggagaacaccgagctggtgcagaagctgagcaactacgagcagaagatcaaggagagcaagaagcacgtgcaggagaccagaaagcagaacatgatcctgagcgacgaggccatcaagtacaaggacaagatcaagaccctggagaagaaccaggagatcctggacgacaccgccaagaacctgagagtgatgctggagagcgagagagagcagaacgtgaagaaccaggacctgatcagcgagaacaagaagagcatcgagaagctgaaggacgtgatcagcatgaacgccagcgagttcagcgaggtgcagatcgccctgaacgaggccaagctgagcgaggagaaggtgaagagcgagtgccacagagtgcaggaggagaacgccagactgaagaagaagaaggagcagctgcagcaggagatcgaggactggagcaagctgcacgccgagctgagcgagcagatcaagagcttcgagaagagccagaaggacctggaggtggccctgacccacaaggacgacaacatcaacgccctgaccaactgcatcacccagctgaacctgctggagtgcgagagcgagagcgagggccagaacaagggcggcaacgacagcgacgagctggccaacggcgaggtgggcggcgacagaaacgagaagatgaagaaccagatcaagcagatgatggacgtgagcagaacccagaccgccatcagcgtggtggaggaggacctgaagctgctgcagctgaagctgagagccagcgtgagcaccaagtgcaacctggaggaccaggtgaagaagctggaggacgacagaaacagcctgcaggccgccaaggccggcctggaggacgagtgcaagaccctgagacagaaggtggagatcctgaacgagctgtaccagcagaaggagatggccctgcagaagaagctgagccaggaggagtacgagagacaggagagagagcacagactgagcgccgccgacgagaaggccgtgagcgccgccgaggaggtgaagacctacaagagaagaatcgaggagatggaggacgagctgcagaagaccgagagaagcttcaagaaccagatcgccacccacgagaagaaggcccacgagaactggctgaaggccagagccgccgagagagccatcgccgaggagaagagagaggccgccaacctgagacacaagctgctggagctgacccagaagatggccatgctgcaggaggagcccgtgatcgtgaagcccatgcccggcaagcccaacacccagaacccccccagaagaggccccctgagccagaacggcagcttcggccccagccccgtgagcggcggcgagtgcagcccccccctgaccgtggagccccccgtgagacccctgagcgccaccctgaacagaagagacatgcccagaagcgagttcggcagcgtggacggccccctgccccaccccagatggagcgccgaggccagcggcaagcccagccccagcgaccccggcagcggcaccgccaccatgatgaacagcagcagcagaggcagcagccccaccagagtgctggacgagggcaaggtgaacatggcccccaagggccccccccccttccccggcgtgcccctgatgagcacccccatgggcggccccgtgcccccccccatcagatacggcccccccccccagctgtgcggccccttcggccccagacccctgcccccccccttcggccccggcatgagaccccccctgggcctgagagagttcgcccccggcgtgccccccggcagaagagacctgcccctgcaccccagaggcttcctgcccggccacgcccccttcagacccctgggcagcctgggccccagagagtacttcatccccggcaccagactgcccccccccacccacggcccccaggagtacccccccccccccgccgtgagagacctgctgcccagcggcagcagagacgagcccccccccgccagccagagcaccagccaggactgcagccaggccctgaagcagagcccctag

SEQ ID NO: 112916 - DNA, 324 bp, Artificial Sequence
  derived and/or modified sequence
tgaagcgccgaggccagcggcaagcccagccccagcgaccccggcagcggcaccgccaccatgatgaacagcagcagcagaggcagcagccccaccagagtgctggacgagggcaaggtgaacatggcccccaagggccccccccccttccccggcgtgcccctgatgagcacccccatgggcggccccgtgcccccccccatcagatacggcccccccccccagctgtgcggccccttcggccccagacccctgcccccccccttcgacaaggacggcagacccggcaccgtggcccacgcctgcaaccccagcaccctgtag

SEQ ID NO: 112917 - protein, 204 aa, Artificial Sequence
  derived and/or modified sequence
MSILLPNMAEFDTISELEEEEEEEAATSSSSPSSSSSVSGPDDDEEDEEEEEEEEEEEEEEEEEEEEEAPPPPRVVSEEHLRRYAPDPVLVRGAGHITVFGLSNKFDTEFPSVLTGKVAPEEFKTSIGRVNACLKKALPVNVKWLLCGCLCCCCTLGCSLWPVICLNKRTRRSIQKLIEWENNRLYHKVILIEFLPKYPIFRPD

SEQ ID NO: 112918 - DNA, 3041 bp, Artificial Sequence
  derived and/or modified sequence
aactcttctccgggagcgtggcggcgatcgcgaggtcacgtgatgagcatcctgctgcccaacatggcggagttcgacaccatctcggaactggaggaggaggaggaagaagaagcggcaacgtcgtcgtcgtcgccgtcgtcgtcgtcgtcggtatctgggcccgacgatgacgaggaggatgaggaggaagaggaggaagaggaggaggaggaagaagaggaggaggaggaagaggaggaggaagcgccgcccccgcctcgggtagtgagcgaggagcatctgcggagatatgctcccgaccctgtattagtgcggggtgccggccacatcactgtgtttggcttgagcaacaagtttgatactgaatttccctccgttctaacagggaaggtggccccagaagaatttaaaaccagcattggccgtgtgaatgcatgtttgaaaaaggctctcccggtcaatgtgaaatggctgctgtgtggttgtctctgctgctgttgcacactgggttgcagcctatggcctgttatttgtctcaacaaaagaaccagaagatcaattcagaagttaatagaatgggaaaataacagattatatcacaaggtaatactaatagaattcttaccaaaatatcccatattccgacctgactgaggagttttatccagtcacttctgtgttacctgtcatttcctacccttagtgccttgtagatttggaatgaagatggtctcctttgctgtgttcaacttattctttataatggtagaatattcttctcgctcttttgtgttggtttatgaagaaaatttgcacatcttttttgtctttcaatgaggcttgtgttttgcactctcaattttaaatacacacacatgcgtgtgtgcatatacatatatagatagttgccattaaagataaatcatcagtgttggtgtttaaaaaacaaaaacttgttctgagcatgctgccttataattttcatactcattgtttctaaactcgcatcatttttctaggctacttgatgctctgtaatcccttactggacaaacttaaataagcttttggtagcttttagaaatggttttactctgcttttaaaggacatgcttttaaaggacatgcaattaatggcactggttttgtcctgcactttgctttatcacttatgttagtggataaaatatttaaactcctaaagacttgtaaatattgcctctttgcataatgtaaaatgtggtatgccatggtttacataatgtaacattactcttattgtattgccaacaattttacatagattttaatatgaatgaagtttgcaagcatccctttgaatgtagaaactgctaacatgctgttttatggcaaggccataatgagtatgttaagaatttcaggtgtagggcaaggttgccctttgtaacaagtggactaaaattgaaattattatctcagatattctgtattgcacctgaaaccatgacctttatttttccatttcgtttaataatttccattttgttgtctactccttcccacaaaaaaactatttgacatctgacacatttcacagtctcactatcctgcatttattagccttttcttcctttgaaaatacacacaattatgacttttaaggagtattttgagatttcagacatcttcagaaggtatctagaccctcttgaaagccactaacacctttctgcagttctgatattctagtttgagaaagagagagaactatttgagaagctgtagctaaagagtatatagcagctgattcataattgaaaaaaaattctcaattctgtttttgatgatcctttataaaacattaatgaggaaagacaagtgtttagacaaaagtattttagtttataaattcagcacatatgtaacatttatttggtccatatttctctatttttcttcacaattaaaatgattgctagcaccacacaactagaatttgaaaattcagtataatgaaagctttatatcacattaattcaactgcaaatgtatgcctgtttgtaggcattatttgtaattcatagtgctaaaaataaaagtgtctagggctcagtaatattttgtcatcttactcttactgcttttagtaaaccttttaggcaagattcatctcagtgaagtgaacaatcatttcttcatagaaggtcaagcctttttaagccactcttaaaatttatgcctaatttgaaatccacagtccttgaccagtttaaaaaagagaggaaaaagaagacactattttatatgtgattataattgtttgcacaaacacttttccaccttcctctgtgccccattacctctgtgccactcagtcaccccaaatctctaacctttagtaatgtgtatgcctgcaaatattatgtgtttgcctgctgcaaaattgaaggtgtatttttatagacaaggtagaagcctctgaaaatgtataccaaatgtcttgttttgtagctaaggtcgggaaaaattgtatctgaggtttatgttccagctaatgttatcaaatttatgcttcaaactgtgatattttaataccaaaatcgattttcagcataatacaaaatatctcattttcactgatagaaaattgcttttaagtgttgatccttagaaatcttatttttttctataaccttagaatttgatcatatgatggtcataggaactttttctgccatgtataaatcacacttggttttgctcaaagaacagcatgaagtggtgaattgtttccatgaaacaattattgagaatgggaatacagtatatctggaaatgacacagtataatacaagttacagtagcatttgtcacaaaaaccacttgtcagcatgtgtaaacttaattttaaagcctattctaatcactcgagtttattattttattgttcgctatgctggttgactcatcttagtttcttcaactacccaaaaaaataccaatttttttcctctcttgtatgactactttttcaaactgttttcctttgcaggggg

SEQ ID NO: 112919 - DNA, 615 bp, Artificial Sequence
  derived and/or modified sequence
atgagcatcctgctgcccaacatggccgagttcgacaccatcagcgagctggaggaggaggaggaggaggaggccgccaccagcagcagcagccccagcagcagcagcagcgtgagcggccccgacgacgacgaggaggacgaggaggaggaggaggaggaggaggaggaggaggaggaggaggaggaggaggaggaggaggaggccccccccccccccagagtggtgagcgaggagcacctgagaagatacgcccccgaccccgtgctggtgagaggcgccggccacatcaccgtgttcggcctgagcaacaagttcgacaccgagttccccagcgtgctgaccggcaaggtggcccccgaggagttcaagaccagcatcggcagagtgaacgcctgcctgaagaaggccctgcccgtgaacgtgaagtggctgctgtgcggctgcctgtgctgctgctgcaccctgggctgcagcctgtggcccgtgatctgcctgaacaagagaaccagaagaagcatccagaagctgatcgagtgggagaacaacagactgtaccacaaggtgatcctgatcgagttcctgcccaagtaccccatcttcagacccgactag

SEQ ID NO: 112920 - DNA, 615 bp, Artificial Sequence
  derived and/or modified sequence
atgagcatcttactgcctaacatggctgaattcgataccataagcgagctggaagaagaagaggaggaggaagcagctacctcatcctcttcacccagcagcagttcttctgtgtctggtcctgacgatgacgaggaggacgaggaggaggaggaggaggaggaggaagaggaggaagaggaggaagaagaggaggaagaggaggcgccccccccgcctcgcgtcgtgtctgaggaacatctgagacggtatgcaccagatcccgtgttagtacggggcgccgggcacattaccgtgtttgggctctccaataagtttgacactgaattcccttccgtgttaaccgggaaagtggcacctgaagagttcaaaacctcaataggcagggtcaacgcctgccttaaaaaagcgctacccgtgaacgtgaaatggctactttgtggctgcctttgttgttgttgtacactgggatgctcactctggccagttatttgccttaacaaacgcactagaaggagcattcagaagctcatcgagtgggaaaacaatcggctgtatcataaagtgatcctaatagagtttctgcctaagtaccctatttttcggccagactag

SEQ ID NO: 112921 - DNA, 615 bp, Artificial Sequence
  derived and/or modified sequence
atgagcatcctgctgcccaacatggccgagtttgacaccatcagcgagctggaggaggaggaggaggaggaggccgccaccagcagcagcagccccagcagcagcagctctgtgtctggcccagatgatgatgaggaggatgaggaggaggaggaggaggaggaggaggaggaggaggaggaggaggaggaggaggaggaggaggcccctcctccaccccgggtggtgtctgaggagcacctgcggcgctatgccccagaccctgtgctggtgcggggggccggccacatcaccgtgtttggcctgagcaacaagtttgacacagagttccccagcgtgctgaccgggaaggtggcccctgaggagttcaagaccagcatcggccgggtgaatgcctgcctgaagaaggccctgcctgtgaatgtgaagtggctgctgtgtggctgcctgtgctgctgctgcaccctgggctgcagcctgtggcctgtgatctgcctgaacaagaggaccaggaggagcatccagaagctgattgagtgggagaacaacagactctaccacaaggtgatcctgattgagttcctgcccaagtaccccatcttccggccagactag

SEQ ID NO: 112922 - DNA, 615 bp, Artificial Sequence
  derived and/or modified sequence
atgagcatcctgctgcccaacatggccgagttcgacaccatcagcgagctcgaggaagaggaagaggaagaggctgcaacttcatcgagtagcccatcctcgagctctagtgtgagcgggcccgatgacgatgaagaagatgaagaagaagaggaggaggaggaagaggaagaggaagaggaggaagaggaggaggaagaagaggcccccccaccaccgagagtcgtcagcgaagagcatcttcggcgctatgcacctgaccctgtacttgtgaggggcgccggtcatattaccgtgtttggcctgagcaataaattcgatacggaattcccatccgtcttaactgggaaggtggcaccggaggagttcaaaacaagcatcggccgcgtcaatgcctgcctaaagaaggctttgccagtaaacgtaaagtggcttttgtgcgggtgcctctgctgttgttgcacccttggctgtagtctgtggccggtcatatgtctgaataaacgcacccgcaggtctatccagaagcttattgaatgggaaaacaaccgcctatatcataaggtgattctgattgagtttttgccaaagtaccctattttcagacccgattag

SEQ ID NO: 112923 - DNA, 615 bp, Artificial Sequence
  derived and/or modified sequence
atgagcatcttactgcctaatatggctgaattcgatactatcagtgagcttgaagaagaagaggaggaagaggcagctacctctagtagttcaccttcttcctcttcctcggtgtcagggccagacgatgacgaggaggatgaggaagaggaggaagaggaagaagaggaagaagaagaagaagaggaagaggaggaggaagaggcaccgcctcccccacgcgtggtcagtgaagaacatttacggcgatatgcacctgatcccgtgctagtgcgcggtgcaggacatattactgtgttcgggttatctaacaagtttgataccgagttcccaagcgtgttaaccgggaaggtggcacccgaagagttcaaaacctcaatcggacgggttaacgcatgcctaaagaaggctcttcctgtaaatgtgaagtggctgttgtgtgggtgtctgtgttgctgctgcacactcgggtgctcactatggccagtgatttgccttaataaaaggacccgaagatcaatacagaaacttatagagtgggagaataacagactataccacaaggtgatcctgattgagtttttgcccaagtacccaatcttccggccagactag

SEQ ID NO: 112924 - protein, 170 aa, Artificial Sequence
  derived and/or modified sequence
MTEPWLALGTSWTLPLQDRELGPEELDELQAAFEEFDTDRDGYISHRELGDCMRTLGYMPTEMELLEVSQHIKMRMGGRVDFEEFVELIGPKLREETAHMLGVRELRIAFREFDRDRDGRITVAELREAVPALLGEPLAGPELDEMLREVDLNGDGTVDFDEFVMMLSRH

SEQ ID NO: 112925 - DNA, 513 bp, Artificial Sequence
  derived and/or modified sequence
atgaccgagccatggctggcgctcggcacaagctggacactgccgctgcaagaccgagagcttggaccagaggagttagatgagctgcaggcagctttcgaagagttcgacaccgatcgtgacggttacatttcccatagagaactcggtgactgcatgagaacactcgggtatatgccaacagaaatggagctgcttgaagtgtctcagcacattaaaatgagaatgggcggccgcgtggactttgaggaatttgtcgaactgatcgggcctaagttgagggaagagacagcccatatgttaggggttagggaactgcggatagcctttagagagtttgatagagatcgcgatggtcgcataacagtggccgaactgcgcgaggctgtgccagccttgctgggcgaacctctggctggccccgaactggacgagatgcttcgggaggtggatctcaatggcgatggtacggtggacttcgatgaatttgtgatgatgctttcgcgacactag

SEQ ID NO: 112926 - DNA, 513 bp, Artificial Sequence
  derived and/or modified sequence
atgacagagccctggctggccctgggcacctcctggaccctgcccctgcaggaccgggagctgggccctgaggagctggatgagctgcaggccgcctttgaggagtttgacacagacagagatggctacatcagccaccgggagctgggggactgcatgaggaccctgggctacatgcccacagagatggagctgctggaggtgtcccagcacatcaagatgaggatgggcggccgggtggactttgaggagtttgtggagctgattggccccaagctgcgggaggagacagcccacatgctgggcgtgcgggagctgcgcatcgccttccgggagtttgaccgggacagagatggccgcatcaccgtggccgagctgcgggaggccgtgcctgccctgctgggggagcccctggccggccctgagctggatgagatgctgcgggaggtggacctgaatggagatggcaccgtggactttgatgaatttgtgatgatgctgagccgccactag

SEQ ID NO: 112927 - DNA, 513 bp, Artificial Sequence
  derived and/or modified sequence
atgaccgagccctggctggccctgggcaccagctggaccctgcccctacaggaccgcgaactgggacctgaggagctcgatgaactgcaggccgccttcgaggagtttgacaccgatcgggacgggtatatctctcaccgcgaactgggtgattgtatgcgcactctcgggtacatgccaactgagatggaactgctcgaggtgtcccagcacatcaagatgcgaatgggtggccgagtcgactttgaggagttcgtggaactcatcgggccgaagctccgtgaagagaccgctcacatgctcggtgtccgagaactgaggatcgcctttcgcgagttcgatcgggaccgcgatggacggatcacagtagccgagcttagagaggctgtgcctgcgctgttaggcgagcccttggccggtccagaactggacgagatgttacgcgaggttgacctgaacggtgatggtacggtcgacttcgacgagttcgtcatgatgttgagcaggcactag

SEQ ID NO: 112928 - DNA, 513 bp, Artificial Sequence
  derived and/or modified sequence
atgacggaaccatggctggcgctcggcacctcctggacgctacccctgcaagaccgggagttaggccctgaggagctcgatgagctgcaggcagccttcgaagagtttgatacagaccgagacggatatataagccacagggagctaggggattgtatgcgcactctcggctacatgcccaccgaaatggaattgctggaggtgagccaacacatcaagatgcgcatgggtggacgggtagacttcgaggagtttgttgaactgatcggaccaaaactgcgggaagagacagctcatatgcttggagtgagggagctgcgtatcgccttcagggaatttgaccgtgatcgtgacgggagaatcaccgtggccgagctacgtgaggcggtccccgcactgctgggagagccattagctgggccagaactagacgagatgttgcgagaagtggacctgaatggcgacggcacagttgactttgatgagttcgtcatgatgctctcccgccattag
